United States Patent Application Publication US 2023/0026259 A1 - sequence listing, part 75

SEQ ID NO: 177615 - DNA, 2162 bp, Homo sapiens
  Payload ID: 14854
  Gene Symbol: RBM3
  Gene Name: RNA binding motif (RNP1, RRM) protein 3
  Uniprot ID: P98179
  ENST ID: ENST00000376759
  CDS Start-End: 64-537
gctcctccgagctcgctgttcgtccgggttttttacgttttaatttccaggacttgaactgccatgtcctctgaagaaggaaagctcttcgtgggagggctcaactttaacaccgacgagcaggcactggaagaccacttcagcagtttcggacctatctctgaggtggtcgttgtcaaggaccgggagactcagcggtccaggggttttggtttcatcaccttcaccaacccagagcatgcttcagttgccatgagagccatgaacggagagtctctggatggtcgtcagatccgtgtggatcatgcaggcaagtctgctcggggaaccagaggaggtggctttggggcccatgggcgtggtcgcagctactctagaggtggtggggaccagggctatgggagtggcaggtattatgacagtcgacctggagggtatggatatggatatggacgttccagagactataatggcagaaaccagggtggttatgaccgctactcaggaggaaattacagagacaattatgacaactgaaatgagacatgcacataatatagatacacaaggaataatttctgatccaggatcgtccttccaaatggctgtatttataaaggtttttggagctgcaccgaagcatcttattttatagtatatcaaccttttgtttttaaattgacctgccaaggtagctgaagaccttttagacagttccatctttttttttaaattttttctgcctatttaaagacaaattatgggacgtttgtagaacctgagtatttttctttttaccagttttttagtttgagctcttaggtttattggagctagcaataattggttctggcaagtttggccagactgacttcaaaaaattaatgtgtatccagggacattttaaaaacctgtacacagtgtttattgtggttaggaagcaatttcccaatgtacctataagaaatgtgcatcaagccagcctgaccaacatggtgaaaccccatctgtactaaacataaaaaaattagcctggcatggtggtgtacgcctgtaatcccagtgacttgggaggctgaggcaggagaatcgcttgaacccgggaggcggaggttgcagtgagctaagatcgcgccactgtactccagcctgggcaacagcgagactccatctcaaaaaaaaaggaaatgtgtatcaagaacatgattatccagcggtattttctaattcagatcatcaaactgattatatagaagagttggctttaaaatgtttgcaaatgtctttttttttttaatactggaagaaaaaatattctgttgtgtctcatacagtgcttaggatgtctttcacagagcttattaaaaagatgaaacctgagaacaaactgctttattcttactcagcccattttgcaaattaaaagtgggggcagaggtgggcggatcacctgaggtcaggagttcgagaccagcctggccaacagggcaaaaccccatctctactaaaaatacaaaagttagcggggcgtggtggcgggtgcatgtaatcccagctactcgggaggctgaggcaggagaattgcttgaacccaggaggcggaagttgcagtgagctgagattgtgccactgcactccagcctaggtgacagcaagactctgtctcaaaaaaaaaaaaatggcacatcaacgagagggaggcttggagaatatttggttggtgggtgggcagggactgccagagggttaggtgtacattgaggcctgaggcctgctggaattgggtttccttaactggtctcttatcttagtcccattgttctgagaacataagcacctaatctcatggcgtgagctaatccctatcataaatagtggtaccagttcattccttcccctgaaatgatgggggttgggcagagatgcactgaactcatctttgtgtatgagggccatgagagaggcctggtttgaaaacaatgctaagagctcagattccaggatttatgtaggggctcttctacttcccaggtatttgacctcaggtgagtcatttaatttcagccttatgccattttacattttctgtggagggttaggttaattggcatataaagccactgagaagagttggcaaagctctcagtcacggggatttgatc

SEQ ID NO: 177616 - DNA, 3201 bp, Homo sapiens
  Payload ID: 14855
  Gene Symbol: RBM10
  Gene Name: RNA binding motif protein 10
  ENST ID: ENST00000329236
  CDS Start-End: 1-2988
atgtctgggagcccttccttgacagcccgggccgagaaggtgagcgtcgacgctggtcgtgggggcggagagtccctgcaggaagcatcacccaggctggcagatcatggtagcagcagcgggggtggctgggaagtgaaacggagccagcggctgaggaggggccccagcagcccccgaaggccctatcaggacatggagtatgaaagacgtggtggtcgtggtgacaggactggccgctatggagccactgaccgctcgcaggatgatggtggggagaaccgcagccgagaccacgactaccgggacatggactaccgttcatatcctcgcgagtatggcagccaggagggcaagcatgactatgacgactcatctgaggagcagagtgcggaggattcctacgaggcctccccgggctccgagactcagcgtaggcggcggcggcggcacaggcacagccccaccggcccgccaggcttcccccgagacggcgactatcgggaccaggactatcggaccgagcaaggggaggaggaggaggaggaggaggatgaggaggaggaggagaaggccagtaacatcgtcatgctgaggatgctgccacaggcagccactgaggatgacatccgtggccagctgcagtcgcacggcgtgcaagcacgggaggttcggctgatgcggaacaaatcttcaggtcagagccggggcttcgccttcgtcgagtttagtcacttgcaggacgctacacgatggatggaagccaatcagcactccctcaacatcctgggccagaaggtgtcgatgcactacagtgaccccaagcccaagatcaatgaggactggctgtgcaataagtgtggcgtccagaacttcaaacgccgagagaagtgcttcaaatgtggcgtgcccaagtcagaggcagagcagaagctgcccctcggcacgaggctggatcagcagacactgccactgggtggccgggagctgagccagggcctgcttcccctgccgcagccctaccaggcccagggagtcctggcctcccaagccctgtcacagggctcggagccaagctcagagaacgccaatgacaccatcattttgcgcaacctgaacccacacagcaccatggattccatcctgggggccctggcaccctacgcggtgctgtcctcctccaacgtgcgcgtcataaaggacaagcagacccaactgaaccgcggctttgccttcatccagctctccaccatcgtggaggcagcccagctgctgcagatcctgcaggccctgcacccaccactcactatcgacggcaagaccatcaatgttgagtttgccaagggttctaagagggacatggcctccaatgaaggcagtcgcatcagtgctgcctctgtggccagcactgccattgctgcggcccagtgggccatctcacaggcctcccaaggtggggagggtacctgggccacctccgaggagccgccggtcgactacagctactaccaacaggatgagggctatggcaacagccagggcacagagtcttccctctatgcccatggctacctcaagggcaccaagggccctggcatcactggaaccaaaggggatcccactggagcaggtcccgaggcctccctagagcctggggccgactctgtgtcgatgcaggctttctctcgcgcccagcctggtgctgctcctggcatctaccaacaatcagccgaggcgagcagtagccagggcactgctgccaacagccagtcgtataccatcatgtcacccgctgtgctcaaatctgagctccagagccctacccatcctagttctgctctcccaccggctaccagccccactgcccaggaatcctacagccagtaccctgttcccgacgtctctacctaccagtacgatgagacctccggctactactatgacccccagaccggcctctactatgaccccaactcccagtattactacaatgctcagagccagcagtacctgtactgggatggggagaggcggacctatgttcccgccctggagcagtcggccgacggacataaggagacaggggcaccctcgaaggagggcaaagagaagaaggagaagcacaagaccaagacagctcaacagattgccaaggacatggaacgctgggcccgcagtctcaacaaacaaaaagaaaacttcaaaaatagcttccagcctatcagctccctgcgagatgacgagaggcgggagtcagccactgcagatgctggctatgccatcctcgagaagaagggagcactagccgagagacagcacaccagcatggatctcccgaaattggccagtgacgaccgcccaagccctccgcgaggactggtggcagcctacagcggggagagtgacagtgaggaggagcaggagcgtgggggccctgagcgggaggagaagctcaccgactggcagaagctggcctgtctgctctgccgacgccagttccccagcaaagaggcgctcatccggcaccagcagctctcagggctccacaagcaaaaccttgagattcaccggcgagcccacttgtcagaaaacgagctagaagcactagagaagaatgacatggagcaaatgaagtaccgggaccgtgcagctgaacgcagagaaaagtatggcatccccgagccgccagagcccaagaggaggaagtacggcggcatatccacagcctctgtagacttcgagcagcctactcgggacgggctgggcagtgacaacattggcagtcggatgctgcaggccatgggctggaaagagggcagcggcctgggccgcaagaagcagggcattgtaacgcctatcgaggcccaaacacgggtgcggggctccggcctgggtgcacggggcagctcctacggggtcacctcaaccgagtcctacaaggagacactgcacaagacaatggtgacccgcttcaacgaggcccagtgagcagcttcaagagcaacttctccacatgttgggtgtccatcctggggcagggaaggacagagtgttggatggctgggacggggccttgctcttgtcggccagcccactccccagccagagagggcttgaccaaatcaaattgaggtggtgacttttgttggaaaattgggctgggatcacgtcctgttttgtaataaaagctgaaaagtctgc

SEQ ID NO: 177617 - DNA, 3108 bp, Homo sapiens
  Payload ID: 14855
  Gene Symbol: RBM10
  Gene Name: RNA binding motif protein 10
  Uniprot ID: P98175
  ENST ID: ENST00000345781
  CDS Start-End: 333-2894
gtgactgtggccggctgggagtaggcggcagtgagtttccctgggagggcagcgcgcttggcgcttctcccctccccccgatctgcctccagtctcggacttggttgttgcgcgctccggctccggctgagctgggagagttggaggaggtggcggcgggcagaggtgatgtctgggagcccttccttgacagcccgggccgagaagagtccctgcaggaagcatcacccaggctggcagatcatggtagcagcagcgggggtggctgggaagtgaaacggagccagcggctgaggaggggccccagcagcccccgaaggccctatcaggacatggagtatgaaagacgtggtggtcgtggtgacaggactggccgctatggagccactgaccgctcgcaggatgatggtggggagaaccgcagccgagaccacgactaccgggacatggactaccgttcatatcctcgcgagtatggcagccaggagggcaagcatgactatgacgactcatctgaggagcagagtgcggagatccgtggccagctgcagtcgcacggcgtgcaagcacgggaggttcggctgatgcggaacaaatcttcaggtcagagccggggcttcgccttcgtcgagtttagtcacttgcaggacgctacacgatggatggaagccaatcagcactccctcaacatcctgggccagaaggtgtcgatgcactacagtgaccccaagcccaagatcaatgaggactggctgtgcaataagtgtggcgtccagaacttcaaacgccgagagaagtgcttcaaatgtggcgtgcccaagtcagaggcagagcagaagctgcccctcggcacgaggctggatcagcagacactgccactgggtggccgggagctgagccagggcctgcttcccctgccgcagccctaccaggcccagggagtcctggcctcccaagccctgtcacagggctcggagccaagctcagagaacgccaatgacaccatcattttgcgcaacctgaacccacacagcaccatggattccatcctgggggccctggcaccctacgcggtgctgtcctcctccaacgtgcgcgtcataaaggacaagcagacccaactgaaccgcggctttgccttcatccagctctccaccatcgtggaggcagcccagctgctgcagatcctgcaggccctgcacccaccactcactatcgacggcaagaccatcaatgttgagtttgccaagggttctaagagggacatggcctccaatgaaggcagtcgcatcagtgctgcctctgtggccagcactgccattgctgcggcccagtgggccatctcacaggcctcccaaggtggggagggtacctgggccacctccgaggagccgccggtcgactacagctactaccaacaggatgagggctatggcaacagccagggcacagagtcttccctctatgcccatggctacctcaagggcaccaagggccctggcatcactggaaccaaaggggatcccactggagcaggtcccgaggcctccctagagcctggggccgactctgtgtcgatgcaggctttctctcgcgcccagcctggtgctgctcctggcatctaccaacaatcagccgaggcgagcagtagccagggcactgctgccaacagccagtcgtataccatcatgtcacccgctgtgctcaaatctgagctccagagccctacccatcctagttctgctctcccaccggctaccagccccactgcccaggaatcctacagccagtaccctgttcccgacgtctctacctaccagtacgatgagacctccggctactactatgacccccagaccggcctctactatgaccccaactcccagtattactacaatgctcagagccagcagtacctgtactgggatggggagaggcggacctatgttcccgccctggagcagtcggccgacggacataaggagacaggggcaccctcgaaggagggcaaagagaagaaggagaagcacaagaccaagacagctcaacagattgccaaggacatggaacgctgggcccgcagtctcaacaaacaaaaagaaaacttcaaaaatagcttccagcctatcagctccctgcgagatgacgagaggcgggagtcagccactgcagatgctggctatgccatcctcgagaagaagggagcactagccgagagacagcacaccagcatggatctcccgaaattggccagtgacgaccgcccaagccctccgcgaggactggtggcagcctacagcggggagagtgacagtgaggaggagcaggagcgtgggggccctgagcgggaggagaagctcaccgactggcagaagctggcctgtctgctctgccgacgccagttccccagcaaagaggcgctcatccggcaccagcagctctcagggctccacaagcaaaaccttgagattcaccggcgagcccacttgtcagaaaacgagctagaagcactagagaagaatgacatggagcaaatgaagtaccgggaccgtgcagctgaacgcagagaaaagtatggcatccccgagccgccagagcccaagaggaggaagtacggcggcatatccacagcctctgtagacttcgagcagcctactcgggacgggctgggcagtgacaacattggcagtcggatgctgcaggccatgggctggaaagagggcagcggcctgggccgcaagaagcagggcattgtaacgcctatcgaggcccaaacacgggtgcggggctccggcctgggtgcacggggcagctcctacggggtcacctcaaccgagtcctacaaggagacactgcacaagacaatggtgacccgcttcaacgaggcccagtgagcagcttcaagagcaacttctccacatgttgggtgtccatcctggggcagggaaggacagagtgttggatggctgggacggggccttgctcttgtcggccagcccactccccagccagagagggcttgaccaaatcaaattgaggtggtgacttttgttggaaaattgggctgggatcacgtcctgttttgtaataaaagctgaaaagtctgca

SEQ ID NO: 177618 - DNA, 3747 bp, Homo sapiens
  Payload ID: 14855
  Gene Symbol: RBM10
  Gene Name: RNA binding motif protein 10
  Uniprot ID: P98175
  ENST ID: ENST00000377604
  CDS Start-End: 743-3535
gccaaccattttcggccaggctgagaaatttcttattgatgggtctgctcatttcctgcataggaagaaatcggtgacatttgggtggatacagttcccagccaatcgccccgagttccctcgcccactggggaaagaggcagagcttccgctagtctttcatcttcaaaggaaatcaagcttctaaaaagcgggccctgccgaattggctaatagctactccttttctccactaggggagcgttcgcaaggggtgtggggaggtggccagcgcttgccaatcagaggaggccagggctgtcccctagcgggcggtgaccaatcgccggggccggccagagcgcgcttccttagtaggtggatggtggtcggagcgccgactcccttctcgtcgtcgccattttgagctggtgactgtggccggctgggagtaggcggcagtgagtttccctgggagggcagcgcgcttggcgcttctcccctccccccgatctgcctccagtctcggacttggttgttgcgcgctccggctccggctgagctgggagagttggaggaggtggcggcgggcagaggtgatgtctgggagcccttccttgacagcccgggccgagaagagtccctgcaggaagcatcacccaggctggcagatcatggtagcagcagcgggggtggctgggaagtgaaacggagccagcggctgaggaggggccccagcagcccccgaaggccctatcaggacatggagtatgaaagacgtggtggtcgtggtgacaggactggccgctatggagccactgaccgctcgcaggatgatggtggggagaaccgcagccgagaccacgactaccgggacatggactaccgttcatatcctcgcgagtatggcagccaggagggcaagcatgactatgacgactcatctgaggagcagagtgcggaggattcctacgaggcctccccgggctccgagactcagcgtaggcggcggcggcggcacaggcacagccccaccggcccgccaggcttcccccgagacggcgactatcgggaccaggactatcggaccgagcaaggggaggaggaggaggaggaggaggatgaggaggaggaggagaaggccagtaacatcgtcatgctgaggatgctgccacaggcagccactgaggatgacatccgtggccagctgcagtcgcacggcgtgcaagcacgggaggttcggctgatgcggaacaaatcttcaggtcagagccggggcttcgccttcgtcgagtttagtcacttgcaggacgctacacgatggatggaagccaatcagcactccctcaacatcctgggccagaaggtgtcgatgcactacagtgaccccaagcccaagatcaatgaggactggctgtgcaataagtgtggcgtccagaacttcaaacgccgagagaagtgcttcaaatgtggcgtgcccaagtcagaggcagagcagaagctgcccctcggcacgaggctggatcagcagacactgccactgggtggccgggagctgagccagggcctgcttcccctgccgcagccctaccaggcccagggagtcctggcctcccaagccctgtcacagggctcggagccaagctcagagaacgccaatgacaccatcattttgcgcaacctgaacccacacagcaccatggattccatcctgggggccctggcaccctacgcggtgctgtcctcctccaacgtgcgcgtcataaaggacaagcagacccaactgaaccgcggctttgccttcatccagctctccaccatcgtggaggcagcccagctgctgcagatcctgcaggccctgcacccaccactcactatcgacggcaagaccatcaatgttgagtttgccaagggttctaagagggacatggcctccaatgaaggcagtcgcatcagtgctgcctctgtggccagcactgccattgctgcggcccagtgggccatctcacaggcctcccaaggtggggagggtacctgggccacctccgaggagccgccggtcgactacagctactaccaacaggatgagggctatggcaacagccagggcacagagtcttccctctatgcccatggctacctcaagggcaccaagggccctggcatcactggaaccaaaggggatcccactggagcaggtcccgaggcctccctagagcctggggccgactctgtgtcgatgcaggctttctctcgcgcccagcctggtgctgctcctggcatctaccaacaatcagccgaggcgagcagtagccagggcactgctgccaacagccagtcgtataccatcatgtcacccgctgtgctcaaatctgagctccagagccctacccatcctagttctgctctcccaccggctaccagccccactgcccaggaatcctacagccagtaccctgttcccgacgtctctacctaccagtacgatgagacctccggctactactatgacccccagaccggcctctactatgaccccaactcccagtattactacaatgctcagagccagcagtacctgtactgggatggggagaggcggacctatgttcccgccctggagcagtcggccgacggacataaggagacaggggcaccctcgaaggagggcaaagagaagaaggagaagcacaagaccaagacagctcaacagattgccaaggacatggaacgctgggcccgcagtctcaacaaacaaaaagaaaacttcaaaaatagcttccagcctatcagctccctgcgagatgacgagaggcgggagtcagccactgcagatgctggctatgccatcctcgagaagaagggagcactagccgagagacagcacaccagcatggatctcccgaaattggccagtgacgaccgcccaagccctccgcgaggactggtggcagcctacagcggggagagtgacagtgaggaggagcaggagcgtgggggccctgagcgggaggagaagctcaccgactggcagaagctggcctgtctgctctgccgacgccagttccccagcaaagaggcgctcatccggcaccagcagctctcagggctccacaagcaaaaccttgagattcaccggcgagcccacttgtcagaaaacgagctagaagcactagagaagaatgacatggagcaaatgaagtaccgggaccgtgcagctgaacgcagagaaaagtatggcatccccgagccgccagagcccaagaggaggaagtacggcggcatatccacagcctctgtagacttcgagcagcctactcgggacgggctgggcagtgacaacattggcagtcggatgctgcaggccatgggctggaaagagggcagcggcctgggccgcaagaagcagggcattgtaacgcctatcgaggcccaaacacgggtgcggggctccggcctgggtgcacggggcagctcctacggggtcacctcaaccgagtcctacaaggagacactgcacaagacaatggtgacccgcttcaacgaggcccagtgagcagcttcaagagcaacttctccacatgttgggtgtccatcctggggcagggaaggacagagtgttggatggctgggacggggccttgctcttgtcggccagcccactccccagccagagagggcttgaccaaatcaaattgaggtggtgacttttgttggaaaattgggctgggatcacgtcctgttttgtaataaaagctgaaaagtctg

SEQ ID NO: 177619 - DNA, 3105 bp, Homo sapiens
  Payload ID: 14855
  Gene Symbol: RBM10
  Gene Name: RNA binding motif protein 10
  Uniprot ID: P98175
  ENST ID: ENST00000628161
  CDS Start-End: 333-2891
gtgactgtggccggctgggagtaggcggcagtgagtttccctgggagggcagcgcgcttggcgcttctcccctccccccgatctgcctccagtctcggacttggttgttgcgcgctccggctccggctgagctgggagagttggaggaggtggcggcgggcagaggtgatgtctgggagcccttccttgacagcccgggccgagaagagtccctgcaggaagcatcacccaggctggcagatcatggtagcagcagcgggggtggctgggaagtgaaacggagccagcggctgaggaggggccccagcagcccccgaaggccctatcaggacatggagtatgaaagacgtggtggtcgtggtgacaggactggccgctatggagccactgaccgctcgcaggatgatggtggggagaaccgcagccgagaccacgactaccgggacatggactaccgttcatatcctcgcgagtatggcagccaggagggcaagcatgactatgacgactcatctgaggagcagagtgcggagatccgtggccagctgcagtcgcacggcgtgcaagcacgggaggttcggctgatgcggaacaaatcttcaggtcagagccggggcttcgccttcgtcgagtttagtcacttgcaggacgctacacgatggatggaagccaatcagcactccctcaacatcctgggccagaaggtgtcgatgcactacagtgaccccaagcccaagatcaatgaggactggctgtgcaataagtgtggcgtccagaacttcaaacgccgagagaagtgcttcaaatgtggcgtgcccaagtcagaggcagagcagaagctgcccctcggcacgaggctggatcagcagacactgccactgggtggccgggagctgagccagggcctgcttcccctgccgcagccctaccaggcccagggagtcctggcctcccaagccctgtcacagggctcggagccaagctcagagaacgccaatgacaccatcattttgcgcaacctgaacccacacagcaccatggattccatcctgggggccctggcaccctacgcggtgctgtcctcctccaacgtgcgcgtcataaaggacaagcagacccaactgaaccgcggctttgccttcatccagctctccaccatcgaggcagcccagctgctgcagatcctgcaggccctgcacccaccactcactatcgacggcaagaccatcaatgttgagtttgccaagggttctaagagggacatggcctccaatgaaggcagtcgcatcagtgctgcctctgtggccagcactgccattgctgcggcccagtgggccatctcacaggcctcccaaggtggggagggtacctgggccacctccgaggagccgccggtcgactacagctactaccaacaggatgagggctatggcaacagccagggcacagagtcttccctctatgcccatggctacctcaagggcaccaagggccctggcatcactggaaccaaaggggatcccactggagcaggtcccgaggcctccctagagcctggggccgactctgtgtcgatgcaggctttctctcgcgcccagcctggtgctgctcctggcatctaccaacaatcagccgaggcgagcagtagccagggcactgctgccaacagccagtcgtataccatcatgtcacccgctgtgctcaaatctgagctccagagccctacccatcctagttctgctctcccaccggctaccagccccactgcccaggaatcctacagccagtaccctgttcccgacgtctctacctaccagtacgatgagacctccggctactactatgacccccagaccggcctctactatgaccccaactcccagtattactacaatgctcagagccagcagtacctgtactgggatggggagaggcggacctatgttcccgccctggagcagtcggccgacggacataaggagacaggggcaccctcgaaggagggcaaagagaagaaggagaagcacaagaccaagacagctcaacagattgccaaggacatggaacgctgggcccgcagtctcaacaaacaaaaagaaaacttcaaaaatagcttccagcctatcagctccctgcgagatgacgagaggcgggagtcagccactgcagatgctggctatgccatcctcgagaagaagggagcactagccgagagacagcacaccagcatggatctcccgaaattggccagtgacgaccgcccaagccctccgcgaggactggtggcagcctacagcggggagagtgacagtgaggaggagcaggagcgtgggggccctgagcgggaggagaagctcaccgactggcagaagctggcctgtctgctctgccgacgccagttccccagcaaagaggcgctcatccggcaccagcagctctcagggctccacaagcaaaaccttgagattcaccggcgagcccacttgtcagaaaacgagctagaagcactagagaagaatgacatggagcaaatgaagtaccgggaccgtgcagctgaacgcagagaaaagtatggcatccccgagccgccagagcccaagaggaggaagtacggcggcatatccacagcctctgtagacttcgagcagcctactcgggacgggctgggcagtgacaacattggcagtcggatgctgcaggccatgggctggaaagagggcagcggcctgggccgcaagaagcagggcattgtaacgcctatcgaggcccaaacacgggtgcggggctccggcctgggtgcacggggcagctcctacggggtcacctcaaccgagtcctacaaggagacactgcacaagacaatggtgacccgcttcaacgaggcccagtgagcagcttcaagagcaacttctccacatgttgggtgtccatcctggggcagggaaggacagagtgttggatggctgggacggggccttgctcttgtcggccagcccactccccagccagagagggcttgaccaaatcaaattgaggtggtgacttttgttggaaaattgggctgggatcacgtcctgttttgtaataaaagctgaaaagtctgca

SEQ ID NO: 177620 - DNA, 1934 bp, Homo sapiens
  Payload ID: 14856
  Gene Symbol: RBM11
  Gene Name: RNA binding motif protein 11
  Uniprot ID: P57052
  ENST ID: ENST00000400577
  CDS Start-End: 10-855
gaccggaggatgttccctgctcaggaggaggccgacaggaccgtgtttgttgggaatttagaggcccgagttcgggaagagattctgtacgagctgttccttcaggcggggccactaaccaaagtgactatatgcaaagacagagaaggaaagccaaagtcttttggatttgtctgctttaaacacccagaatcggtgtcttatgccatagctttgctgaatggaattcgtttatatggaagaccaattaacgtgcagtatcgatttgggagttctcgctcttctgaaccagctaaccaaagttttgagagctgtgttaagataaattcacacaactacaggaatgaagaaatgttggtgggcagatcttcctttcccatgcagtattttccaattaataatacttctttacctcaagaatattttctctttcagaagatgcagtggcatgtgtataatccagtgctgcagcttccttactatgaaatgacagctccacttcctaatagtgcatccgtgtcttcctcactgaatcatgttccagatcttgaggctggacccagctcatataaatggactcaccaacaaccaagtgactctgacctttatcagatgacagctccacttcctaatagtgcatccgtgtcttcctcactgaatcatgttccagatcttgaggctggacccagctcatataaatggactcaccaacaaccaagtgactctgacctttatcagatgaataaacgaaagagacaaaagcaaacaagtgatagtgatagtagcacagacaacaacagaggcaacgaatgtagccaaaagttccgaaagtctaagaagaagaaaagatactagtattacctacaaatgaaacttacctacactgatcttagttctcttatgaaaaaaataagatgttatcccatcaaataaacaatgtcatggctatcttgtcttttgaaatatgtagtaataagacttatctctggtttgctgttcaatttttgccttgaacgacaaaagctttctaaaaatagtataatgtaccactttttgtatttgtcatgatatttttgacccattggcaacaaatagactattgtcattttattagtaccaatgatgaaatttcaccaaactattaatcaaaagtcacttattgaacacattgataaagcatcatgttccctttgattatcccctataaccaacactcaactacaaataggctgggattcaatgtggagtggtggatttcctgaaagaaagtagtgcagatatttaaggattgcatattgttcctaatgaggatgtaataaacaggcattagtacccctttcttttagtacctaaatatgttgtttctgagccatattcttcttcaggtttattttataaagtgaggacatatgataatgataccaaaggaaagataattatcatgaaaccaacttttggatcattccctttttatacaattgtgtatttatagggataccttcctcttctcacatattaattgtatgtcattaaaatcagttggctatgtcagtgtgtattattcacctcttttgctagcaaggtttgagatgctatattaacatttaaatcatgaaaatgagcaagtaaatagaataatattttattaatgtatgatatgtaatacttattgtctaaatcaagtttcctatttttggtttatttattttagaagaaaaataaaattatttgggcatttttgtttatagctcattacaaactagagtgatgaatatatatatttactaaagctaattgaaagagtcatgcaactcagttgggaattaaccactcaattcaatagtaaaagccatgcttggatgtttcttttgcatgttgcctagcattttatagatatttattatttaaaaaaataaagatatgtttttaatgaa

SEQ ID NO: 177621 - DNA, 5332 bp, Homo sapiens
  Payload ID: 14857
  Gene Symbol: RBM12
  Gene Name: RNA binding motif protein 12
  Uniprot ID: Q9NTZ6
  ENST ID: ENST00000359646
  CDS Start-End: 152-2950
ggcgaaggaggtggtggctgcgttgggctccgggaagccgttcgggctggggctgtcggccgcggggcggaggcactcgcgcggggggtaattcggggtctgggttctggtgccgcgcagctttccccggtgtgtgtggtttcagcgcagcatggctgtggtcatccgtttgcaaggtctcccaattgtggcggggaccatggacattcgccacttcttctctggattgaccattcctgatgggggcgtgcatattgtagggggtgaactgggtgaggctttcatcgtttttgccactgatgaagatgcaaggcttggtatgatgcgcacaggtggtacaattaaagggtcaaaagtaacactattgttgagtagtaagacggaaatgcagaatatgattgaactgagtcgtaggcgttttgaaactgccaacttagatataccaccagcaaatgccagtagatcaggaccaccacctagctcaggaatgagtagcagggtaaacttgcccacaacagtatccaactttaataatccatcacccagtgtagttactgccaccacttctgttcatgaaagcaacaaaaacatacagacattttccacagccagcgtaggaacagctcctccaaatatgggggcttcctttgggagcccaacgtttagctcaactgttccaagcacagcctctccaatgaacacagtcccgccgccaccaattcctccaattccagcgatgccatctctgccaccaatgccatccattcccccaattccagttcctcctccagtacctacattgcctcctgtgcctcctgtgcccccgattcccccagttccttctgtgccacccatgaccccactgccacccatgtcgggcatgccgcccttgaatccgccacctgtggcacctctacctgctggaatgaatggctctggagcacctatgaatttgaacaataatctgaatcctatgtttcttggtccgttgaatcctgttaaccctatccagatgaactctcagagcagtgtgaagccactccccatcaaccctgatgatctgtatgtcagtgtgcatggaatgcccttttctgcaatggaaaatgatgtcagagatttttttcatgggctccgtgttgatgcagtgcatttgttgaaagatcatgtaggtcgaaataatgggaatggattggttaagtttctctcccctcaagatacatttgaagctttgaaacgaaacagaatgctgatgattcaacgctatgtggaagttagccctgccacagaaagacagtgggtagctgctggaggccatatcacttttaagcaaaatatgggaccttctggacaaactcatccccctcctcagacacttcccaggtcaaaatcgcccagtgggcagaaaagatcaaggtcaagatcaccacatgaggctggtttttgtgtttacttgaaagggctaccatttgaagcagaaaacaaacatgtcattgatttttttaaaaagctggatattgtggaagatagtatttatatagcttatggacccaatgggaaagcaactggcgaaggctttgtagagttcagaaatgaggctgactataaggctgctctgtgtcgtcataaacagtacatgggcaatcgctttattcaagttcatccaattactaagaaaggtatgctagaaaagatagatatgattcgaaaaagactgcagaacttcagctatgaccagagggaaatgatactaaatccagagggggatgtcaactctgccaaagtctgtgcccacataacaaatattccattcagcattacaaagatggatgttcttcagttcctagaaggaatcccagtggatgaaaatgctgtacatgttcttgttgataacaatgggcaaggtctaggacaggcattggttcagtttaaaaatgaagatgatgcacgtaagtctgaacgcttacaccgtaaaaaacttaatgggagagaagcttttgttcatgtagttaccctagaagatatgagagagattgagaaaaatccccctgcccaaggaaaaaagggattaaagatgcctgtgccaggtaatcctgcagttccaggaatgcccaatgcgggactgcccggtgtgggactgcccagtgcaggacttcccggtgcaggcctgcccagcacaggactgcctggttcagcaataaccagtgcaggactgcctggtgcgggaatgcccagtgcaggaatacctagtgcaggaggtgaagagcatgccttcctgactgtaggatcaaaggaagccaataatgggcctccatttaactttcctggtaattttggtggatcaaatgcctttgggccaccaatccctcctccaggattaggaggcggggcctttggtgatgctaggcctggtatgccttcagttggaaacagtggtttgcctggtctaggactggatgttccgggttttggaggtggaccaaacaatttaagtgggccatcgggatttggagggggccctcagaattttggaaatggccctggtagcttaggcggtcccccggggtttggaagtggccctcctggtcttggaagtgcccctgggcatttgggtgggccaccagcttttgggcctggccccggccccggccccggccctggcccaatccatattggtggtccccctggctttgcatctagttctggaaaaccaggaccgacagtaattaaagtgcaaaacatgccctttactgtgtctattgatgagattttagatttcttttatggctatcaagtaatcccaggctcagtgtgtttaaaatacaatgaaaaaggtatgcccacaggtgaagccatggtggcctttgagtctcgggatgaagccacagctgctgtcattgacttaaatgacaggcctataggttcaagaaaagtaaaacttgtattagggtagccattcacatcattttttatagggtagatcttcatattgctgtgattaatgcatccagattgttttcctagtatttccaggttagaacctgtggattgtttcaattgcatatagcttggtttccataacatagagcattggttgactgtttacagaagactcactcaccaggataaacattgctgtatgttacagtaaagctatctggagagaacacataaatgattttggcataccattagagaaaccatttgtaaaactcaaatgaccacataaagcttatcaaggagtctagattggttttgttttataccatatgggatgaagaaaatagaaatgtcagtagaactcattgagggtgctcttgccagctgctgaaaatagaagttggctactctcagaatttggtttaaagctggacagatttgctttgttatagggtaaagctttgtctaaagtcctcattttcttttaaaattgaataaaatttctgtatacagattcattgtatgtacctttattgcttcttaagggtccttgctgtatagacagtcctgcttcagaagttgctgctttgtttgtctaattgactcatttgtaaatgagcagaactgttttgttggtttttttccctaaatataaaagtccacacttcgtttgtgctataacctcaaactttgatttctaatgtcacacttaaaactgtgtggaataagacttttgccataaaaataaactatggagtcctttatctaccagagcctttttggtttgaccgccacgatttaggttagtcagtttaaaaattgttcatgttgtttggatggtatcgaaaaccagaaaccacttttaataatgtgtttaagatacttgatttgaagtccttttcatatggactaattgtagtatcaatttcctcctgtcccgattatgtgaaattttggcctttaaacaaagaggggcccattcataagaaagtgttatatctaggtttttaaaactgaagttgaaattatctttgttagcagtagtagtatagaataaaagatccgtatgctggttcgtagattgatacgtgttagtcctgttatttggaggctttttggcatagttgttcgatcaggagcctgtttactaaaagtcttcatacagagtacaagtgcagccgccagaggagaaaattgagattcttgaccctttcatactcttttctttggtattcaggacactaaggcaggaggaccacatgagttctggttggtaagtgtccttgtcatgaaaacacttgccttacaaggctctaattatgatttccctagtcagtgctctgaagatgtgtcacattatattataaacaatacggaaggggagataggtgagatgatatgaaaaacaaattttctcactgtcataaaaggctctaattatggttactttccttgtgatgaaaaacttggccttacagggctctagttatggttactttccctagtcaatgctctgaaaatgtgtcacattataaacaatacagaaggagagatagatgagagatcatgaaaaccaaattttatcttttacatggcccctttgtcttcgtttgaaacatccccaacatttcctacaaatcagcgtagttacaaaggggtcagtcttttaaaataagtatttcctattaaactatatatatatacagtgcctttttggtgttgtgagtcagtggaacactgaaatacagcggttgtgtaatttaagagtggcaacagtttcatttgataagatttgaaaaggctttttatcactacaatcttagaggattgacagtacaggatttttgtttaagagaaggattgtttagactcaagaggtgactatgttgtgggtcttttgataattcatgaatacagatttgctttgaccgatcactagatactgcctcctcaatttcaaaagcaatataacgtttgtatatgctgtttaatttaagttaatgttaagtaatcatttctcattccaaagacaatgcaaaaaacttcagcactgcttgagagttgtatttcagccacagatattttctccattggaaagctattttcattttagaaaaatgggttgtttgaagatgaaagtcttttatcttttttcacaatttattttggttatatgttcgtacattcttattaaatatttcatacactttattgcaactactttgttatttctacatcttagataaatgctgaaaaggaaaacgatttcattgttcatctaattaaataaattaaaagagcggtttgtgtagaaattggagagaactatgttttatatgaatcacaacagtgctcgttgtggactgtaattaaatgctttgccctctggaacttg

SEQ ID NO: 177622 - DNA, 5213 bp, Homo sapiens
  Payload ID: 14857
  Gene Symbol: RBM12
  Gene Name: RNA binding motif protein 12
  Uniprot ID: Q9NTZ6
  ENST ID: ENST00000374104
  CDS Start-End: 217-3015
attttgtgaagcggcgaaggaggtggtggctgcgttgggctccgggaagccgttcgggctggggctgtcggccgcggggcggaggcactcgcgcggggggtaattcggggtctgggttctggtgccgcgcagctttccccggattgacttggcctctacttcttgttaaggaaattcatctcttgttttatcaggtgtgtgtggtttcagcgcagcatggctgtggtcatccgtttgcaaggtctcccaattgtggcggggaccatggacattcgccacttcttctctggattgaccattcctgatgggggcgtgcatattgtagggggtgaactgggtgaggctttcatcgtttttgccactgatgaagatgcaaggcttggtatgatgcgcacaggtggtacaattaaagggtcaaaagtaacactattgttgagtagtaagacggaaatgcagaatatgattgaactgagtcgtaggcgttttgaaactgccaacttagatataccaccagcaaatgccagtagatcaggaccaccacctagctcaggaatgagtagcagggtaaacttgcccacaacagtatccaactttaataatccatcacccagtgtagttactgccaccacttctgttcatgaaagcaacaaaaacatacagacattttccacagccagcgtaggaacagctcctccaaatatgggggcttcctttgggagcccaacgtttagctcaactgttccaagcacagcctctccaatgaacacagtcccgccgccaccaattcctccaattccagcgatgccatctctgccaccaatgccatccattcccccaattccagttcctcctccagtacctacattgcctcctgtgcctcctgtgcccccgattcccccagttccttctgtgccacccatgaccccactgccacccatgtcgggcatgccgcccttgaatccgccacctgtggcacctctacctgctggaatgaatggctctggagcacctatgaatttgaacaataatctgaatcctatgtttcttggtccgttgaatcctgttaaccctatccagatgaactctcagagcagtgtgaagccactccccatcaaccctgatgatctgtatgtcagtgtgcatggaatgcccttttctgcaatggaaaatgatgtcagagatttttttcatgggctccgtgttgatgcagtgcatttgttgaaagatcatgtaggtcgaaataatgggaatggattggttaagtttctctcccctcaagatacatttgaagctttgaaacgaaacagaatgctgatgattcaacgctatgtggaagttagccctgccacagaaagacagtgggtagctgctggaggccatatcacttttaagcaaaatatgggaccttctggacaaactcatccccctcctcagacacttcccaggtcaaaatcgcccagtgggcagaaaagatcaaggtcaagatcaccacatgaggctggtttttgtgtttacttgaaagggctaccatttgaagcagaaaacaaacatgtcattgatttttttaaaaagctggatattgtggaagatagtatttatatagcttatggacccaatgggaaagcaactggcgaaggctttgtagagttcagaaatgaggctgactataaggctgctctgtgtcgtcataaacagtacatgggcaatcgctttattcaagttcatccaattactaagaaaggtatgctagaaaagatagatatgattcgaaaaagactgcagaacttcagctatgaccagagggaaatgatactaaatccagagggggatgtcaactctgccaaagtctgtgcccacataacaaatattccattcagcattacaaagatggatgttcttcagttcctagaaggaatcccagtggatgaaaatgctgtacatgttcttgttgataacaatgggcaaggtctaggacaggcattggttcagtttaaaaatgaagatgatgcacgtaagtctgaacgcttacaccgtaaaaaacttaatgggagagaagcttttgttcatgtagttaccctagaagatatgagagagattgagaaaaatccccctgcccaaggaaaaaagggattaaagatgcctgtgccaggtaatcctgcagttccaggaatgcccaatgcgggactgcccggtgtgggactgcccagtgcaggacttcccggtgcaggcctgcccagcacaggactgcctggttcagcaataaccagtgcaggactgcctggtgcgggaatgcccagtgcaggaatacctagtgcaggaggtgaagagcatgccttcctgactgtaggatcaaaggaagccaataatgggcctccatttaactttcctggtaattttggtggatcaaatgcctttgggccaccaatccctcctccaggattaggaggcggggcctttggtgatgctaggcctggtatgccttcagttggaaacagtggtttgcctggtctaggactggatgttccgggttttggaggtggaccaaacaatttaagtgggccatcgggatttggagggggccctcagaattttggaaatggccctggtagcttaggcggtcccccggggtttggaagtggccctcctggtcttggaagtgcccctgggcatttgggtgggccaccagcttttgggcctggccccggccccggccccggccctggcccaatccatattggtggtccccctggctttgcatctagttctggaaaaccaggaccgacagtaattaaagtgcaaaacatgccctttactgtgtctattgatgagattttagatttcttttatggctatcaagtaatcccaggctcagtgtgtttaaaatacaatgaaaaaggtatgcccacaggtgaagccatggtggcctttgagtctcgggatgaagccacagctgctgtcattgacttaaatgacaggcctataggttcaagaaaagtaaaacttgtattagggtagccattcacatcattttttatagggtagatcttcatattgctgtgattaatgcatccagattgttttcctagtatttccaggttagaacctgtggattgtttcaattgcatatagcttggtttccataacatagagcattggttgactgtttacagaagactcactcaccaggataaacattgctgtatgttacagtaaagctatctggagagaacacataaatgattttggcataccattagagaaaccatttgtaaaactcaaatgaccacataaagcttatcaaggagtctagattggttttgttttataccatatgggatgaagaaaatagaaatgtcagtagaactcattgagggtgctcttgccagctgctgaaaatagaagttggctactctcagaatttggtttaaagctggacagatttgctttgttatagggtaaagctttgtctaaagtcctcattttcttttaaaattgaataaaatttctgtatacagattcattgtatgtacctttattgcttcttaagggtccttgctgtatagacagtcctgcttcagaagttgctgctttgtttgtctaattgactcatttgtaaatgagcagaactgttttgttggtttttttccctaaatataaaagtccacacttcgtttgtgctataacctcaaactttgatttctaatgtcacacttaaaactgtgtggaataagacttttgccataaaaataaactatggagtcctttatctaccagagcctttttggtttgaccgccacgatttaggttagtcagtttaaaaattgttcatgttgtttggatggtatcgaaaaccagaaaccacttttaataatgtgtttaagatacttgatttgaagtccttttcatatggactaattgtagtatcaatttcctcctgtcccgattatgtgaaattttggcctttaaacaaagaggggcccattcataagaaagtgttatatctaggtttttaaaactgaagttgaaattatctttgttagcagtagtagtatagaataaaagatccgtatgctggttcgtagattgatacgtgttagtcctgttatttggaggctttttggcatagttgttcgatcaggagcctgtttactaaaagtcttcatacagagtacaagtgcagccgccagaggagaaaattgagattcttgaccctttcatactcttttctttggtattcaggacactaaggcaggaggaccacatgagttctggttggtaagtgtccttgtcatgaaaacacttgccttacaaggctctaattatgatttccctagtcagtgctctgaagatgtgtcacattatattataaacaatacggaaggggagataggtgagatgatatgaaaaacaaattttctcactgtcataaaaggctctaattatggttactttccttgtgatgaaaaacttggccttacagggctctagttatggttactttccctagtcaatgctctgaaaatgtgtcacattataaacaatacagaaggagagatagatgagagatcatgaaaaccaaattttatcttttacatggcccctttgtcttcgtttgaaacatccccaacatttcctacaaatcagcgtagttacaaaggggtcagtcttttaaaataagtatttcctattaaactatatatatatacagtgcctttttggtgttgtgagtcagtggaacactgaaatacagcggttgtgtaatttaagagtggcaacagtttcatttgataagatttgaaaaggctttttatcactacaatcttagaggattgacagtacaggatttttgtttaagagaaggattgtttagactcaagaggtgactatgttgtgggtcttttgataattcatgaatacagatttgctttgaccgatcactagatactgcctcctcaatttcaaaagcaatataacgtttgtatatgctgtttaatttaagttaatgttaagtaatcatttctcattccaaagacaatgcaaaaaacttcagcactgcttgagagttgtatttcagccacagatattttctccattggaaagctattttcattttagaaaaatgggttgtttgaagatgaaagtcttttatcttttttcacaatttattttggttatatgttcgtacattcttattaaatatttcatacacttta

SEQ ID NO: 177623 - DNA, 6662 bp, Homo sapiens
  Payload ID: 14857
  Gene Symbol: RBM12
  Gene Name: RNA binding motif protein 12
  Uniprot ID: Q9NTZ6
  ENST ID: ENST00000374114
  CDS Start-End: 265-3063
gagcgggccgacggccattttgtgaagcggcgaaggaggtggtggctgcgttgggctccgggaagccgttcgggctggggctgtcggccgcggggcggaggcactcgcgcggggggtaattcggggtctgggttctggtgccgcgcagctttccccgtctaaaagttggttttaattggttgcccacaggattgacttggcctctacttcttgttaaggaaattcatctcttgttttatcaggtgtgtgtggtttcagcgcagcatggctgtggtcatccgtttgcaaggtctcccaattgtggcggggaccatggacattcgccacttcttctctggattgaccattcctgatgggggcgtgcatattgtagggggtgaactgggtgaggctttcatcgtttttgccactgatgaagatgcaaggcttggtatgatgcgcacaggtggtacaattaaagggtcaaaagtaacactattgttgagtagtaagacggaaatgcagaatatgattgaactgagtcgtaggcgttttgaaactgccaacttagatataccaccagcaaatgccagtagatcaggaccaccacctagctcaggaatgagtagcagggtaaacttgcccacaacagtatccaactttaataatccatcacccagtgtagttactgccaccacttctgttcatgaaagcaacaaaaacatacagacattttccacagccagcgtaggaacagctcctccaaatatgggggcttcctttgggagcccaacgtttagctcaactgttccaagcacagcctctccaatgaacacagtcccgccgccaccaattcctccaattccagcgatgccatctctgccaccaatgccatccattcccccaattccagttcctcctccagtacctacattgcctcctgtgcctcctgtgcccccgattcccccagttccttctgtgccacccatgaccccactgccacccatgtcgggcatgccgcccttgaatccgccacctgtggcacctctacctgctggaatgaatggctctggagcacctatgaatttgaacaataatctgaatcctatgtttcttggtccgttgaatcctgttaaccctatccagatgaactctcagagcagtgtgaagccactccccatcaaccctgatgatctgtatgtcagtgtgcatggaatgcccttttctgcaatggaaaatgatgtcagagatttttttcatgggctccgtgttgatgcagtgcatttgttgaaagatcatgtaggtcgaaataatgggaatggattggttaagtttctctcccctcaagatacatttgaagctttgaaacgaaacagaatgctgatgattcaacgctatgtggaagttagccctgccacagaaagacagtgggtagctgctggaggccatatcacttttaagcaaaatatgggaccttctggacaaactcatccccctcctcagacacttcccaggtcaaaatcgcccagtgggcagaaaagatcaaggtcaagatcaccacatgaggctggtttttgtgtttacttgaaagggctaccatttgaagcagaaaacaaacatgtcattgatttttttaaaaagctggatattgtggaagatagtatttatatagcttatggacccaatgggaaagcaactggcgaaggctttgtagagttcagaaatgaggctgactataaggctgctctgtgtcgtcataaacagtacatgggcaatcgctttattcaagttcatccaattactaagaaaggtatgctagaaaagatagatatgattcgaaaaagactgcagaacttcagctatgaccagagggaaatgatactaaatccagagggggatgtcaactctgccaaagtctgtgcccacataacaaatattccattcagcattacaaagatggatgttcttcagttcctagaaggaatcccagtggatgaaaatgctgtacatgttcttgttgataacaatgggcaaggtctaggacaggcattggttcagtttaaaaatgaagatgatgcacgtaagtctgaacgcttacaccgtaaaaaacttaatgggagagaagcttttgttcatgtagttaccctagaagatatgagagagattgagaaaaatccccctgcccaaggaaaaaagggattaaagatgcctgtgccaggtaatcctgcagttccaggaatgcccaatgcgggactgcccggtgtgggactgcccagtgcaggacttcccggtgcaggcctgcccagcacaggactgcctggttcagcaataaccagtgcaggactgcctggtgcgggaatgcccagtgcaggaatacctagtgcaggaggtgaagagcatgccttcctgactgtaggatcaaaggaagccaataatgggcctccatttaactttcctggtaattttggtggatcaaatgcctttgggccaccaatccctcctccaggattaggaggcggggcctttggtgatgctaggcctggtatgccttcagttggaaacagtggtttgcctggtctaggactggatgttccgggttttggaggtggaccaaacaatttaagtgggccatcgggatttggagggggccctcagaattttggaaatggccctggtagcttaggcggtcccccggggtttggaagtggccctcctggtcttggaagtgcccctgggcatttgggtgggccaccagcttttgggcctggccccggccccggccccggccctggcccaatccatattggtggtccccctggctttgcatctagttctggaaaaccaggaccgacagtaattaaagtgcaaaacatgccctttactgtgtctattgatgagattttagatttcttttatggctatcaagtaatcccaggctcagtgtgtttaaaatacaatgaaaaaggtatgcccacaggtgaagccatggtggcctttgagtctcgggatgaagccacagctgctgtcattgacttaaatgacaggcctataggttcaagaaaagtaaaacttgtattagggtagccattcacatcattttttatagggtagatcttcatattgctgtgattaatgcatccagattgttttcctagtatttccaggttagaacctgtggattgtttcaattgcatatagcttggtttccataacatagagcattggttgactgtttacagaagactcactcaccaggataaacattgctgtatgttacagtaaagctatctggagagaacacataaatgattttggcataccattagagaaaccatttgtaaaactcaaatgaccacataaagcttatcaaggagtctagattggttttgttttataccatatgggatgaagaaaatagaaatgtcagtagaactcattgagggtgctcttgccagctgctgaaaatagaagttggctactctcagaatttggtttaaagctggacagatttgctttgttatagggtaaagctttgtctaaagtcctcattttcttttaaaattgaataaaatttctgtatacagattcattgtatgtacctttattgcttcttaagggtccttgctgtatagacagtcctgcttcagaagttgctgctttgtttgtctaattgactcatttgtaaatgagcagaactgttttgttggtttttttccctaaatataaaagtccacacttcgtttgtgctataacctcaaactttgatttctaatgtcacacttaaaactgtgtggaataagacttttgccataaaaataaactatggagtcctttatctaccagagcctttttggtttgaccgccacgatttaggttagtcagtttaaaaattgttcatgttgtttggatggtatcgaaaaccagaaaccacttttaataatgtgtttaagatacttgatttgaagtccttttcatatggactaattgtagtatcaatttcctcctgtcccgattatgtgaaattttggcctttaaacaaagaggggcccattcataagaaagtgttatatctaggtttttaaaactgaagttgaaattatctttgttagcagtagtagtatagaataaaagatccgtatgctggttcgtagattgatacgtgttagtcctgttatttggaggctttttggcatagttgttcgatcaggagcctgtttactaaaagtcttcatacagagtacaagtgcagccgccagaggagaaaattgagattcttgaccctttcatactcttttctttggtattcaggacactaaggcaggaggaccacatgagttctggttggtaagtgtccttgtcatgaaaacacttgccttacaaggctctaattatgatttccctagtcagtgctctgaagatgtgtcacattatattataaacaatacggaaggggagataggtgagatgatatgaaaaacaaattttctcactgtcataaaaggctctaattatggttactttccttgtgatgaaaaacttggccttacagggctctagttatggttactttccctagtcaatgctctgaaaatgtgtcacattataaacaatacagaaggagagatagatgagagatcatgaaaaccaaattttatcttttacatggcccctttgtcttcgtttgaaacatccccaacatttcctacaaatcagcgtagttacaaaggggtcagtcttttaaaataagtatttcctattaaactatatatatatacagtgcctttttggtgttgtgagtcagtggaacactgaaatacagcggttgtgtaatttaagagtggcaacagtttcatttgataagatttgaaaaggctttttatcactacaatcttagaggattgacagtacaggatttttgtttaagagaaggattgtttagactcaagaggtgactatgttgtgggtcttttgataattcatgaatacagatttgctttgaccgatcactagatactgcctcctcaatttcaaaagcaatataacgtttgtatatgctgtttaatttaagttaatgttaagtaatcatttctcattccaaagacaatgcaaaaaacttcagcactgcttgagagttgtatttcagccacagatattttctccattggaaagctattttcattttagaaaaatgggttgtttgaagatgaaagtcttttatcttttttcacaatttattttggttatatgttcgtacattcttattaaatatttcatacactttattgcaactactttgttatttctacatcttagataaatgctgaaaaggaaaacgatttcattgttcatctaattaaataaattaaaagagcggtttgtgtagaaattggagagaactatgttttatatgaatcacaacagtgctcgttgtggactgtaattaaatgctttgccctctggaacttgatttttgtgtatctgagatttattaacagtgctaactgctaaggatactgtttatcttgttctgggcattggagtttcagtttttaaaaaattcttgaaaatgtattctgtgaaactactcatacctctcttcctgcgaattttctcctaagaactaggtttggggtagaaatgaattgacattattttctcatttgctttgtatggtatgaaggatttgtaaagctttgctcaaagttgtgtgcatttgtaaacactatcatgatattttcaattttatgtgtaaattttattgtctgtttttggtgactctgacattaatggaagagaatattttccattagatttaattttttttcctctcccttctgattttttttttattggtgttcatttttcttttgatttaaaggattagagaaatctacaaatgtatgtcataaataagcaaatttgtaaacttttctgaactttagtgaaacatttagttcacaagcataatttggaggtgtgttctgtgtttacacagtagtttggatgtacaattattattagtggctttttaaaaaatgaaacagtgttaagtgaaatgtagttcctagctttgtactccaagttgtcaaagcatcaacaatgaaaattcgattaggaaactttatttaaaatttcaggtagtaatattcagtgtagttaaggccagtcttaacccactggatgaaaatctaggactgtatggaagtaagcaaacattacatttttaggtggaaatagtcagccttgcataaaaacaaggatgcgtgaaagccttaaattccagctcccttttactggagtctgtggttgtgtacaggtatgggccaagtgtaaaatctcatcaattttaagaacactcgggaaatgagtaaagaaaatgtaaaattgctgctagtcaaatcttttggaaagaatttctggaagtggtcactttaaaaattattttccacccttgcaaaattgccacatttaaattgttttactggcagttctatagtagtccagactttagaaaccaaacacaacaaaatggcttgttgccaatatggccacaacattgccagcaaatactgccttggcatcactcagcagaggtttttgtttataaagatgaagtcttgaatactgttcaataaacttgtcaaaaaataaaacaggctgatgcttttaatgctttaactgca

SEQ ID NO: 177624 - DNA, 583 bp, Homo sapiens
  Payload ID: 14857
  Gene Symbol: RBM12
  Gene Name: RNA binding motif protein 12
  ENST ID: ENST00000431148
  CDS Start-End: 154-583
aaccacgccgttcctcccccttctggaacgcggagccgctgagcgggccgacggccattttgtgaagcggcgaaggaggattgacttggcctctacttcttgttaaggaaattcatctcttgttttatcaggtgtgtgtggtttcagcgcagcatggctgtggtcatccgtttgcaaggtctcccaattgtggcggggaccatggacattcgccacttcttctctggattgaccattcctgatgggggcgtgcatattgtagggggtgaactgggtgaggctttcatcgtttttgccactgatgaagatgcaaggcttggtatgatgcgcacaggtggtacaattaaagggtcaaaagtaacactattgttgagtagtaagacggaaatgcagaatatgattgaactgagtcgtaggcgttttgaaactgccaacttagatataccaccagcaaatgccagtagatcaggaccaccacctagctcaggaatgagtagcagggtaaacttgcccacaacagtatccaactttaataatccatcacccagtgtagttactgccaccacttctgttcatgaaagca

SEQ ID NO: 177625 - DNA, 1068 bp, Homo sapiens
  Payload ID: 14857
  Gene Symbol: RBM12
  Gene Name: RNA binding motif protein 12
  ENST ID: ENST00000424458
  CDS Start-End: 196-1068
cggcgaaggaggtggtggctgcgttgggctccgggaagccgttcgggctggggctgtcggccgcggggcggaggcactcgcgcgggggtctaaaagttggttttaattggttgcccacaggattgacttggcctctacttcttgttaaggaaattcatctcttgttttatcaggtgtgtgtggtttcagcgcagcatggctgtggtcatccgtttgcaaggtctcccaattgtggcggggaccatggacattcgccacttcttctctggattgaccattcctgatgggggcgtgcatattgtagggggtgaactgggtgaggctttcatcgtttttgccactgatgaagatgcaaggcttggtatgatgcgcacaggtggtacaattaaagggtcaaaagtaacactattgttgagtagtaagacggaaatgcagaatatgattgaactgagtcgtaggcgttttgaaactgccaacttagatataccaccagcaaatgccagtagatcaggaccaccacctagctcaggaatgagtagcagggtaaacttgcccacaacagtatccaactttaataatccatcacccagtgtagttactgccaccacttctgttcatgaaagcaacaaaaacatacagacattttccacagccagcgtaggaacagctcctccaaatatgggggcttcctttgggagcccaacgtttagctcaactgttccaagcacagcctctccaatgaacacagtcccgccgccaccaattcctccaattccagcgatgccatctctgccaccaatgccatccattcccccaattccagttcctcctccagtacctacattgcctcctgtgcctcctgtgcccccgattcccccagttccttctgtgccacccatgaccccactgccacccatgtcgggcatgccgcccttgaatccgccacctgtggcacctctacctgctggaatgaatggctctggagcacctatgaatttgaacaataatctgaatcctatgtttcttggtccgttgaatcctgttaaccctatccagatgaactctcag

SEQ ID NO: 177626 - DNA, 565 bp, Homo sapiens
  Payload ID: 14857
  Gene Symbol: RBM12
  Gene Name: RNA binding motif protein 12
  ENST ID: ENST00000435161
  CDS Start-End: 164-565
ctggaacgcggagccgctgagcgggccgacggccattttgtgaagcggcgaaggagtctaaaagttggttttaattggttgcccacaggattgacttggcctctacttcttgttaaggaaattcatctcttgttttatcaggtgtgtgtggtttcagcgcagcatggctgtggtcatccgtttgcaaggtctcccaattgtggcggggaccatggacattcgccacttcttctctggattgaccattcctgatgggggcgtgcatattgtagggggtgaactgggtgaggctttcatcgtttttgccactgatgaagatgcaaggcttggtatgatgcgcacaggtggtacaattaaagggtcaaaagtaacactattgttgagtagtaagacggaaatgcagaatatgattgaactgagtcgtaggcgttttgaaactgccaacttagatataccaccagcaaatgccagtagatcaggaccaccacctagctcaggaatgagtagcagggtaaacttgcccacaacagtatccaactttaataatccatcacccagtgtagtt

SEQ ID NO: 177627 - DNA, 7269 bp, Homo sapiens
  Payload ID: 14858
  Gene Symbol: RBM12B
  Gene Name: RNA binding motif protein 12B
  Uniprot ID: Q8IXT5
  ENST ID: ENST00000399300
  CDS Start-End: 215-3220
gtccgtttgtccggaccggaggggcagtgggcgccatcttcttctgggctcactgagggtctacctgttttggggaggctgctgcgacgaagagttccctcagcctccggccttgtgtgtccgactcggcagcagtgttaagttgcttttacagagttaacaggtctccaagaaattttaaaaaaggtcattattgctgtggtttgagctcagcatggctgtagtcatccgtttactggggcttccttttattgcggggcctgtggatattcgtcacttcttcacgggattgactattcctgatggaggagtgcatataattggaggggaaattggggaggcttttattatttttgcaacagatgaagatgcaagacgtgccataagtcgttcaggagggtttatcaaggattcatctgtagagctctttcttagtagcaaggcagaaatgcagaagactatagaaatgaaaagaactgatcgtgtaggaagagggcgtccaggatctgggacatcaggggttgacagcctgtctaattttattgagtctgttaaggaagaagcaagtaattctggatatggctcttcaattaatcaagatgctgggtttcatactaatggtacaggacatggtaatttaaggccaagaaagacaaggccattgaaggccgagaatccttacttgtttctacgaggtttgccttacctagtaaatgaagatgatgtacgtgtctttttctctggtttgtgcgtggatggagtaattttcttaaaacatcatgatggccgaaataatggtgatgccatagtaaaatttgcttcatgtgttgatgcttcaggaggtcttaaatgtcatagaagttttatgggttcaagatttatagaagtaatgcaaggatcagaacaacagtggattgagtttggtggtaatgcagttaaggagggtgacgttcttaggagatctgaagaacattctccaccaagaggaattaatgatagacattttcgaaaacggtctcattcaaaatctcccagaagaacacgttctcgttcccctcttggattttatgttcacttaaaaaatctgtccctcagtattgacgaaagagatttaagaaatttctttagaggtactgatctgactgatgaacagattaggtttttatataaagatgaaaatagaacaagatatgcctttgtgatgttcaagactctgaaagactataataccgctctgagtttacataagactgttttacaatatcgtccagttcatattgatccaatttctagaaaacaaatgctgaagttcattgcacgttatgaaaagaagagatcagggtcactagagagagataggcccggacatgtttcacaaaaatactctcaagaaggtaactctggccagaaactgtgcatctatataagaaattttccatttgatgttacaaaagttgaagtgcagaagttctttgcagactttcttcttgctgaggatgacatttacttgctttatgatgacaaaggtgttggtctgggagaagcattagtgaaatttaaatcagaagaacaggccatgaaagctgaacgtttaaaccgacgaagattcctagggacagaggtgttattaagacttatatctgaggcacaaatacaggagtttggtgtaaatttttctgtgatgtccagtgaaaaaatgcaagctcgctcacagtcacgtgagcgaggtgaccattcccatttatttgactcaaaagacccaccaatatactcagttggtgcttttgaaaactttagacatcagctagaggacttgaggcaactggataacttcaagcatccccagagggatttccggcagcctgacaggcaccctccagaagacttccgacactcctcagaggactttaggttccccccggaggacttcaggcactccccagaggacttcaggcgacctagggaggaagacttcaggcggccttctgaggaggacttcaggcgcccttgggaggaagatttcaggcgccctccggaggatgacttcaggcaccctagggaggaggactggaggaggccccttgaggaggactggaggcggccactggaggaggatttcaggcggtctcccacggaggacttcaggcagctccccgaggaggacttcaggcaaccccctgaggaggacttaaggtggctcccagaggaagatttcaggcggccacctgaggaggactggagacggcccccagaggaggactttaggcggcctcttcagggagaatggaggcgaccacccgaggatgacttcaggcggcccccagaggaggatttcaggcattcccctgaggaggacttcaggcagtcaccccaggagcatttccggaggccacctcaggagcatttccgtcggccacccccagagcatttccggagaccacctccagagcattttaggcggcctcccccagagcacttccggcggccacccccagagcacttcaggcggccacccccagagcatttcaggcgcccgcccccggagcacttccggagaccgccccaggagcatttcaggcggccgcctcaggagcatttcaggcgctcccgagaggaagatttcaggcacccaccagatgaagacttcaggggccctcctgatgaagactttaggcaccctcctgatgaggacttcaggagcccccaggaggaagattttagatgcccttctgatgaggacttcaggcagctcccagaggaagaccttagggaagctccggaggaggaccctagacttcctgacaattttagacctcctggtgaggattttaggagcccgcctgatgattttagaagtcaccgcccttttgtgaattttggtcgcccagaaggtggcaagtttgattttggaaagcataatatgggaagttttcctgaggggagatttatgcctgatccaaaaataaattgtggttcaggtagagtaactcctattaagataatgaatcttccatttaaagctaatgtgaatgaaattttagactttttccatggttacagaatcatacctgattcagtttcgatacagtataatgagcaaggcttacctacaggggaagccattgttgctatgataaactataatgaagctatggctgctattaaagatctaaatgataggccagttgggccccgaaaagttaagttaactttgctgtagagagagagcatttctaaattcagttatcttccttgcagtattgatggagtaaaatacatttgttttaaaaaagtgttttttttttaaattatctaatgaaatattttatttttgacctgtgaatagaacaaatgtaaatagtagaatgtgaatctggttttcttttgcttgcaaattgccattctttttttttttcaaatttaaaattacacatgctgtttttttctttgatggggagaaagaactcattccctgagttcattcatttttgttgatgtcatcggtaatcttcaagacttattgaagtagagttgtatttggggaagatacattttatattcacttttttttttctttctgtagtctacctcttttactcaaactgtataaggaaatagtgactgattgttcaggtttggcattttcattgctacctgcctgcagaattaatgccctcttccttgtctaagatattactgtgttaagtgtcctgttaattataaatagttcaaaatggacagactgtcaacttgaaatttacttatgtaaaaagcttaggtgattcttagggtttccatgttcataactttacaaagctttataaaaataaaattgcaacttaatagagctaattaacttgtatttgtataaaaagaaaaaagaattgcagctcgatattgtgaagtttttcaataacttcattaaaccatatttatgatgggagggaccagacattctatagtaataatgtatagtgctgtgtataattccatggtttcttcaacatcttatcaaccaagtaaaattaatacaagatacgcaaaagatagtaaaataagaatctaattataggtgcaaggggactcaggcttatgctggaagaatctgacaagtggtatagtttgtttttctaggaagaatttactgatgagtcacataacttgcatgtaatattaggttctcattttttagcttcgaaactgtgtccatgcaaagactctataactgttaagacttgtgtggttgaattttgacttctttgatattcagcatttagtgcatacattttgcaactagggaatttgattttctatacccacaataatatttatggctaacatttattaggcacttactatgtgctaggcactgtaagcactttacatgcataatctcggtattccctgtgagtacagggttaattatttacctctatttcacaaatgagataatgaagtgggatgaagtgcgaggttaagcaacttgcttgaagtcataggtagtaaatcgtggggccaattttaacccagacagaccactgactccagttcatgcttttgctgcctcacttttttaagtggtatttttaattaggaagaccatgctaaagatactttcaaggataaatgattattttctcacttcaattgttggtttaaaattagcataaataggtaaaaccagcatgctcaaacactgagctcaaacattaacattactaataaaaaaaaaaagagtgactttaaaagtttctttctatccagggtttctcttgggatactcatatggtatattactggcttatatttcaaaattattttattcaacatgattgactttggccttttataatttacataaaacataattttcctcagttctgtaatccagattttccccattgagtaaataatacaattaaatttacatatggtaatttagacatttaataggatattgcataggtagaatactttgtcagtacttagttactacctatatgtatttttgtgttacttttcagtgatttaaagaaatctaacagaaatctgcttaaatttgttttaaatagtgaatatcctgcttgctatggaatgaataaacaggtaaatttgatatgaaaaagcacctcagtatgattctttaaagtataagcttgtaagtagctaggataatgttaaattgattgtttggaatatccaaaccaagcacaatgaagaaagtagaaatgatatttttaattgagcaaagattgtatagatggttcatttggtcacccattttgaataatatatggaaagttaaaaaatgcttctcagatacaaaggaataaagctaagatgaagcttaacgtgagggattacttactgtggaattgcatttcaaactgggctgaggtgggatggtggtggtagataagaggccagctagagtaaacataagctttgtagttttattattttaagagtcagagtcttgttctgctggccaggctggagtgcagtggtctgataatggttcactgcagcttctaactcctgggctcaagctgtcttcctgcctcagcctcctgagagctgggactacaggtgtgtgccaccttgtctggctaaattttttattatttgtagagacagagtctcactgtgttgcccaggctgttctcaaatttctggcctcaagcaatcctcactccttggtctcccagaatgtgttgggattacaggtgtgagccactgtgcccagccttgtattttgatttttaaattaatttatatgaatatttccttttaccctataatgtatcagggcttaatatttttaaacttcattataaaaagttgattacagaaagtggtatcttctagttgggagccatctttgcacatctctctccaactctgcctttagtgatatgtcaataacaaattggccatggcaggagtattttacaccatggaaagtgataaatgcagcaaatcaaggaattcccctcctgttgtcccctcagaaagccagcttcccagcacctcatcaatttcaaatataaaaaaagaatagtaaattttcatgtacacatcactcagcttcagtaattgtcgtctcatagccagtttttcctctcctatcctcaaggtataccaggtacactggaggtgtattctctagcctgatacccagtggcatttgtcttaaagccaaacatttttgtctagaaattatctaaaaaaatgtagatcatgtctagaaagtcaatcccacaaccaagagataggtaaaaatcatgttaggagtgcatttctattaatttactgagatcactgttaagagcagtgattcttgatccatatatcacctgttaagtagtgaccttgctgcctctgtttttgcagtaaatattagctgttgtttattgagctgtattagatactatatgatgtataattatgtatgaattaactatcatttaattctgataatcctagtaaatgtactacaggttgagtattcctaatctggtaatctgaaatttcacatgctccgaaaatcacaaactttttgagtgccaacatgatgctcaaagaaaatgctcattgcagcatttaagatttcagatttttgggttaggaatgttgaactggtataatgcaaatactccaaaatctgaagaaatccaaagtcttaaatacttctggtcccaagcacttcagataaaggatactcaatttgtattcctattttggagataagagatggagacttacaggctgggttggttggattggttgcctgttttttgttgttgttgtagtggaagctaggaatggtttttcacattttttaagtgtacttaagtcttacatggttacatagttacctgtataatagtcttgaatttgcctaaacccacgaagaataacagtatttgctatctggccctttaagaagtttgccaacctaggctggtctaaataatgaaaattttacattaatgaaagtattttcatggatagtattccttttgttcttagaatatttctttgaggtaggcagaatgtatgttttattccagaattactgttttacgcagttttaactttacaaacaaggcaaataatgctcaagagaagttgctatttagtaagcagcaaaataataactctgttgttttcccccgaagtacaaccaaatttaaatactgagtgaggaagcagtaaatatccaatgatatcttgagtttcttaagaatatcaatttagggttttaaa

SEQ ID NO: 177628 - DNA, 6001 bp, Homo sapiens
  Payload ID: 14858
  Gene Symbol: RBM12B
  Gene Name: RNA binding motif protein 12B
  ENST ID: ENST00000517700
  CDS Start-End: 215-2860
gtccgtttgtccggaccggaggggcagtgggcgccatcttcttctgggctcactgagggtctacctgttttggggaggctgctgcgacgaagagttccctcagcctccggccttgtgtgtccgactcggcagcagtgttaagttgcttttacagagttaacaggtctccaagaaattttaaaaaaggtcattattgctgtggtttgagctcagcatggctgtagtcatccgtttactggggcttccttttattgcggggcctgtggatattcgtcacttcttcacgggattgactattcctgatggaggagtgcatataattggaggggaaattggggaggcttttattatttttgcaacagatgaagatgcaagacgtgccataagtcgttcaggagggtttatcaaggattcatctgtagagctctttcttagtagcaaggcagaaatgcagaagactatagaaatgaaaagaactgatcgtgtaggaagagggcgtccaggatctgggacatcaggggttgacagcctgtctaattttattgagtctgttaaggaagaagcaagtaattctggatatggctcttcaattaatcaagatgctgggtttcatactaatggtacaggacatggtaatttaaggccaagaaagacaaggccattgaaggccgagaatccttacttgtttctacgaggtttgccttacctagtaaatgaagatgatgtacgtgtctttttctctggtttgtgcgtggatggagtaattttcttaaaacatcatgatggccgaaataatggtgatgccatagtaaaatttgcttcatgtgttgatgcttcaggaggtcttaaatgtcatagaagttttatgggttcaagatttatagaagtaatgcaaggatcagaacaacagtggattgagtttggtggtaatgcagttaaggagggtgacgttcttaggagatctgaagaacattctccaccaagaggaattaatgatagacattttcgaaaacggtctcattcaaaatctcccagaagaacacgttctcgttcccctcttggattttatgttcacttaaaaaatctgtccctcagtattgacgaaagagatttaagaaatttctttagaggtactgatctgactgatgaacagattaggtttttatataaagatgaaaatagaacaagatatgcctttgtgatgttcaagactctgaaagactataataccgctctgagtttacataagactgttttacaatatcgtccagttcatattgatccaatttctagaaaacaaatgctgaagttcattgcacgttatgaaaagaagagatcagggtcactagagagagataggcccggacatgtttcacaaaaatactctcaagaaggtaactctggccagaaactgtgcatctatataagaaattttccatttgatgttacaaaagttgaagtgcagaagttctttgcagactttcttcttgctgaggatgacatttacttgctttatgatgacaaaggtgttggtctgggagaagcattagtgaaatttaaatcagaagaacaggccatgaaagctgaacgtttaaaccgacgaagattcctagggacagaggtgttattaagacttatatctgaggcacaaatacaggagtttggtgtaaatttttctgtgatgtccagtgaaaaaatgcaagctcgctcacagtcacgtgagcgaggtgaccattcccatttatttgactcaaaagacccaccaatatactcagttggtgcttttgaaaactttagacatcagctagaggacttgaggcaactggataacttcaagcatccccagagggatttccggcagcctgacaggcaccctccagaagacttccgacactcctcagaggactttaggttccccccggaggacttcaggcactccccagaggacttcaggcgacctagggaggaagacttcaggcggccttctgaggaggacttcaggcgcccttgggaggaagatttcaggcgccctccggaggatgacttcaggcaccctagggaggaggactggaggagaccacctccagagcattttaggcggcctcccccagagcacttccggcggccacccccagagcacttcaggcggccacccccagagcatttcaggcgcccgcccccggagcacttccggagaccgccccaggagcatttcaggcggccgcctcaggagcatttcaggcgctcccgagaggaagatttcaggcacccaccagatgaagacttcaggggccctcctgatgaagactttaggcaccctcctgatgaggacttcaggagcccccaggaggaagattttagatgcccttctgatgaggacttcaggcagctcccagaggaagaccttagggaagctccggaggaggaccctagacttcctgacaattttagacctcctggtgaggattttaggagcccgcctgatgattttagaagtcaccgcccttttgtgaattttggtcgcccagaaggtggcaagtttgattttggaaagcataatatgggaagttttcctgaggggagatttatgcctgatccaaaaataaattgtggttcaggtagagtaactcctattaagataatgaatcttccatttaaagctaatgtgaatgaaattttagactttttccatggttacagaatcatacctgattcagtttcgatacagtataatgagcaaggcttacctacaggggaagccattgttgctatgataaactataatgaagctatggctgctattaaagatctaaatgataggccagttgggccccgaaaagttaagttaactttgctgtagagagagagcatttctaaattcagttatcttccttgcagtattgatggagtaaaatacatttgttttaaaaaagtgttttttttttaaattatctaatgaaatattttatttttgacctgtgaatagaacaaatgtaaatagtagaatgtgaatctggttttcttttgcttgcaaattgccattctttttttttttcaaatttaaaattacacatgctgtttttttctttgatggggagaaagaactcattccctgagttcattcatttttgttgatgtcatcggtaatcttcaagacttattgaagtagagttgtatttggggaagatacattttatattcacttttttttttctttctgtagtctacctcttttactcaaactgtataaggaaatagtgactgattgttcaggtttggcattttcattgctacctgcctgcagaattaatgccctcttccttgtctaagatattactgtgttaagtgtcctgttaattataaatagttcaaaatggacagactgtcaacttgaaatttacttatgtaaaaagcttaggtgattcttagggtttccatgttcataactttacaaagctttataaaaataaaattgcaacttaatagagctaattaacttgtatttgtataaaaagaaaaaagaattgcagctcgatattgtgaagtttttcaataacttcattaaaccatatttatgatgggagggaccagacattctatagtaataatgtatagtgctgtgtataattccatggtttcttcaacatcttatcaaccaagtaaaattaatacaagatacgcaaaagatagtaaaataagaatctaattataggtgcaaggggactcaggcttatgctggaagaatctgacaagtggtatagtttgtttttctaggaagaatttactgatgagtcacataacttgcatgtaatattaggttctcattttttagcttcgaaactgtgtccatgcaaagactctataactgttaagacttgtgtggttgaattttgacttctttgatattcagcatttagtgcatacattttgcaactagggaatttgattttctatacccacaataatatttatggctaacatttattaggcacttactatgtgctaggcactgtaagcactttacatgcataatctcggtattccctgtgagtacagggttaattatttacctctatttcacaaatgagataatgaagtgggatgaagtgcgaggttaagcaacttgcttgaagtcataggtagtaaatcgtggggccaattttaacccagacagaccactgactccagttcatgcttttgctgcctcacttttttaagtggtatttttaattaggaagaccatgctaaagatactttcaaggataaatgattattttctcacttcaattgttggtttaaaattagcataaataggtaaaaccagcatgctcaaacactgagctcaaacattaacattactaataaaaaaaaaaagagtgactttaaaagtttctttctatccagggtttctcttgggatactcatatggtatattactggcttatatttcaaaattattttattcaacatgattgactttggccttttataatttacataaaacataattttcctcagttctgtaatccagattttccccattgagtaaataatacaattaaatttacatatggtaatttagacatttaataggatattgcataggtagaatactttgtcagtacttagttactacctatatgtatttttgtgttacttttcagtgatttaaagaaatctaacagaaatctgcttaaatttgttttaaatagtgaatatcctgcttgctatggaatgaataaacaggtaaatttgatatgaaaaagcacctcagtatgattctttaaagtataagcttgtaagtagctaggataatgttaaattgattgtttggaatatccaaaccaagcacaatgaagaaagtagaaatgatatttttaattgagcaaagattgtatagatggttcatttggtcacccattttgaataatatatggaaagttaaaaaatgcttctcagatacaaaggaataaagctaagatgaagcttaacgtgagggattacttactgtggaattgcatttcaaactgggctgaggtgggatggtggtggtagataagaggccagctagagtaaacataagctttgtagttttattattttaagagtcagagtcttgttctgctggccaggctggagtgcagtggtctgataatggttcactgcagcttctaactcctgggctcaagctgtcttcctgcctcagcctcctgagagctgggactacaggtgtgtgccaccttgtctggctaaattttttattatttgtagagacagagtctcactgtgttgcccaggctgttctcaaatttctggcctcaagcaatcctcactccttggtctcccagaatgtgttgggattacaggtgtgagccactgtgcccagccttgtattttgatttttaaattaatttatatgaatatttccttttaccctataatgtatcagggcttaatatttttaaacttcattataaaaagttgattacagaaagtggtatcttctagttgggagccatctttgcacatctctctccaactctgcctttagtgatatgtcaataacaaattggccatggcaggagtattttacaccatggaaagtgataaatgcagcaaatcaaggaattcccctcctgttgtcccctcagaaagccagcttcccagcacctcatcaatttcaaatataaaaaaagaatagtaaattttcatgtacacatcactcagcttcagtaattgtcgtctcatagccagtttttcctctcctatcctcaaggtataccaggtacactggaggtgtattctctagcctgatacccagtggcatttgtcttaaagccaaacatttttgtctagaaattatctaaaaaaatgtagatcatgtctagaaagtcaatcccacaaccaagagataggtaaaaatcatgttaggagtgcatttctattaatttactgagatcactgttaagagcagtgattcttgatccatatatcacctgtt

SEQ ID NO: 177629 - DNA, 579 bp, Homo sapiens
  Payload ID: 14858
  Gene Symbol: RBM12B
  Gene Name: RNA binding motif protein 12B
  ENST ID: ENST00000518597
  CDS Start-End: 150-579
cggaggggcagtgggcgccatcttcttctgggctcactgagggtctacctgttttggggaggctgctgcgacgaagagttccctcagcctccggccttgtgtgtccgactcggcagcagtggtcattattgctgtggtttgagctcagcatggctgtagtcatccgtttactggggcttccttttattgcggggcctgtggatattcgtcacttcttcacgggattgactattcctgatggaggagtgcatataattggaggggaaattggggaggcttttattatttttgcaacagatgaagatgcaagacgtgccataagtcgttcaggagggtttatcaaggattcatctgtagagctctttcttagtagcaaggcagaaatgcagaagactatagaaatgaaaagaactgatcgtgtaggaagagggcgtccaggatctgggacatcaggggttgacagcctgtctaattttattgagtctgttaaggaagaagcaagtaattctggatatggctcttcaattaatcaagatgctgggtttcatactaatggtacaggacatggtaatttaaggc

SEQ ID NO: 177630 - DNA, 588 bp, Homo sapiens
  Payload ID: 14858
  Gene Symbol: RBM12B
  Gene Name: RNA binding motif protein 12B
  ENST ID: ENST00000520560
  CDS Start-End: 222-588
tacctgttttggggaggctgctgcgacgaagagttccctcagcctccggccttgtgtgtccgactcggcagcagtgcttccatgtggtggtgtatgtgcgcttcccagggatcttgagagtgaagatctcgaaggatttcatagttaagttgcttttacagagttaacaggtctccaagaaattttaaaaaaggtcattattgctgtggtttgagctcagcatggctgtagtcatccgtttactggggcttccttttattgcggggcctgtggatattcgtcacttcttcacgggattgactattcctgatggaggagtgcatataattggaggggaaattggggaggcttttattatttttgcaacagatgaagatgcaagacgtgccataagtcgttcaggagggtttatcaaggattcatctgtagagctctttcttagtagcaaggcagaaatgcagaagactatagaaatgaaaagaactgatcgtgtaggaagagggcgtccaggatctgggacatcaggggttgacagcctgtctaattttattgagtctgttaaggaagaagcaagtaattctggatatg

SEQ ID NO: 177631 - DNA, 452 bp, Homo sapiens
  Payload ID: 14858
  Gene Symbol: RBM12B
  Gene Name: RNA binding motif protein 12B
  ENST ID: ENST00000521947
  CDS Start-End: 205-452
gggcgccatcttcttctgggctcactgagggtctacctgttttggggaggctgctgcgacgaagagttccctcagcctccggccttgtgtgtccgactcggcagcagtggtgtgtgtttattgccaattaagttgcttttacagagttaacaggtctccaagaaattttaaaaaaggtcattattgctgtggtttgagctcagcatggctgtagtcatccgtttactggggcttccttttattgcggggcctgtggatattcgtcacttcttcacgggattgactattcctgatggaggagtgcatataattggaggggaaattggggaggcttttattatttttgcaacagatgaagatgcaagacgtgccataagtcgttcaggagggtttatcaaggattcatctgtagagctctttcttagtagcaaggcagaaatgcagaagactat

SEQ ID NO: 177632 - DNA, 615 bp, Homo sapiens
  Payload ID: 14858
  Gene Symbol: RBM12B
  Gene Name: RNA binding motif protein 12B
  ENST ID: ENST00000519109
  CDS Start-End: 168-615
ccgactcttcctttcccgtcagcttccatgtggtggtgtatgtgcgcttcccagggatcttgagagtgaagatctcgaaggatttcatagttaagttgcttttacagagttaacaggtctccaagaaattttaaaaaaggtcattattgctgtggtttgagctcagcatggctgtagtcatccgtttactggggcttccttttattgcggggcctgtggatattcgtcacttcttcacgggattgactattcctgatggaggagtgcatataattggaggggaaattggggaggcttttattatttttgcaacagatgaagatgcaagacgtgccataagtcgttcaggagggtttatcaaggattcatctgtagagctctttcttagtagcaaggcagaaatgcagaagactatagaaatgaaaagaactgatcgtgtaggaagagggcgtccaggatctgggacatcaggggttgacagcctgtctaattttattgagtctgttaaggaagaagcaagtaattctggatatggctcttcaattaatcaagatgctgggtttcatactaatggtacaggacatggtaatttaaggccaagaaagacaaggccat

SEQ ID NO: 177633 - DNA, 2646 bp, Homo sapiens
  Payload ID: 14858
  Gene Symbol: RBM12B
  Gene Name: RNA binding motif protein 12B
  ENST ID: ENST00000627241
  CDS Start-End: 1-2646
atggctgtagtcatccgtttactggggcttccttttattgcggggcctgtggatattcgtcacttcttcacgggattgactattcctgatggaggagtgcatataattggaggggaaattggggaggcttttattatttttgcaacagatgaagatgcaagacgtgccataagtcgttcaggagggtttatcaaggattcatctgtagagctctttcttagtagcaaggcagaaatgcagaagactatagaaatgaaaagaactgatcgtgtaggaagagggcgtccaggatctgggacatcaggggttgacagcctgtctaattttattgagtctgttaaggaagaagcaagtaattctggatatggctcttcaattaatcaagatgctgggtttcatactaatggtacaggacatggtaatttaaggccaagaaagacaaggccattgaaggccgagaatccttacttgtttctacgaggtttgccttacctagtaaatgaagatgatgtacgtgtctttttctctggtttgtgcgtggatggagtaattttcttaaaacatcatgatggccgaaataatggtgatgccatagtaaaatttgcttcatgtgttgatgcttcaggaggtcttaaatgtcatagaagttttatgggttcaagatttatagaagtaatgcaaggatcagaacaacagtggattgagtttggtggtaatgcagttaaggagggtgacgttcttaggagatctgaagaacattctccaccaagaggaattaatgatagacattttcgaaaacggtctcattcaaaatctcccagaagaacacgttctcgttcccctcttggattttatgttcacttaaaaaatctgtccctcagtattgacgaaagagatttaagaaatttctttagaggtactgatctgactgatgaacagattaggtttttatataaagatgaaaatagaacaagatatgcctttgtgatgttcaagactctgaaagactataataccgctctgagtttacataagactgttttacaatatcgtccagttcatattgatccaatttctagaaaacaaatgctgaagttcattgcacgttatgaaaagaagagatcagggtcactagagagagataggcccggacatgtttcacaaaaatactctcaagaaggtaactctggccagaaactgtgcatctatataagaaattttccatttgatgttacaaaagttgaagtgcagaagttctttgcagactttcttcttgctgaggatgacatttacttgctttatgatgacaaaggtgttggtctgggagaagcattagtgaaatttaaatcagaagaacaggccatgaaagctgaacgtttaaaccgacgaagattcctagggacagaggtgttattaagacttatatctgaggcacaaatacaggagtttggtgtaaatttttctgtgatgtccagtgaaaaaatgcaagctcgctcacagtcacgtgagcgaggtgaccattcccatttatttgactcaaaagacccaccaatatactcagttggtgcttttgaaaactttagacatcagctagaggacttgaggcaactggataacttcaagcatccccagagggatttccggcagcctgacaggcaccctccagaagacttccgacactcctcagaggactttaggttccccccggaggacttcaggcactccccagaggacttcaggcgacctagggaggaagacttcaggcggccttctgaggaggacttcaggcgcccttgggaggaagatttcaggcgccctccggaggatgacttcaggcaccctagggaggaggactggaggagaccacctccagagcattttaggcggcctcccccagagcacttccggcggccacccccagagcacttcaggcggccacccccagagcatttcaggcgcccgcccccggagcacttccggagaccgccccaggagcatttcaggcggccgcctcaggagcatttcaggcgctcccgagaggaagatttcaggcacccaccagatgaagacttcaggggccctcctgatgaagactttaggcaccctcctgatgaggacttcaggagcccccaggaggaagattttagatgcccttctgatgaggacttcaggcagctcccagaggaagaccttagggaagctccggaggaggaccctagacttcctgacaattttagacctcctggtgaggattttaggagcccgcctgatgattttagaagtcaccgcccttttgtgaattttggtcgcccagaaggtggcaagtttgattttggaaagcataatatgggaagttttcctgaggggagatttatgcctgatccaaaaataaattgtggttcaggtagagtaactcctattaagataatgaatcttccatttaaagctaatgtgaatgaaattttagactttttccatggttacagaatcatacctgattcagtttcgatacagtataatgagcaaggcttacctacaggggaagccattgttgctatgataaactataatgaagctatggctgctattaaagatctaaatgataggccagttgggccccgaaaagttaagttaactttgctgtag

SEQ ID NO: 177634 - DNA, 2828 bp, Homo sapiens
  Payload ID: 14859
  Gene Symbol: RBM14
  Gene Name: RNA binding motif protein 14
  Uniprot ID: Q96PK6
  ENST ID: ENST00000310137
  CDS Start-End: 140-2149
attggctaggccagggcgcctgcgcggcggggttctcggtcgccagccattcctgaggaggactgccggtcgttcggacgtcttgcctgtcgctggaggagaggtccgggctctccaggaaggtggctgcggcgacaaaatgaagatattcgtgggcaacgtcgacggggcggatacgactccggaggagctggcagccctctttgcgccctacggcacggtcatgagctgcgccgtcatgaaacagttcgccttcgtgcacatgcgcgagaacgcgggcgcgctgcgcgccatcgaagccctgcacggccacgagctgcggccggggcgcgcgctcgtggtggagatgtcgcgcccaaggcctcttaatacttggaagattttcgtgggcaatgtgtcggctgcatgcacgagccaggaactgcgcagcctcttcgagcgccgcggacgcgtcatcgagtgtgacgtggtgaaagactacgcgtttgttcacatggagaaggaagcagatgccaaagccgcaatcgcgcagctcaacggcaaagaagtgaagggcaagcgcatcaacgtggaactctccaccaagggtcagaagaaggggcctggcctggctgtccagtctggggacaagaccaagaaaccaggggctggggatacggccttccctggaactggtggcttctctgccaccttcgactaccagcaggcttttggcaacagcactggtggctttgatgggcaagcccgtcagcccacaccacccttctttggtcgcgaccgcagccctctgcgccgttcacctccccgagcctcttatgtggctcctctgacggcccagccagctacctaccgggcccagccgtccgtgtcactgggagctgcctacagggcccagccttctgcctctttgggtgttggctatcggactcagcccatgacagcccaggcagcctcttaccgcgctcagccctctgtctcccttggggcaccatacaggggccagctggctagtcctagctcccagtctgctgcagcttcttcactcggcccatatggtggagcccagccctcagcctcggccctttcctcctatgggggtcaggcagctgcagcttcttcgctcaactcctatggggctcagggttcctcccttgcctcctatggtaaccagccatcctcttacggcgcccaggctgcctcttcctatggggttcgtgcagctgcttcttcctacaacacccagggagcagcttcctccttaggctcctacggggctcaggcagcctcctatggggcccagtctgcagcctcctcactagcttatggagcccaggcagcttcatataatgcccagccctcggcctcttacaatgcccagtctgccccatatgctgcacagcaggctgcttcctactcttcccaacctgctgcctatgtggcacagccagccacagctgctgcctatgccagccagccagcagcctacgccgcacaagccactaccccaatggctggctcctatggggcccagccggttgtgcagacccagctgaatagttacggggcccaagcatcaatgggcctttcaggctcctatggggctcagtcggctgctgcggccactggctcctatggtgccgcagcagcctacggggcccaaccttctgccaccctggcagctccttaccgcactcagtcatcagcctcattggctgcttcctatgctgcccagcagcatccccaggctgctgcctcctaccgcggccagccaggcaatgcctacgatggggcaggtcagccgtctgcagcctacctgtccatgtcccagggggccgttgccaacgccaacagcaccccgccgccctatgagcgtacccgcctctccccaccccgggccagctacgacgatccctacaaaaaggctgtcgccatgtcgaaaaggtatggttccgaccggcgtttagccgagctctctgattaccgccgtttatcagagtcgcagctttcgttccgccgctcgccgacaaagtcctcgctggattaccgtcgcctgcccgatgcccattccgattacgcacgctattcgggctcctataatgattacctgcgggcggctcagatgcactctggctaccagcgccgcatgtagggccatcctgggatggggcaccacagggagggagggagaaaagaggtgggtagggttacagatccaggttataactactctggcccatacctttcctggttgtggtttttcatgccctctaccatgtgggccttccccaggagatgatcctgttaagtgttcggcagtaacctactttgttccttcgcctcagcagcaaatcttgctactggctctagatctgcggtttcccctctaccctgcctcccgtctccccagaatgggaatttcttttatgtttttatttttttcctggctcccttttatttttgtgcgcgatatttaaggtcgtctggatggggaagcaacctgcagctgaggtcgccggcgcctttttctttttagatgggaaggaggccaggaaagggtcagcttaaccatttcctatgtgccaagctgtgccagcagtccagggtaccctgactgtccctctgtagactgttgagactgagttcctgttgggacagtcagttggtatgtatccaagtccctgctgaccactaatgttctagctgatggtgagcggcacagtcccacttccccatctccccaagtaggtggtgttagaaaaccttaattttttttcccttttgtatggactacaaataaaacttggggcaatttgcagtttggaaacctg

SEQ ID NO: 177635 - DNA, 1426 bp, Homo sapiens
  Payload ID: 14859
  Gene Symbol: RBM14
  Gene Name: RNA binding motif protein 14
  Uniprot ID: Q96PK6
  ENST ID: ENST00000393979
  CDS Start-End: 96-566
agccattcctgaggaggactgccggtcgttcggacgtcttgcctgtcgctggaggagaggtccgggctctccaggaaggtggctgcggcgacaaaatgaagatattcgtgggcaacgtcgacggggcggatacgactccggaggagctggcagccctctttgcgccctacggcacggtcatgagctgcgccgtcatgaaacagttcgccttcgtgcacatgcgcgagaacgcgggcgcgctgcgcgccatcgaagccctgcacggccacgagctgcggccggggcgcgcgctcgtggtggagatgtcgcgcccaaggcctcttaatacttggaagattttcgtgggcaatgtgtcggctgcatgcacgagccaggaactgcgcagcctcttcgagcgccgcggacgcgtcatcgagtgtgacgtggtgaaagactacgcgtttgttcacatggagaaggaagcagatgccaaagccgcaatcgcgcagctcaacggcaaagaagtgaagggcaagcgcatcaacgtggaactctccaccaagggtatggttccgaccggcgtttagccgagctctctgattaccgccgtttatcagagtcgcagctttcgttccgccgctcgccgacaaagtcctcgctggattaccgtcgcctgcccgatgcccattccgattacgcacgctattcgggctcctataatgattacctgcgggcggctcagatgcactctggctaccagcgccgcatgtagggccatcctgggatggggcaccacagggagggagggagaaaagaggtgggtagggttacagatccaggttataactactctggcccatacctttcctggttgtggtttttcatgccctctaccatgtgggccttccccaggagatgatcctgttaagtgttcggcagtaacctactttgttccttcgcctcagcagcaaatcttgctactggctctagatctgcggtttcccctctaccctgcctcccgtctccccagaatgggaatttcttttatgtttttatttttttcctggctcccttttatttttgtgcgcgatatttaaggtcgtctggatggggaagcaacctgcagctgaggtcgccggcgcctttttctttttagatgggaaggaggccaggaaagggtcagcttaaccatttcctatgtgccaagctgtgccagcagtccagggtaccctgactgtccctctgtagactgttgagactgagttcctgttgggacagtcagttggtatgtatccaagtccctgctgaccactaatgttctagctgatggtgagcggcacagtcccacttccccatctccccaagtaggtggtgttagaaaaccttaattttttttcccttttgtatggactacaaataaaacttggggcaatttgcagtttggaaa

SEQ ID NO: 177636 - DNA, 876 bp, Homo sapiens
  Payload ID: 14859
  Gene Symbol: RBM14
  Gene Name: RNA binding motif protein 14
  ENST ID: ENST00000409372
  CDS Start-End: 92-571
attcctgaggaggactgccggtcgttcggacgtcttgcctgtcgctggaggagaggtccgggctctccaggaaggtggctgcggcgacaaaatgaagatattcgtgggcaacgtcgacggggcggatacgactccggaggagctggcagccctctttgcgccctacggcacggtcatgagctgcgccgtcatgaaacagttcgccttcgtgcacatgcgcgagaacgcgggcgcgctgcgcgccatcgaagccctgcacggccacgagctgcggccggggcgcgcgctcgtggtggagatgtcgcgcccaaggcctcttaatacttggaagattttcgtgggcaatgtgtcggctgcatgcacgagccaggaactgcgcagcctcttcgagcgccgcggacgcgtcatcgagtgtgacgtggtgaaaggagatgtgaagatttttatcctgtgttgcagttcatctttgctccttcttctctcaccaggaagttggactacgcgtttgttcacatggagaaggaagcagatgccaaagccgcaatcgcgcagctcaacggcaaagaagtgaagggcaagcgcatcaacgtggaactctccaccaagggtcagaagaaggggcctggcctggctgtccagtctggggacaagaccaagaaaccaggggctggggatacggccttccctggaactggtggcttctctgccaccttcgactaccagcaggcttttggcaacagcactggtggctttgatgggcaagcccgtcagcccacaccacccttctttggtcgcgaccgcagccctctgcgccgttcacctccccgagcctcttatgtggctcctctgacggcccagccagctacctaccgggcc

SEQ ID NO: 177637 - DNA, 372 bp, Homo sapiens
  Payload ID: 14859
  Gene Symbol: RBM14
  Gene Name: RNA binding motif protein 14
  Uniprot ID: Q96PK6
  ENST ID: ENST00000409738
  CDS Start-End: 7-366
gacaaaatgaagatattcgtgggcaacgtcgacggggcggatacgactccggaggagctggcagccctctttgcgccctacggcacggtcatgagctgcgccgtcatgaaacagttcgccttcgtgcacatgcgcgagaacgcgggcgcgctgcgcgccatcgaagccctgcacggccacgagctgcggccggggcgcgcgctcgtggtggagatgtcgcgcccaaggcctcttaatacttggaagattttcgtgggcaatgtgtcggctgcatgcacgagccaggaactgcgcagcctcttcgagcgccgcggacgcgtcatcgagtgtgacgtggtgaaaggtatggttccgaccggcgtttagccgagc

SEQ ID NO: 177638 - DNA, 732 bp, Homo sapiens
  Payload ID: 14859
  Gene Symbol: RBM14
  Gene Name: RNA binding motif protein 14
  ENST ID: ENST00000443702
  CDS Start-End: 76-465
gccggtcgttcggacgtcttgcctgtcgctggaggagaggtccgggctctccaggaaggtggctgcggcgacaaaatgaagatattcgtgggcaacgtcgacggggcggatacgactccggaggagctggcagccctctttgcgccctacggcacggtcatgagctgcgccgtcatgaaacagttcgccttcgtgcacatgcgcgagaacgcgggcgcgctgcgcgccatcgaagccctgcacggccacgagctgcggccggggcgcgcgctcgtggtggagatgtcgcgcccaaggcctcttaatacttggaagattttcgtgggcaatgtgtcggctgcatgcacgagccaggaactgcgcagcctcttcgagcgccgcggacgcgtcatcgagtgtgacgtggtgaaaggttatacaagtccacgactatccggaatcgggctttcctgctgggtgctctgaggcaggctgtatgactacgcgtttgttcacatggagaaggaagcagatgccaaagccgcaatcgcgcagctcaacggcaaagaagtgaagggcaagcgcatcaacgtggaactctccaccaagggtcagaagaaggggcctggcctggctgtccagtctggggacaagaccaagaaaccaggggctggggatacggccttccctggaactggtggcttctctgccaccttcgactaccagcaggcttttggcaacagcactggtggc

SEQ ID NO: 177639 - DNA, 4244 bp, Homo sapiens
  Payload ID: 14860
  Gene Symbol: RBM15
  Gene Name: RNA binding motif protein 15
  Uniprot ID: Q96T37
  ENST ID: ENST00000369784
  CDS Start-End: 901-3834
gcgcgcggggggcggggctccccccggctgttcactcagctaccacagcgacgtaaaatggtgtccgctaggcgtcccaggacggcttcctgagggactggagggccccgacagccggaaagcctgccccgccccttggccggcacaggtacgacggcggggagctcagaagtttcgaactccaagggccgaagcacagccaaacaccccacggaacttaacaaatgtttgtggggagaacgccgaaaacgcggggaggcggggctggcgcacagtcaccctctcgcgacatctaagtgacgtcgcacagcaagcacgtgttctagtctttcaccttcagtcagcctcctccgttatacaggcctacccctttaagcgagtgatggacagttatttcagcctatcaacttccttgccgacatccaatcagatttaaacttcttttagccgccggaggagttggaaaaagggggtcgaaagagggagcttaccgtctctcgcgatatcgctgtgagcctgcctctctggaaaaaacgccgaaactgatggcccgacctcccaaatagtggtttaaaggacgggtttataagccaatgaaagggataaggaggtgggttgctgctgtcactgagcaagaagtaccgttacagggcagactttttgtccaatcaacacctcaacactttgggtcacgtgaccgcagagtgcgaggggcggagctacagtctggcgcgaggaaccgttaagatagacaacaaatgtaaccaatgaggtactccgactagggggttgggaacccaataacagtggttgggcgggcgccttcctggagcgcggggagatgtaaagatagacaaataattttcccaatgagactgtagaagagagagcaattggccaatgaggactgcggggcgggaccctgtgccgcggcggagtccaagatggcggcgtgcggttccgctgtgtgaaacgagcgcggggcggcgggttactcagctccgcggagacgacctccgacgacccgcaacaatgaagggaaaagagcgctcgccagtgaaggccaaacgctcccgtggtggtgaggactcgacttcccgcggtgagcggagcaagaagttagggggctctggtggcagcaatgggagcagcagcggaaagaccgatagcggcggtgggtcgcggcggagtctccacctggacaagtccagcagtcgaggtggcagccgcgagtatgataccggtgggggcagctccagtagccgcttgcatagttatagctccccgagcaccaaaaattcttcgggcgggggcgaatcgcgcagcagctcccggggtggaggcggggagtcacgttcctctggggccgcctcctcagctcccggcggcggggacggcgcggaatacaagactctgaagataagcgagttggggtcccagcttagtgacgaagcggtggaggacggcctgtttcatgagttcaaacgcttcggtgatgtaagtgtgaaaatcagtcatctgtcgggttctggcagcggggatgagcgggtagcctttgtgaacttccggcggccagaggacgcgcgggcggccaagcatgccagaggccgcctggtgctctatgaccggcctctgaagatagaagctgtgtatgtgagccggcgccgcagccgctcccctttagacaaagatacttatcctccatcagccagtgtggtcggggcctctgtaggtggtcaccggcacccccctggaggtggtggaggccagagatcactttcccctggtggcgctgctttgggatacagagactaccggctgcagcagttggctcttggccgcctgccccctccacctccgccaccattgcctcgagacctggagagagaaagagactacccgttctatgagagagtgcgccctgcatacagtcttgagccaagggtgggagctggagcaggtgctgctcctttcagagaagtggatgagatttcacccgaggatgatcagcgagctaaccggacgctcttcttgggcaacctagacatcactgtaacggagagtgatttaagaagggcgtttgatcgctttggagtcatcacagaagtagatatcaagaggccttctcgcggccagactagtacttacggctttctcaaatttgagaacttagatatgtctcaccgggccaaattagcaatgtctggcaaaattataattcggaatcctatcaaaattggttatggtaaagctacacccaccacccgcctctgggtgggaggcctgggaccttgggttcctcttgctgccctggcacgagaatttgatcgatttggcaccatacgcaccatagactaccgaaaaggtgatagttgggcatatatccagtatgaaagcctggatgcagcgcatgctgcctggacccatatgcggggcttcccacttggtggcccagatcgacgccttagagtagactttgccgacaccgaacatcgttaccagcagcagtatctgcagcctctgcccttgactcattatgagctggtgacagatgcttttggacatcgggcaccagaccctttgaggggtgctcgggataggacaccacccttactatacagagatcgtgatagggacctttatcctgactctgattgggtgccacccccacccccagtccgagaacgcagcactcggactgcagctacttctgtgcctgcttacgagccactggatagcctagatcgcaggcgggatggttggtccttggaccgggacagaggtgatcgagatctgcccagcagcagagaccagcctaggaagcgaaggctgcctgaggagagtggaggacgtcatctggataggtctcctgagagtgaccgcccacgaaaacgtcactgcgctccttctcctgaccgcagtccagaattgagcagtagccgggatcgttacaacagcgacaatgatcgatcttcccgtcttctcttggaaaggccctctccaatcagagacagacgaggtagtttggagaagagccagggtgacaagcgagaccgtaaaaactctgcatcagctgaacgagataggaagcaccggacaactgctcccactgagggaaaaagccctctgaaaaaagaagaccgctctgatgggagtgcacctagcaccagcactgcttcctccaagctgaagtccccgtcccagaaacaggatggggggacagcccctgtggcatcagcctctcccaaactctgtttggcctggcagggcatgcttctactgaagaacagcaactttccttccaacatgcatctgttgcagggtgacctccaagtggctagtagtcttcttgtggagggttcaactggaggcaaagtggcccagctcaagatcactcagcgtctccgtttggaccagcccaagttggatgaagtaactcgacgcatcaaagtagcagggcccaatggttatgccattcttttggctgtgcctggaagttctgacagccggtcctcctcttcctcagctgcatcagacactgccacttctactcagaggccacttaggaaccttgtgtcctatttaaagcaaaagcaggcagccggggtgatcagcctccctgtggggggcaacaaagacaaggaaaacaccggggtccttcatgccttcccaccttgtgagttctcccagcagttcctggattcccctgccaaggcactggccaaatctgaagaagattacctggtcatgatcattgtccgtgggtttggttttcagataggagttaggtatgagaacaagaagagagaaaacttggcgctgaccctgttatagtggttatagtggtgtccctaaagggaggaaatgatttcagcaaaactggttgaacagcggatgaagatatggaattcaaagctctaatggacctttttgaagagaagttgtggcttatgtggagtttacatgggcctctgatggaagaaagctaatctgtttagtatttgtgcattttactaaaatggcagcttaaagttgtgtatctgctattgtgatgccaatgccggtgttttaagtggaaaaaaaatgacctctttgatttgtgctgtgtacacaagatttctggaaaagtaaagaaaaaccctttttatggctcacacagcttaagagtagctgtctctcaaacgtgcgctcacagttgagctgcttttgttttattctaaataaattgtttcttttgaggaaaa

SEQ ID NO: 177640 - DNA, 3316 bp, Homo sapiens
  Payload ID: 14860
  Gene Symbol: RBM15
  Gene Name: RNA binding motif protein 15
  Uniprot ID: Q96T37
  ENST ID: ENST00000487146
  CDS Start-End: 84-2993
ggcgccttcctggagcgcggggagatgtaaagatagacaaataattttcccaatgagactgtagaagagagagcaattggccaatgaggactgcggggcgggaccctgtgccgcggcggagtccaagatggcggcgtgcggttccgctgtgtgaaacgagcgcggggcggcgggttactcagctccgcggagacgacctccgacgacccgcaacaatgaagggaaaagagcgctcgccagtgaaggccaaacgctcccgtggtggtgaggactcgacttcccgcggtgagcggagcaagaagttagggggctctggtggcagcaatgggagcagcagcggaaagaccgatagcggcggtgggtcgcggcggagtctccacctggacaagtccagcagtcgaggtggcagccgcgagtatgataccggtgggggcagctccagtagccgcttgcatagttatagctccccgagcaccaaaaattcttcgggcgggggcgaatcgcgcagcagctcccggggtggaggcggggagtcacgttcctctggggccgcctcctcagctcccggcggcggggacggcgcggaatacaagactctgaagataagcgagttggggtcccagcttagtgacgaagcggtggaggacggcctgtttcatgagttcaaacgcttcggtgatgtaagtgtgaaaatcagtcatctgtcgggttctggcagcggggatgagcgggtagcctttgtgaacttccggcggccagaggacgcgcgggcggccaagcatgccagaggccgcctggtgctctatgaccggcctctgaagatagaagctgtgtatgtgagccggcgccgcagccgctcccctttagacaaagatacttatcctccatcagccagtgtggtcggggcctctgtaggtggtcaccggcacccccctggaggtggtggaggccagagatcactttcccctggtggcgctgctttgggatacagagactaccggctgcagcagttggctcttggccgcctgccccctccacctccgccaccattgcctcgagacctggagagagaaagagactacccgttctatgagagagtgcgccctgcatacagtcttgagccaagggtgggagctggagcaggtgctgctcctttcagagaagtggatgagatttcacccgaggatgatcagcgagctaaccggacgctcttcttgggcaacctagacatcactgtaacggagagtgatttaagaagggcgtttgatcgctttggagtcatcacagaagtagatatcaagaggccttctcgcggccagactagtacttacggctttctcaaatttgagaacttagatatgtctcaccgggccaaattagcaatgtctggcaaaattataattcggaatcctatcaaaattggttatggtaaagctacacccaccacccgcctctgggtgggaggcctgggaccttgggttcctcttgctgccctggcacgagaatttgatcgatttggcaccatacgcaccatagactaccgaaaaggtgatagttgggcatatatccagtatgaaagcctggatgcagcgcatgctgcctggacccatatgcggggcttcccacttggtggcccagatcgacgccttagagtagactttgccgacaccgaacatcgttaccagcagcagtatctgcagcctctgcccttgactcattatgagctggtgacagatgcttttggacatcgggcaccagaccctttgaggggtgctcgggataggacaccacccttactatacagagatcgtgatagggacctttatcctgactctgattgggtgccacccccacccccagtccgagaacgcagcactcggactgcagctacttctgtgcctgcttacgagccactggatagcctagatcgcaggcgggatggttggtccttggaccgggacagaggtgatcgagatctgcccagcagcagagaccagcctaggaagcgaaggctgcctgaggagagtggaggacgtcatctggataggtctcctgagagtgaccgcccacgaaaacgtcactgcgctccttctcctgaccgcagtccagaattgagcagtagccgggatcgttacaacagcgacaatgatcgatcttcccgtcttctcttggaaaggccctctccaatcagagacagacgaggtagtttggagaagagccagggtgacaagcgagaccgtaaaaactctgcatcagctgaacgagataggaagcaccggacaactgctcccactgagggaaaaagccctctgaaaaaagaagaccgctctgatgggagtgcacctagcaccagcactgcttcctccaagctgaagtccccgtcccagaaacaggatggggggacagcccctgtggcatcagcctctcccaaactctgtttggcctggcagggcatgcttctactgaagaacagcaactttccttccaacatgcatctgttgcagggtgacctccaagtggctagtagtcttcttgtggagggttcaactggaggcaaagtggcccagctcaagatcactcagcgtctccgtttggaccagcccaagttggatgaagtaactcgacgcatcaaagtagcagggcccaatggttatgccattcttttggctgtgcctggaagttctgacagccggtcctcctcttcctcagctgcatcagacactgccacttctactcagaggccacttaggaaccttgtgtcctatttaaagcaaaagcaggcagccggggtgatcagcctccctgtggggggcaacaaagacaaggaaaacaccggggtccttcatgccttcccaccttgtgagttctcccagcagttcctggattcccctgccaaggcactggccaaatctgaagaagattacctggtcatgatcattgtccgtgcaaaactggttgaacagcggatgaagatatggaattcaaagctctaatggacctttttgaagagaagttgtggcttatgtggagtttacatgggcctctgatggaagaaagctaatctgtttagtatttgtgcattttactaaaatggcagcttaaagttgtgtatctgctattgtgatgccaatgccggtgttttaagtggaaaaaaaatgacctctttgatttgtgctgtgtacacaagatttctggaaaagtaaagaaaaaccctttttatggctcacacagcttaagagtagctgtctctcaaacgtgcgctcacagttgagctgcttttgttttattctaaataaattgtttcttttgaggaaaa

SEQ ID NO: 177641 - DNA, 3368 bp, Homo sapiens
  Payload ID: 14860
  Gene Symbol: RBM15
  Gene Name: RNA binding motif protein 15
  Uniprot ID: Q96T37
  ENST ID: ENST00000602849
  CDS Start-End: 84-2957
ggcgccttcctggagcgcggggagatgtaaagatagacaaataattttcccaatgagactgtagaagagagagcaattggccaatgaggactgcggggcgggaccctgtgccgcggcggagtccaagatggcggcgtgcggttccgctgtgtgaaacgagcgcggggcggcgggttactcagctccgcggagacgacctccgacgacccgcaacaatgaagggaaaagagcgctcgccagtgaaggccaaacgctcccgtggtggtgaggactcgacttcccgcggtgagcggagcaagaagttagggggctctggtggcagcaatgggagcagcagcggaaagaccgatagcggcggtgggtcgcggcggagtctccacctggacaagtccagcagtcgaggtggcagccgcgagtatgataccggtgggggcagctccagtagccgcttgcatagttatagctccccgagcaccaaaaattcttcgggcgggggcgaatcgcgcagcagctcccggggtggaggcggggagtcacgttcctctggggccgcctcctcagctcccggcggcggggacggcgcggaatacaagactctgaagataagcgagttggggtcccagcttagtgacgaagcggtggaggacggcctgtttcatgagttcaaacgcttcggtgatgtaagtgtgaaaatcagtcatctgtcgggttctggcagcggggatgagcgggtagcctttgtgaacttccggcggccagaggacgcgcgggcggccaagcatgccagaggccgcctggtgctctatgaccggcctctgaagatagaagctgtgtatgtgagccggcgccgcagccgctcccctttagacaaagatacttatcctccatcagccagtgtggtcggggcctctgtaggtggtcaccggcacccccctggaggtggtggaggccagagatcactttcccctggtggcgctgctttgggatacagagactaccggctgcagcagttggctcttggccgcctgccccctccacctccgccaccattgcctcgagacctggagagagaaagagactacccgttctatgagagagtgcgccctgcatacagtcttgagccaagggtgggagctggagcaggtgctgctcctttcagagaagtggatgagatttcacccgaggatgatcagcgagctaaccggacgctcttcttgggcaacctagacatcactgtaacggagagtgatttaagaagggcgtttgatcgctttggagtcatcacagaagtagatatcaagaggccttctcgcggccagactagtacttacggctttctcaaatttgagaacttagatatgtctcaccgggccaaattagcaatgtctggcaaaattataattcggaatcctatcaaaattggttatggtaaagctacacccaccacccgcctctgggtgggaggcctgggaccttgggttcctcttgctgccctggcacgagaatttgatcgatttggcaccatacgcaccatagactaccgaaaaggtgatagttgggcatatatccagtatgaaagcctggatgcagcgcatgctgcctggacccatatgcggggcttcccacttggtggcccagatcgacgccttagagtagactttgccgacaccgaacatcgttaccagcagcagtatctgcagcctctgcccttgactcattatgagctggtgacagatgcttttggacatcgggcaccagaccctttgaggggtgctcgggataggacaccacccttactatacagagatcgtgatagggacctttatcctgactctgattgggtgccacccccacccccagtccgagaacgcagcactcggactgcagctacttctgtgcctgcttacgagccactggatagcctagatcgcaggcgggatggttggtccttggaccgggacagaggtgatcgagatctgcccagcagcagagaccagcctaggaagcgaaggctgcctgaggagagtggaggacgtcatctggataggtctcctgagagtgaccgcccacgaaaacgtcactgcgctccttctcctgaccgcagtccagaattgagcagtagccgggatcgttacaacagcgacaatgatcgatcttcccgtcttctcttggaaaggccctctccaatcagagacagacgaggtagtttggagaagagccagggtgacaagcgagaccgtaaaaactctgcatcagctgaacgagataggaagcaccggacaactgctcccactgagggaaaaagccctctgaaaaaagaagaccgctctgatgggagtgcacctagcaccagcactgcttcctccaagctgaagtccccgtcccagaaacaggatggggggacagcccctgtggcatcagcctctcccaaactctgtttggcctggcagggcatgcttctactgaagaacagcaactttccttccaacatgcatctgttgcagggtgacctccaagtggctagtagtcttcttgtggagggttcaactggaggcaaagtggcccagctcaagatcactcagcgtctccgtttggaccagcccaagttggatgaagtaactcgacgcatcaaagtagcagggcccaatggttatgccattcttttggctgtgcctggaagttctgacagccggtcctcctcttcctcagctgcatcagacactgccacttctactcagaggccacttaggaaccttgtgtcctatttaaagcaaaagcaggcagccggggtgatcagcctccctgtggggggcaacaaagacaaggaaaacaccggggtccttcatgccttcccaccttgtgagttctcccagcagttcctggattcccctgccaaggcactggccaaatctgaagaagattacctggtcatgatcattgtccgtggtgcgtcctaaagtccatgtgtaacttgtatttactactttgacatggttcctgttttgtgatgtgtaatgggatacagcatcagatgcaattttctttttagttgttagttgtagcattttcttttttatatttttataaacgtctttaaaatagaaatcaggacagtttagctatttttttgtttgtttagctattattttaagtgaaagggatgccctaaaggtagcaggcaggcagacagatttgctttaattaggagttcccacccttatgagtaattttttttctctattcagttgttttttttttaatcttgagcttaaaaaatcctcagagttacaaaaccaaaattttgaaaagtcagaatttggagaaaggagtccactgaccatataaagagagtaatagccacctaaaaa

SEQ ID NO: 177642 - DNA, 3284 bp, Homo sapiens
  Payload ID: 14860
  Gene Symbol: RBM15
  Gene Name: RNA binding motif protein 15
  ENST ID: ENST00000617047
  CDS Start-End: 73-2874
ccgctgtgtgaaacgagcgcggggcggcgggttactcagctccgcggagacgacctccgacgacccgcaacaatgaagggaaaagagcgctcgccagtgaaggccaaacgctcccgtggtggtgaggactcgacttcccgcggtgagcggagcaagaagttagggggctctggtggcagcaatgggagcagcagcggaaagaccgatagcggcggtgggtcgcggcggagtctccacctggacaagtccagcagtcgaggtggcagccgcgagtatgataccggtgggggcagctccagtagccgcttgcatagttatagctccccgagcaccaaaaattcttcgggcgggggcgaatcgcgcagcagctcccggggtggaggcggggagtcacgttcctctggggccgcctcctcagctcccggcggcggggacggcgcggaatacaagactctgaagataagcgagttggggtcccagcttagtgacgaagcggtggaggacggcctgtttcatgagttcaaacgcttcggtgatgtaagtgtgaaaatcagtcatctgtcgggttctggcagcggggatgagcgggtagcctttgtgaacttccggcggccagaggacgcgcgggcggccaagcatgccagaggccgcctggtgctctatgaccggcctctgaagatagaagctgtgtatgtgagccggcgccgcagccgctcccctttagacaaagatacttatcctccatcagccagtgtggtcggggcctctgtaggtggtcaccggcacccccctggaggtggtggaggccagagatcactttcccctggtggcgctgctttgggatacagagactaccggctgcagcagttggctcttggccgcctgccccctccacctccgccaccattgcctcgagacctggagagagaaagagactacccgttctatgagagagtgcgccctgcatacagtcttgagccaagggtgggagctggagcaggtgctgctcctttcagagaagtggatgagatttcacccgaggatgatcagcgagctaaccggacgctcttcttgggcaacctagacatcactgtaacggagagtgatttaagaagggcgtttgatcgctttggagtcatcacagaagtagatatcaagaggccttctcgcggccagactagtacttacggctttctcaaatttgagaacttagatatgtctcaccgggccaaattagcaatgtctggcaaaattataattcggaatcctatcaaaattggttatggtaaagctacacccaccacccgcctctgggtgggaggcctgggaccttgggttcctcttgctgccctggcacgagaatttgatcgatttggcaccatacgcaccatagactaccgaaaaggtgatagttgggcatatatccagtatgaaagcctggatgcagcgcatgctgcctggacccatatgcggggcttcccacttggtggcccagatcgacgccttagagtagactttgccgacaccgaacatcgttaccagcagcagtatctgcagcctctgcccttgactcattatgagctggtgacagatgcttttggacatcgggcaccagaccctttgaggggtgctcgggataggacaccacccttactatacagagatcgtgatagggacctttatcctgactctgattgggtgccacccccacccccagtccgagaacgcagcactcggactgcagctacttctgtgcctgcttacgagccactggatagcctagatcgcaggcgggatggttggtccttggaccgggacagaggtgatcgagatctgcccagcagcagagaccagcctaggaagcgaaggctgcctgaggagagtggaggacgtcatctggataggtctcctgagagtgaccgcccacgaaaacgtcactgcgctccttctcctgaccgcagtccagaattgagcagtagccgggatcgttacaacagcgacaatgatcgatcttcccgtcttctcttggaaaggccctctccaatcagagacagacgaggtagtttggagaagagccagggtgacaagcgagaccgtaaaaactctgcatcagctgaacgagataggaagcaccggacaactgctcccactgagggaaaaagccctctgaaaaaagaagaccgctctgatgggagtgcacctagcaccagcactgcttcctccaagctgaagtccccgtcccagaaacaggatggggggacagcccctgtggcatcagcctctcccaaactctgtttggcctggcagggcatgcttctactgaagaacagcaactttccttccaacatgcatctgttgcagggtgacctccaagtggctagtagtcttcttgtggagggttcaactggaggcaaagtggcccagctcaagatcactcagcgtctccgtttggaccagcccaagttggatgaagtaactcgacgcatcaaagtagcagggcccaatggttatgccattcttttggctgtgcctggaagttctgacagccggtcctcctcttcctcagctgcatcagacactgccacttctactcagaggccacttaggaaccttgtgtcctatttaaagcaaaagcaggcagccggggtgatcagcctccctgtggggggcaacaaagacaaggaaaacaccggggtccttcatgccttcccaccttgtgagttctcccagcagttcctggattcccctgccaaggcactggccaaatctgaagaagattacctggtcatgatcattgtccgtgggtttggttttcagataggagttaggtatgagaacaagaagagagaaaacttggcgctgaccctgttatagtggttatagtggtgtccctaaagggaggaaatgatttcagcaaaactggttgaacagcggatgaagatatggaattcaaagctctaatggacctttttgaagagaagttgtggcttatgtggagtttacatgggcctctgatggaagaaagctaatctgtttagtatttgtgcattttactaaaatggcagcttaaagttgtgtatctgctattgtgatgccaatgccggtgttttaagtggaaaaaaaatgacctctttgatttgtgctgtgtacacaagatttctggaaaagtaaagaaaaaccctttttatggctcacacagcttaagagtagctgtctctcaaacgtgcgctcacagttgagctgcttttgttttattctaaataaattgtttcttttgaggaaaa

SEQ ID NO: 177643 - DNA, 3431 bp, Homo sapiens
  Payload ID: 14860
  Gene Symbol: RBM15
  Gene Name: RNA binding motif protein 15
  Uniprot ID: Q96T37
  ENST ID: ENST00000618772
  CDS Start-End: 84-3017
ggcgccttcctggagcgcggggagatgtaaagatagacaaataattttcccaatgagactgtagaagagagagcaattggccaatgaggactgcggggcgggaccctgtgccgcggcggagtccaagatggcggcgtgcggttccgctgtgtgaaacgagcgcggggcggcgggttactcagctccgcggagacgacctccgacgacccgcaacaatgaagggaaaagagcgctcgccagtgaaggccaaacgctcccgtggtggtgaggactcgacttcccgcggtgagcggagcaagaagttagggggctctggtggcagcaatgggagcagcagcggaaagaccgatagcggcggtgggtcgcggcggagtctccacctggacaagtccagcagtcgaggtggcagccgcgagtatgataccggtgggggcagctccagtagccgcttgcatagttatagctccccgagcaccaaaaattcttcgggcgggggcgaatcgcgcagcagctcccggggtggaggcggggagtcacgttcctctggggccgcctcctcagctcccggcggcggggacggcgcggaatacaagactctgaagataagcgagttggggtcccagcttagtgacgaagcggtggaggacggcctgtttcatgagttcaaacgcttcggtgatgtaagtgtgaaaatcagtcatctgtcgggttctggcagcggggatgagcgggtagcctttgtgaacttccggcggccagaggacgcgcgggcggccaagcatgccagaggccgcctggtgctctatgaccggcctctgaagatagaagctgtgtatgtgagccggcgccgcagccgctcccctttagacaaagatacttatcctccatcagccagtgtggtcggggcctctgtaggtggtcaccggcacccccctggaggtggtggaggccagagatcactttcccctggtggcgctgctttgggatacagagactaccggctgcagcagttggctcttggccgcctgccccctccacctccgccaccattgcctcgagacctggagagagaaagagactacccgttctatgagagagtgcgccctgcatacagtcttgagccaagggtgggagctggagcaggtgctgctcctttcagagaagtggatgagatttcacccgaggatgatcagcgagctaaccggacgctcttcttgggcaacctagacatcactgtaacggagagtgatttaagaagggcgtttgatcgctttggagtcatcacagaagtagatatcaagaggccttctcgcggccagactagtacttacggctttctcaaatttgagaacttagatatgtctcaccgggccaaattagcaatgtctggcaaaattataattcggaatcctatcaaaattggttatggtaaagctacacccaccacccgcctctgggtgggaggcctgggaccttgggttcctcttgctgccctggcacgagaatttgatcgatttggcaccatacgcaccatagactaccgaaaaggtgatagttgggcatatatccagtatgaaagcctggatgcagcgcatgctgcctggacccatatgcggggcttcccacttggtggcccagatcgacgccttagagtagactttgccgacaccgaacatcgttaccagcagcagtatctgcagcctctgcccttgactcattatgagctggtgacagatgcttttggacatcgggcaccagaccctttgaggggtgctcgggataggacaccacccttactatacagagatcgtgatagggacctttatcctgactctgattgggtgccacccccacccccagtccgagaacgcagcactcggactgcagctacttctgtgcctgcttacgagccactggatagcctagatcgcaggcgggatggttggtccttggaccgggacagaggtgatcgagatctgcccagcagcagagaccagcctaggaagcgaaggctgcctgaggagagtggaggacgtcatctggataggtctcctgagagtgaccgcccacgaaaacgtcactgcgctccttctcctgaccgcagtccagaattgagcagtagccgggatcgttacaacagcgacaatgatcgatcttcccgtcttctcttggaaaggccctctccaatcagagacagacgaggtagtttggagaagagccagggtgacaagcgagaccgtaaaaactctgcatcagctgaacgagataggaagcaccggacaactgctcccactgagggaaaaagccctctgaaaaaagaagaccgctctgatgggagtgcacctagcaccagcactgcttcctccaagctgaagtccccgtcccagaaacaggatggggggacagcccctgtggcatcagcctctcccaaactctgtttggcctggcagggcatgcttctactgaagaacagcaactttccttccaacatgcatctgttgcagggtgacctccaagtggctagtagtcttcttgtggagggttcaactggaggcaaagtggcccagctcaagatcactcagcgtctccgtttggaccagcccaagttggatgaagtaactcgacgcatcaaagtagcagggcccaatggttatgccattcttttggctgtgcctggaagttctgacagccggtcctcctcttcctcagctgcatcagacactgccacttctactcagaggccacttaggaaccttgtgtcctatttaaagcaaaagcaggcagccggggtgatcagcctccctgtggggggcaacaaagacaaggaaaacaccggggtccttcatgccttcccaccttgtgagttctcccagcagttcctggattcccctgccaaggcactggccaaatctgaagaagattacctggtcatgatcattgtccgtgggtttggttttcagataggagttaggtatgagaacaagaagagagaaaacttggcgctgaccctgttatagtggttatagtggtgtccctaaagggaggaaatgatttcagcaaaactggttgaacagcggatgaagatatggaattcaaagctctaatggacctttttgaagagaagttgtggcttatgtggagtttacatgggcctctgatggaagaaagctaatctgtttagtatttgtgcattttactaaaatggcagcttaaagttgtgtatctgctattgtgatgccaatgccggtgttttaagtggaaaaaaaatgacctctttgatttgtgctgtgtacacaagatttctggaaaagtaaagaaaaaccctttttatggctcacacagcttaagagtagctgtctctcaaacgtgcgctcacagttgagctgcttttgttttattctaaataaattgtttcttttgaggaaaatgtt

SEQ ID NO: 177644 - DNA, 6641 bp, Homo sapiens
  Payload ID: 14861
  Gene Symbol: RBM15B
  Gene Name: RNA binding motif protein 15B
  Uniprot ID: Q8NDT2
  ENST ID: ENST00000563281
  CDS Start-End: 133-2805
gccccgccgccaccgccgcgccgagtccttttgtccaagatggcggcgccgggggcgctgcctcctcggccgccgcctccgccgccgccgctgtgagaaacctacgggccgcccgcccgccgcgccagcgccatgaagcggcagagcgagcgagactctagcccgagcgggcgcggctcgtcatcgtccgccaagcgtccgcgggagcgcgaacgggaggcggaggcgggcgggcggcgggcggcgcacaaggcctctggcggcgccaagcacccggttccagcgcgggcccgcgacaaaccccgcggcagcggaagcggcgggggcgggcatcgcgacggccgcggcaccggggacgcgaatcaccgcgcgagtagcgggcgctcctcgggctccggcgctggcggcgggggacgcggcggcaaggcctcgggggacccgggcgcctccggcatgtcgccccgcgcgtctcctctgccgccgcctccgccaccgcctggggccgagcccgcgtgtcccggctcatccgcggccgcgcctgagtacaagacgttgctcatcagcagcttgagccccgcgctgcccgccgagcacctcgaggaccggctcttccaccagttcaagcgcttcggcgagatcagcctccgcctgtcgcacacgcctgagctgggccgtgtggcctacgtgaatttccggcacccacaggacgcacgcgaggcccgccagcacgccctggcccggcagctgctgctctacgaccgcccgctcaaggtagagcccgtgtacctgcgtggcggcggcgggagcagtcggcgaagtagcagcagcagcgccgccgcttccacgcctcccccagggccgcccgcgcccgccgacccgctcggctacctcccgctacacggaggctaccagtacaagcagcgctcgctgtcccccgtcgctgccccgcccctgcgggagccccgtgcccgtcacgccgccgcagccttcgccctggatgccgctgctgccgccgccgtgggactgtcccgggagcgggccctggactactacgggctgtacgacgaccgtgggcgcccctatggctacccagctgtgtgtgaggaggacctgatgcccgaggatgaccagcgggccacgcgcaacctcttcattggtaacctggaccacagcgtatctgaggtggagctgcgaagggccttcgagaaatatggcatcatcgaggaggtggtcatcaagaggcctgcccgtggccagggcggtgcctatgccttcctcaagttccagaacctggacatggcccatagggctaaggtggccatgtcgggccgagtgattggtcgcaaccccattaagataggctatggcaaggccaaccccaccactcgtctctgggtgggtggcctgggacctaacacgtcactggcggctctggcccgagagtttgaccgctttgggagcattcggaccattgatcacgtcaaaggagatagctttgcctatattcagtacgagagcttggacgcagcccaggccgcctgtgctaaaatgaggggttttcccttgggtggaccagaccgcaggctccgcgtggattttgccaaagcagaggagactcggtacccccagcagtaccagccctcgccactccctgtgcattatgagctgctcacagatggatacacccggcaccgcaacctggacgccgacctggtgcgggacaggacgcccccacaccttctgtactcagaccgagaccggacttttttggaaggggactggaccagccccagtaaaagctctgaccgccgaaacagccttgagggctacagtcgctcagtgcgcagccggagtggtgagcgttggggggcagatggagaccgtggtttgcccaagccctgggaagagaggcggaaacggagaagcctttccagtgaccgtgggaggacaacccattcaccatatgaggaacggagtaggaccaagggcagtgggcagcagtcagagcggggctccgaccgcacccctgagcgcagccgcaaggagaaccactccagtgaagggaccaaggagtccagcagcaactccctcagcaacagcagacatggggctgaggaacggggccaccaccaccaccaccacgaggctgcagactcttcccacgggaagaaggcaagagacagcgagcgcaatcaccggaccacagaggccgagcccaagcctctggaagagccaaaacacgagaccaaaaagctgaagaatctttcagagtacgctcagacactacagctgggttggaatgggcttctggtgttgaaaaacagctgcttccccacgtctatgcatatcctagagggggaccagggggtgatcagcagtctcctcaaagaccacacttctgggagcaagctgacccagctgaagatcgcccagcgccttcgactggaccagcccaagcttgacgaggtcacacgacgcatcaagcaggggagccccaacggctatgcggtcctcttagccacccaggcaacccccagtgggcttggcactgaggggatgcccacagtagagcccggtctgcagaggcggcttctcaggaacctggtctcctacttgaaacagaagcaggccgcaggggtgatcagcttgccagtgggggggtccaagggcagagacggcacaggcatgctctacgccttcccaccctgcgacttttcccagcagtacctccagtcagcactaaggacattgggcaagctagaagaagaacacatggtgatagtcatcgtcagagacactgcctagcccaagcctgtctttcccagcgtcatgtttgtgtcacaaaagcagttattttaaaatctgatcccctctctaccctaccactttggtttgaattatctcctgggttattttggttcatttgggtggggatcaaagtcctgtccaccaccaaaactaagttcttagattttgggggatttttttttttaaacgatgagaagggaatccggttatgttgatttctagtgtacaagatactgtctgctgtggttctgtatttttttattttttgaccaactgtatggaaagttgtcagtaaaacctttgacagaggatggatttttaaacctgttcagagtcctggtttaatcaatcaagctaaaagaatcgaagacatccctagtgcatgtacacgaatgccctacgtcatccttccagcaccactgctgcatgggtcactctcggcctctcaattcttcaggctcagtctggactctacttacactcatttttatcttggctgacagcaggcaagcttcagtttgggctgtggacgctgccacacaagcctgagtagagcccatgcaaaggaagggatggggtgagcgcaaggcctgtggtcagcagctactgatggttttttctgccttaaaccgtgtgtgtgtccatcatcatcagtttgagctgtggctgtttgtttgggacagagtgcccactcagcatgtttggcagcaggtagccttcagcagctgtgtagtcttgtacaaggagaagctgtgcactgttgatgccagggggtctcggggcccctgatctgtccaggctcctggttcggcctactttctagcctcactcagcccagggatagccagtgttgggagacagagttgcctcaggttcccaggggcccgggagtccaaatactggaatggagggttggaggcagccttccttggatttactcatgaactttgcctagttgtttgtgatttttggctttctctggtcgttcaggggtgatgggtaatagagcaggcccgtgtccagtcatacctagagatttgtggggggatactgaacctctagactgaagtacttaccggggagcacagtggactaggggatgcccttgataatgacggtttcctaggtgcaagatcagagcatgtgcctacaccttgtgccctgatgccgaggtggagaccattgggaaataattaatagatatttttctggggggaaatcacaagtcactgaggtgtttgtttgtttgttaggcagtgctagagcttgaagccactcaagccagttggggaggaaagggatgcggaggtaccctctagctgggaagaagggtgagattccgtcttcttccctgtctcaagtaagtaaggaaggtactgcggacagtgtgggccagggaggaaaaccagagcacacagttttgtcaccatggaacaccccaaatgccattcttcagcgtgtctggtaccttggatgttcaaacagggaacactgtcagggctgaggagaacagaagctctggtaagcgaatgagcccctagatgataaccaggaactccaggttctgctggccgtggcatcctctctccaggtctgctcccttaccggagctaggataaggtagcatgagtgacacctgagattagaggctggggctcactgcaggctgtggagaggtcatgctggtccacaggaacacttggcagtgctctcgtagacccctcggtgatgtggaatggacaggtgcctcgcaagagagcaagcacgttcataacaaaacagcaacacaaagacatgttaagcatgtttatttatttgcctgtttttgtttttttacttgagctgtggtcacagctgccaggtacctaagcaagtcagttgggtacagcaggacacgccaccattccagggtagctggtaccgccagaaacaggagtgggtcttgtcctgttgcaggcacactgcagtggttttcctgcagctctccaacaaacgcctgagtcacaggccagagctgccttggtatgttgttaagtccaaaacttcttctctgggctacctatcttccttcatgaagcaggtgctcaggacccggaagaatcatctacctcccagctttgtgagacagaaccaagtaaaaggaaacatgctagaaaacgtgcctagagaagacacttcaacctttgccttatccaacccctcttcagagaaaggtgtcccatggccccaaaaagaactgccaagttttggtgaggagtaacaccctggcatgacattccttctctttcctggccctcaaccacttccttcctttggctcttaagacctagcaggttctgtgaactctcaggccttggccagcactagttaggggaggtcaggtggtcaatgtcctggtgattttatgagactgccccactgagaaaacttacttacttcaggcatccagtgcccccacccagggttcaggccctgtctaaggtgttgcttaaagacaaaaaggcaacatgtgcctcactggtggtgtgccactgttctcatgctgcctcctaagtgactccgattttcagccctggtagaataaggaagacagctgatgcctccttagccccttagcacatgttcctaaggtgtgttgtcaagccaacctgaattctgcctccctgttatagtccctgtctcccccacagagacctgtgggtgctcccagcagagttgagactggctccgttgagttaatgactagaatatagtgctttcactacttgattgttaacctgttttcttctgatgccatcagtaccagcagtcagactattccactggttaagtgtttactaccattaaagcgaggcatgaagcaaagagctgagtgagtcctctgctctccagaggaccaagaaatacctgtgtgacacagacccacttcagtgtgtacagcaaattctatagtgcttctgagcccagcagggctttacctgcccctggagagttttagccgtcttgtgtttcttgtttacttcacaaccaaatttgtcccctcttctctctgttaagggagagaagtcactttagctggataatacctatgtaacaaactgagcagctgttatttgggcaaaatcaaaggaagaaagagactatggtcttctatttattgtgggaaggaaaacagggtggggcgggtgagtgaaaaggtggaaatccctggtaccttgcctggtggttacacagtttaaccataggccaattttaggggcctctgaagtatctttctacaaacgcagacaagctccactacccctaacctgccaggatgctcaagtccactgtcacaatccctttcagaaaacattagtggccgctgccccagctacagagacggccgaaatgctttcactccttagctttgccaactccatcctccaaaacttcccagaatacctccctttccagttctaccaaatctgtacttgggagcagcctgctggatccagaacatgacaacagagagctgcgtccacagggaacaaagccctgacctctctctccacattacccttacaaaaacaggccctccccatgagagagctacacggcaggggcagacactgtgagtataagctactttcctccctggagtgctctatgtgggcagaacatgctctccttgcctctcctggaaggtgtcttctctatggcctggctagagctgcaaaaaagggacacaccccacttcggtaaaagaaaatagggaaaggccataaacaaagacagacttgtagtttattttgtattttttttaaataaatacactttacattaaagaaaaa

SEQ ID NO: 177645 - DNA, 2755 bp, Homo sapiens
  Payload ID: 14862
  Gene Symbol: RBM17
  Gene Name: RNA binding motif protein 17
  Uniprot ID: Q96I25
  ENST ID: ENST00000379888
  CDS Start-End: 226-1431
caggcgcaggcgcaggcggggcgcaggcgcgggcgcgctctcccggcagcccgcgctccctgaccccgcgccgccgagcgccctgaggactcagcgaagggtgggcgccgccgaggcctcctgccgctggcgggtttccgcggagtgccgcccggctccgctctgccgccggcgcggctcatgggcagagtcggccgggcgggccggcattaaactgaagaaaagatgtccctgtacgatgacctaggagtggagaccagtgactcaaaaacagaaggctggtccaaaaacttcaaacttctgcagtctcagcttcaggtgaagaaggcagctctcactcaggcaaagagccaaaggacgaaacaaagtacagtcctcgccccagtcattgacctgaagcgaggtggctcctcagatgaccggcaaattgtggacactccaccgcatgtagcagctgggctgaaggatcctgttcccagtgggttttctgcaggggaagttctgattcccttagctgacgaatatgaccctatgtttcctaatgattatgagaaagtagtgaagcgccaaagagaggaacgacagagacagcgggagctggaaagacaaaaggaaatagaagaaagggaaaaaaggcgtaaagacagacatgaagcaagtgggtttgcaaggagaccagatccagattctgatgaagatgaagattatgagcgagagaggaggaaaagaagtatgggcggagctgccattgccccacccacttctctggtagagaaagacaaagagttaccccgagattttccttatgaagaggactcaagacctcgatcacagtcttccaaagcagccattcctcccccagtgtacgaggaacaagacagaccgagatctccaaccggacctagcaactccttcctcgctaacatggggggcacggtggcgcacaagatcatgcagaagtacggcttccgggagggccagggtctggggaagcatgagcagggcctgagcactgccttgtcagtggagaagaccagcaagcgtggcggcaagatcatcgtgggcgacgccacagagaaagatgcatccaagaagtcagattcaaatccgctgactgaaatacttaagtgtcctactaaagtggtcttactaaggaacatggttggtgcgggagaggtggatgaagacttggaagttgaaaccaaggaagaatgtgaaaaatatggcaaagttggaaaatgtgtgatatttgaaattcctggtgcccctgatgatgaagcagtacggatatttttagaatttgagagagttgaatcagcaattaaagcggttgttgacttgaatgggaggtattttggtggacgggtggtaaaagcatgtttctacaatttggacaaattcagggtcttggatttggcagaacaagtttgattttaagaactagagcacgagtcatctccggtgatccttaaatgaactgcaggctgagaaaagaaggaaaaaggtcacagcctccatggctgttgcataccaagactcttggaaggacttctaagatatatgttgattgatcccttttttattttgtggttttttaatatagtataaaaatccttttaaaaaaacaacaatctgtgtgcctctctggttgtttctcttttttattattactcctgagttgatgacattttttgttagatttcatggtaattctcaagtgcttcaatgatgcagcatttcttgcactaaaaaaaaaaaaaaaaaaaaaactagaaagttttgggacatggggttatattaaattattctttgtttttctttttcttttaataaagcctgcaagttactaaattgtagtttcataaattctgtagtaaagtatcatcttggcagtgtgccaaaggtgaaaatgatgctttctctaacagagaaattcttagtgactccagtcgtagaaaaacgtctttacaacctgaataagattgaagaattgtgaacataccatggcctattggatgaatcatttgccgtaggctaaatcagactgtagggtttgtgatggatttatggagtatgtgggtatagaaatcatgaatctagcatttgttttcagagattcaagcatagtcttaagggtagatcagaaatgacaaatgaattcaaaacctagcaggtgcattgtaaatgtgtgcccagttatgttttggaaatggcagttccttggggtcatgtttctactggcaaaatttgcaatagtgttctattgtatgtaattttaaaatttataagattatccacgttggccaagtaaactgtactgccaatagaattctggaattgtgagaaattgtatcattgaagttcagtaggatgtgtggcttaaaaatttatcaggaccacaaaaaagaaaacaaaaatatttggtactgaggttcattgccagggcaggaggtatttccagaaaatactcatgcctgtgttctgttccttgctttcccaaatactgcatgtgactttcctaagcggcagctgaaagactcgagcccgtgctgtctcctttggttattatgacatgaaagtgtatcaagaactcagcatttctttgcatccatggacttggtttggagacataaggaatattctgaccctttttaaaaaaggattttctcatgtttttatttaacataaataaaagaataacattttatcttttgtggtattattttattgaataaaattgagttttatgataaaa

SEQ ID NO: 177646 - DNA, 3751 bp, Homo sapiens
  Payload ID: 14862
  Gene Symbol: RBM17
  Gene Name: RNA binding motif protein 17
  Uniprot ID: Q96I25
  ENST ID: ENST00000446108
  CDS Start-End: 645-1850
agtccccgcggcgggcgctggtctctccacgcggctgcggcccggtaccctccgcccgccgccgcctctggtgaccctggccctgaccttctccctcttcccttcctcctcctcctcctcatgtctgcctcgggctgtttggtgctgaagagcgtttcttctccgtctcgtgcaccgcatcctgacgaaattgtctggtcaccagaaccgagtagcccgtagcgtgtcccccctggccctgcacggttgcccctctctggggctcggagccggttcctcccggggtctcagaactgggagtgcagacgttggcgtttctcagactccggagctgcccgggacaggaatgcagccctaaccccggcgtcgcctcggctcgtgcagtttgagcggtgtttcagcgctcacgtccgaccccaggcagtctttgagcttcgcctcttgccccgagaatgtgtaatgatcggagaatgcaggtggaatgaggttctgcccctgcttgcaggagtttggtttctgggaaagcaggcgtgaaaacccaggcccgggttgatttgagaaacgcaagtggggtctggaaggacctctcttgagagaggaggtcatgcttatgttgagtcttgaagcattaaactgaagaaaagatgtccctgtacgatgacctaggagtggagaccagtgactcaaaaacagaaggctggtccaaaaacttcaaacttctgcagtctcagcttcaggtgaagaaggcagctctcactcaggcaaagagccaaaggacgaaacaaagtacagtcctcgccccagtcattgacctgaagcgaggtggctcctcagatgaccggcaaattgtggacactccaccgcatgtagcagctgggctgaaggatcctgttcccagtgggttttctgcaggggaagttctgattcccttagctgacgaatatgaccctatgtttcctaatgattatgagaaagtagtgaagcgccaaagagaggaacgacagagacagcgggagctggaaagacaaaaggaaatagaagaaagggaaaaaaggcgtaaagacagacatgaagcaagtgggtttgcaaggagaccagatccagattctgatgaagatgaagattatgagcgagagaggaggaaaagaagtatgggcggagctgccattgccccacccacttctctggtagagaaagacaaagagttaccccgagattttccttatgaagaggactcaagacctcgatcacagtcttccaaagcagccattcctcccccagtgtacgaggaacaagacagaccgagatctccaaccggacctagcaactccttcctcgctaacatggggggcacggtggcgcacaagatcatgcagaagtacggcttccgggagggccagggtctggggaagcatgagcagggcctgagcactgccttgtcagtggagaagaccagcaagcgtggcggcaagatcatcgtgggcgacgccacagagaaagatgcatccaagaagtcagattcaaatccgctgactgaaatacttaagtgtcctactaaagtggtcttactaaggaacatggttggtgcgggagaggtggatgaagacttggaagttgaaaccaaggaagaatgtgaaaaatatggcaaagttggaaaatgtgtgatatttgaaattcctggtgcccctgatgatgaagcagtacggatatttttagaatttgagagagttgaatcagcaattaaagcggttgttgacttgaatgggaggtattttggtggacgggtggtaaaagcatgtttctacaatttggacaaattcagggtcttggatttggcagaacaagtttgattttaagaactagagcacgagtcatctccggtgatccttaaatgaactgcaggctgagaaaagaaggaaaaaggtcacagcctccatggctgttgcataccaagactcttggaaggacttctaagatatatgttgattgatcccttttttattttgtggttttttaatatagtataaaaatccttttaaaaaaacaacaatctgtgtgcctctctggttgtttctcttttttattattactcctgagttgatgacattttttgttagatttcatggtaattctcaagtgcttcaatgatgcagcatttcttgcactaaaaaaaaaaaaaaaaaaaaaactagaaagttttgggacatggggttatattaaattattctttgtttttctttttcttttaataaagcctgcaagttactaaattgtagtttcataaattctgtagtaaagtatcatcttggcagtgtgccaaaggtgaaaatgatgctttctctaacagagaaattcttagtgactccagtcgtagaaaaacgtctttacaacctgaataagattgaagaattgtgaacataccatggcctattggatgaatcatttgccgtaggctaaatcagactgtagggtttgtgatggatttatggagtatgtgggtatagaaatcatgaatctagcatttgttttcagagattcaagcatagtcttaagggtagatcagaaatgacaaatgaattcaaaacctagcaggtgcattgtaaatgtgtgcccagttatgttttggaaatggcagttccttggggtcatgtttctactggcaaaatttgcaatagtgttctattgtatgtaattttaaaatttataagattatccacgttggccaagtaaactgtactgccaatagaattctggaattgtgagaaattgtatcattgaagttcagtaggatgtgtggcttaaaaatttatcaggaccacaaaaaagaaaacaaaaatatttggtactgaggttcattgccagggcaggaggtatttccagaaaatactcatgcctgtgttctgttccttgctttcccaaatactgcatgtgactttcctaagcggcagctgaaagactcgagcccgtgctgtctcctttggttattatgacatgaaagtgtatcaagaactcagcatttctttgcatccatggacttggtttggagacataaggaatattctgaccctttttaaaaaaggattttctcatgtttttatttaacataaataaaagaataacattttatcttttgtggtattattttattgaataaaattgagttttatgataaaagtgcacctgttctgtaaagtaagttggggttaaggaatgtgaggtaaattacataattgaacattgtggaagacagaatcaaaagcagccctggaacttcagttatctatggaattaggcataccattcctcaagtggaaaccatgtttgtgcttacaagtaccggagtgtgcttgtttaattttagaaactaatggttccaacccacctttcatgcatgcatttattgttgttatgctttgtaaaacattgtttgcacctaaatgggtggcttttcctaacattctcatggtcagcaaccagagagttgcaaccaactcatactacttgatttccgttcgcatgaggacagcttggtgtgtgcctttctccccagtcttttatttttaaaataactgtgttaatcagttagtgctttatttataatgaatttctgatagtcgaataatttctaaatctcctgcaagttagtacttgagaaatttgaaattaattttcaatattaacatttaagctaatataaaaattttaaatttcaataaaaattaaaaattatgtaagctacaatgtaactggc

SEQ ID NO: 177647 - DNA, 833 bp, Homo sapiens
  Payload ID: 14862
  Gene Symbol: RBM17
  Gene Name: RNA binding motif protein 17
  ENST ID: ENST00000437845
  CDS Start-End: 114-833
gcgccgccgagcgccctgaggactcagcgaagggtgggcgccgccgaggcctcctgccgctggcgggtttccgcggagtgccgcccggctccgctctgccgccggcgcggctcatgggcagagtcggccgggcgggccggagccaaaggacgaaacaaagtacagtcctcgccccagtcattgacctgaagcgaggtggctcctcagatgaccggcaaattgtggacactccaccgcatgtagcagctgggctgaaggatcctgttcccagtgggttttctgcaggggaagttctgattcccttagctgacgaatatgaccctatgtttcctaatgattatgagaaagtagtgaagcgccaaagagaggaacgacagagacagcgggagctggaaagacaaaaggaaatagaagaaagggaaaaaaggcgtaaagacagacatgaagcaagtgggtttgcaaggagaccagatccagattctgatgaagatgaagattatgagcgagagaggaggaaaagaagtatgggcggagctgccattgccccacccacttctctggtagagaaagacaaagagttaccccgagattttccttatgaagaggactcaagacctcgatcacagtcttccaaagcagccattcctcccccagtgtacgaggaacaagacagaccgagatctccaaccggacctagcaactccttcctcgctaacatggggggcacggtggcgcacaagatcatgcagaagtacggcttccgggagggccagggtctggggaagcatgagcagggcctgagcactgccttgtcagtggagaagaccagcaag

SEQ ID NO: 177648 - DNA, 792 bp, Homo sapiens
  Payload ID: 14862
  Gene Symbol: RBM17
  Gene Name: RNA binding motif protein 17
  ENST ID: ENST00000418631
  CDS Start-End: 157-792
aatggtaccaggagcctgggcctctgttgctgaaaggtcctggaccttttacctctaaaatttcatgatacttattttaacatgaaaagcctttattgaattgtgcattctttaatccccaccccttttgcctttcagcattaaactgaagaaaagatgtccctgtacgatgacctaggagtggagaccagtgactcaaaaacagaaggctggtccaaaaacttcaaacttctgcagtctcagcttcaggtgaagaaggcagctctcactcaggcaaagagccaaaggacgaaacaaagtacagtcctcgccccagtcattgacctgaagcgaggtggctcctcagatgaccggcaaattgtggacactccaccgcatgtagcagctgggctgaaggatcctgttcccagtgggttttctgcaggggaagttctgattcccttagctgacgaatatgaccctatgtttcctaatgattatgagaaagtagtgaagcgccaaagagaggaacgacagagacagcgggagctggaaagacaaaaggaaatagaagaaagggaaaaaaggcgtaaagacagacatgaagcaagtgggtttgcaaggagaccagatccagattctgatgaagatgaagattatgagcgagagaggaggaaaagaagtatgggcggagctgccattgccccacccacttctctggtagagaaagacaaagagttaccccgagattttccttatgaagaggactcaagacctcgatcacagtcttccaaagcagccattcctccccca

SEQ ID NO: 177649 - DNA, 676 bp, Homo sapiens
  Payload ID: 14862
  Gene Symbol: RBM17
  Gene Name: RNA binding motif protein 17
  ENST ID: ENST00000447032
  CDS Start-End: 1-676
ttcccttagctgacgaatatgaccctatgtttcctaatgattatgagaaagtagtgaagcgccaaagagaggaacgacagagacagcgggagctggaaagacaaaaggaaatagaagaaagggaaaaaaggcgtaaagacagacatgaagcaagtgggtttgcaaggagaccagatccagattctgatgaagatgaagattatgagcgagagaggaggaaaagaagtatgggcggagctgccattgccccacccacttctctggtagagaaagacaaagagttaccccgagattttccttatgaagaggactcaagacctcgatcacagtcttccaaagcagccattcctcccccagtgtacgaggaacaagacagaccgagatctccaaccggacctagcaactccttcctcgctaacatggggggcacggtggcgcacaagatcatgcagaagtacggcttccgggagggccagggtctggggaagcatgagcagggcctgagcactgccttgtcagtggagaagaccagcaagcgtggcggcaagatcatcgtgggcgacgccacagagaaaggtgtgtccccagggaagcgtgtgactagagggaaaggactggccccatccatatcagacatggccagtcttgatcctcatgtgtcagcagggggacaatg

SEQ ID NO: 177650 - DNA, 805 bp, Homo sapiens
  Payload ID: 14862
  Gene Symbol: RBM17
  Gene Name: RNA binding motif protein 17
  ENST ID: ENST00000432931
  CDS Start-End: 142-805
gaggactcagcgaagggtgggcgccgccgaggcctcctgccgctggcgggtttccgcggagtgccgcccggctccgctctgccgccggcgcggctcatgggcagagtcggccgggcgggccggcattaaactgaagaaaagatgtccctgtacgatgacctaggagtggagaccagtgactcaaaaacagaaggctggtccaaaaacttcaaacttctgcagtctcagcttcaggtgaagaaggcagctctcactcaggcaaagagccaaaggacgaaacaaagtacagtcctcgccccagtcattgacctgaagcgaggtggctcctcagatgaccggcaaattgtggacactccaccgcatgtagcagctgggctgaaggatcctgttcccagtgggttttctgcaggggaagttctgattcccttagctgacgaatatgaccctatgtttcctaatgattatgagaaagtagtgaagcgccaaagagaggaacgacagagacagcgggagctggaaagacaaaaggaaatagaagaaagggaaaagcgtaaagacagacatgaagcaagtgggtttgcaaggagaccagatccagattctgatgaagatgaagattatgagcgagagaggaggaaaagaagtatgggcggagctgccattgccccacccacttctctggtagagaaagacaaagagttaccccgagattttccttatgaagaggactcaagacctcgatcacagtcttccaaagcagccattcctcccccagtgtacgaggaacaagacagaccgagatctc

SEQ ID NO: 177651 - DNA, 4974 bp, Homo sapiens
  Payload ID: 14863
  Gene Symbol: RBM18
  Gene Name: RNA binding motif protein 18
  Uniprot ID: Q96H35
  ENST ID: ENST00000417201
  CDS Start-End: 142-714
taacgcgtcacgggcggcctggcagctggcggcattgaggcggacgcgtctagaggtccgtctgaccgcggcgtcgggacctggtttccgggcatgagctgagagcaccacgccgaggccacgagtatttcatagacattgatggaagcagaaaccaaaactcttcccctggagaatgcatccatcctttcagagggctctctgcaggaaggacaccgattatggattggcaacctggaccccaaaattaccgaataccacctcctcaagctcctccagaagtttggcaaggtaaagcagtttgacttcctcttccacaagtcaggtgctttggagggacagcctcgaggctactgttttgttaactttgaaactaagcaggaagcagagcaagccatccagtgtctcaatggcaagttggccctgtccaagaagctggtggtgcgatgggcacatgctcaagtaaagagatatgatcataacaagaatgataagattcttccaatcagtctcgagccatcctcaagcactgagcctactcagtctaacctaagtgtcactgcaaagataaaagccattgaagcaaaactgaaaatgatggcggaaaatcctgatgcagagtatccagcagcgcctgtttattcctactttaagccaccagataaaaaaaggactactccatattctagaacagcatggaaatctcgaagatgatggttgtgaattactgtagcagcaaaagcaaattggtctccacacctaaaatcgtctgcctgtgtactttgtagatgtgaatggtactattcaacggagcacaatcacatgttagcatttggtaacataatgtttttggatgttcttatggatgtttcttccctaaactatgtatggaattgagcatcatccagaataaatagcgttgtatcccaaattgtgatttgaaccctgggatgctctaattggctggttggtttggatttgtaactccagaaacattctatagtgtgccagagcaaaaggcaaatacacaaaatattatttaaatcaggaaactaaaaatattaacatctattaaaaaattgagcatttttctacgctcgtgtgtcttttacaacataaagaaaaagtaaaaggcagggagggaagtgagagacagattttaaatcatgttcagaactgttgttccagaatttactacggcaatccctccaactggactgaaaaagagaaagttcttggcaaaaaggagctgattctttgaacaaatgttgtagtaatctgtttaagaattatgcttattgtttcaaaatcccaactaggaaaacatggtgtatatcttaaaattgtttgtgttgacaaaactagaatcaaatttaacattttataccacaacacaagttctatttggaaattgaacttttattctatagcaaccatttttttcaaatctaaataaccatgccttctataataacaaatgttgctattatcatgggacttttaaaattacatttattgcatgggattgtttttatagcatgagaatgttctgtttggaattatatcatggtcagtctaaatagaaaaagcaaaatttctttgaaaacctaaacattgctatattggtcactatcaaacatacaattttctaataattgtgtagcggtctaagtggaagagattgcattatcttgtgcaggacgaggagaggacatgcagtgggcacagaaagtcaatggaacagatgccactgtggcaccaagactgtaatgactctgtgtggtaggtagttttaaaggactgcatgccttggaaatgattcttcacttggagaacatacttgcctctagatatgtttgtcactctaagcatcctgaatataacaatagagaaagataagtcaaccaacagatttagggatgtgtttcttcagcacattttggtcattttgatgccaagtttgacatactgtttaattgggcagcacctttgctcctttaccaggtatgtatcactttgttactccaggtgccattcttggtgatgacagaatgtttatcactatcgttgttagcaagaggaagctttcaatataggaacttaacatcttcccatgagtataaatgaatttaagacatttgaatcaaaacttcagtagagggaggttttagaattcataaaactggtttaaggaaattctttttacttttcccaaggttaatctttttaaatatctctagacatcaaatactttctgtatgtattagctgtgtctgtctatgatgcaagtaactctcctcctatttgggggatagttcagagaggtaggagcattatctcccatttttctggtgacttcttggagtatagaattcaccattttatccgtaagtcttcaaaggattatggtggactagaacttacatagtgcaaaatagtcttctatttttaataggaacttagaaaaaacttagaattatatatagagttgtttcctttagaaaccagagctatttatttgtatttaaagcactgtttattatttgtactgattcttatccctctgtgtgaataaatgtaagacggtgtccgtgtggttatatcttctctcgttcacttactggcatagactgcagttctctgacaggcttgtttccactcaggactctggccagcatgtccacgtggggtgcttcttctaagtgccttctctgcagagggttctggctagagagtcaaactgagaggcaactctctttaccctttatgcctgcctacctctgttgttagagatgagaatagagaccagctgtttccattgcaaatgtcactatttgaaaagaagttgttaatggaaatctctgcaagtatcgtactgtgtttagtctctcgtggtagagatttcaaaagaagaaatgtatgtatcctaaatatgctgaaagcagtctgatgaaaggtttttaaatttcaggtgttaacttggtcaactctttgttaggaggttgtctgtactttaagtaaaattattctttggtttactggttattttggtttgctaaaattatgtcacttataattttgatttatatacaagagtgaagaattgaaggaaatactgaggagagacgtatgaactattttcttcatctcaattcctattttatcaaatgcaaaatgtaatcctaaccagttgattttctataattggtatcttagtactggggaggagtatcacatgaggaaagatttttcaaagcatgtcagctgaggcacaagaatcgcttgaacccaggaggtagaggttccagtgagccgagattgtgccactgcactccagcctgggcaacagagtgagacaccgtctcaaaaaaaacaaaaacaaaacaggtcaaaaatcagttgcacaagttgtatgaaaccaggtattctgcagctctgtctcttgtttattaagatatgcacagtttctgaatcaacaaatatatctgtgattcttttatactactacataaaagaacaggagtaattcttgccttataaattaaatgtcaaacatttcctatatgtaatcatttgttcctaaaatatgatttagtcccagcatgcttatccctgttttctctttttctctccagctcctatctagttcttcaacaaatcctgtcaactctaccttccaaatgcctcttgaatccagccatctcaccacctccaacactaccaccatttttcttaaagccaccatcatctcttccctggactattacaataccttcctaattatctccctgcctctgctattgattctttagggtccgttttccacacagtagccaaagcaatttttaaaaaaattattttaaaatgtgattctcttctttgtggctttccatcacagcctagaaaaaattgaaagatctgtaaggccctaatgacctgtccttcactacgtgtctgaccctatagcctactgttctccccttgtgcggtgtactgcagccacgttggccttcttgctattctttgaatacaagggagcttctacttcaaggcatttacattggctgttgccttagcttagaacgctctttctccagatagccgcagagcccgctctctcacctgactcatgtctctgctcaaatgttaatgatcaagaggcagtccccggcctccctcttaaaattacaacctgtcactctccaatcctttcctcacgattttctcaaaagcacttaccgctaaccaacattatatctaaatttttttttgtctctttttattggaatgtaagtttcatgtaagcaggaactgtatatcactgctataccctcagcatttaaaacaatggctgtacatcatacatactcaataaatatttgttggataaactacaagaattctggtatttgagagccaaagggccttaagagaccatctcatatagccccctcattgtccagatggggaaaacgggaacccagagagacaaagcgatttggccagggtcacctggttaatgggagagctttaggtagaacccaggcctgcaaacatctagtccagtgttcagcaaactggcctctgcctcctaattttgtatagcctacaagttaagaatgatttttttttcattttcgagtggttgagaaaaaaagtaaacaaaatatatatactatattgtgacatgaaaatgatacgaaattcaaatctcagtgtatgttaataactattagaacacaaccatgcccaggcatttacatgtggctgttttccccatataatagaagagttgaatagttggcaatgaagactgtggcctacaaaacctgaaatatatactatcggtccctttacaggaaaaatttgccaaaccctactctaaacaatattccatgactggaaatgtgttttctaaaattctcgtattaatgcagagaataaaagcaacagatgtcagaatgatgtgcaccg

SEQ ID NO: 177652 - DNA, 4194 bp, Homo sapiens
  Payload ID: 14864
  Gene Symbol: RBM19
  Gene Name: RNA binding motif protein 19
  Uniprot ID: Q9Y4C8
  ENST ID: ENST00000261741
  CDS Start-End: 145-3027
cttccggacaggtcaggccaaggtctcagccacgtgactgtgttccggctcggtaaagatggcggcgcccagggcggtagcgtgaaacttggtggaagacgctgaccagtcgtgttggaatcaaaacagcggggaccctgcgccatgtcgcgactgatcgtgaagaatctcccgaatgggatgaaggaggagcgtttcaggcagctgtttgccgccttcggcacgctgacagactgcagcctgaagttcaccaaagatggcaagttccgcaagtttggttttattggcttcaagtccgaggaagaggcccagaaggcacagaagcatttcaacaagagcttcatcgacacatcccggatcacagtggagttctgcaagtcattcggggacccggccaaacccagagcctggagcaaacatgcccagaaaccaagccagcccaagcagcctccaaaagactctactactccagaaattaagaaagatgagaagaagaaaaaggtggcaggtcaactggagaagctgaaggaggatacagagttccaggagtttctgtcagttcatcagaggcgggcgcaggcagccacttgggcgaatgatggcctggatgctgagccctcgaaagggaagagcaagccggccagtgactacctgaacttcgactccgattctgggcaggagagtgaggaggagggagccggggaggacctggaagaagaggcaagcctcgaaccaaaggcagctgtgcagaaggagctgtcggacatggattacctgaaatccaagatggtgaaggctgggtcgtcctcttcctcggaggaagaggaaagtgaagatgaagccgtgcactgtgatgaagggagtgaggccgaggaagaggattcctccgccaccccagtcctgcaggaaagagacagcaagggtgcaggccaagagcaagggatgccagctgggaaaaagagaccaccggaggccagagccgagacagagaaaccagcaaaccagaaggaacccaccacctgccacaccgtgaagctgcggggagccccgttcaatgtcacagagaaaaatgttatggaattcctggcacccctgaaaccagtggccattcgaattgtgagaaacgctcatgggaataaaacaggatacatctttgtggatttcagcaatgaagaggaagtgaagcaagctctgaaatgcaaccgggagtacatgggtgggcgctacatcgaggtgttcagggaaaagaacgtccccaccaccaagggtgcaccaaagaataccaccaaatcctggcaaggccggatactcggggagaacgaagaggaggaggacctggccgaatccggaaggctctttgtacggaacctgccctacaccagcaccgaggaggatctggagaagctcttctccaaatatggtcccctgtctgagctccactaccccatcgacagcctgaccaagaaacccaagggttttgcattcatcaccttcatgttccctgagcacgctgtgaaggcctactcggaggtggacgggcaggtattccagggcaggatgctccacgtgttaccatctaccatcaagaaggaagccagcgaggatgccagtgccctgggatcgtcgtcctacaagaagaagaaggaggcccaggacaaagccaacagtgccagctctcacaactggaacacactattcatggggccgaatgccgtggccgatgccatcgcacagaagtacaacgccaccaagagtcaagtgtttgaccacgagaccaagggcagcgtggccgtgcgcgtggctctgggggaaacccagctcgtccaggaagtgcggcgttttctcatagacaacggggtcagcctggattccttcagccaggctgcagcagagcgaagcaagactgtgattctggtcaagaacctcccggcaggcaccctggcggcccagctgcaggagaccttcggccattttggcagcctgggccgcgtgctgctgccagagggcggaatcactgccatcgtggagttcctggagcccctggaggcccgcaaggccttcaggcatctggcctattccaagttccatcatgtccccctctatctggagtgggctccagttggcgtcttctccagcacagccccacagaagaaaaagctccaagacacaccttcagaacccatggaaaaggacccagcagagccagaaacagtgcctgatggcgaaaccccagaagatgaaaatccaacagaggaaggagcagacaactcttcagcaaagatggaagaggaggaggaggaagaggaagaagaagaagagagcctcccaggatgtactctgtttattaagaatctcaattttgacacaacagaagagaagctgaaggaagtgttttcaaaagtggggacagtgaagagctgctccatctccaagaagaagaacaaagcaggagtgctcctttccatggggtttggatttgtggaatacaggaagccggagcaagcccagaaagctctcaagcagctccagggtcacgtcgtggacggccacaagctggaagtgaggatctcggaacgagccactaagccagccgtgacattggctcggaagaaacaagttcccagaaagcagaccacctccaagatcctggtgcggaacatccccttccaggcccacagccgggagatccgagagctcttcagcacctttggggagttgaagacggtccgcctgccaaagaagatgactgggacaggcacacacagaggcttcggctttgtggacttcctcaccaagcaggatgcgaagagagccttcaacgccctgtgtcacagcacccacttgtacgggcggaggctggtgctggagtgggccgactccgaggtgaccctgcaggccctgcggcggaagacggccgctcactttcacgagcccccgaagaaaaagcggtctgtggtgttggacgagatcctggagcagctggaaggcagtgacagcgacagcgaggagcagacccttcagctgtgagctggcaccgagagggtgtgtggctccggggccctggggaccgggacagccgctccagcttctgcactcaccaccatgtgggctggggggcggggcggggagcggcaggcggccccaccctgcactggtccaaggtcggaggagacaggggatgaggaaggcctcaggccactgcccagcggcccaggcatcctgggtttcaccagtgacgcgttctagcagacactgactgcgcacctgctctgtagcagacacggaagagtccaagggagcagccacgttaggaagagagacttgggaacagctacacagggagctagaacccctgctccccctgtccccaccccaggagagtaaggggacgagggccagctctctggcatcaggctgcttggacatgaaaccccgtctccaagctcaagctgggagaccctggcccagtttccttatctccttgggcccagccttccccttgctagctagttcttacttcataaggttttagagagaaataaacgcagtaatgcatgaagagtgccgggcatggtgctgagccctgttcctgctctccctccagggctgctgagctagaattcccacctatgtctttccaagggactgttcacggcttgggacttggtctctgtcctgccccatcctcgtcacttgggaccacgagccctggttcagtcacccagggaagcctcccagcggctcatgaagcatcgagctccaagcccagatgccaagctccctggctgagctgaatgatgtcactcatggtggacgcgttctgctcacgggcccagagccctgtgaaatgcatcaaggtcctctccgctggccagcagcatccccaggcttctctcaggcgcccgtgttcacattttctccagcctgagacgcagcctcccgcctggaagggcctgtgccagcaccaggcagagggcaagacggagagggcagagcaagaactgcactgcatctcactgcagtctgaatctagacatcgccattccccgaggtgcgacctcagactaatgacatcctggctgagcctctgtttttctctctaggaaatgggggtgataattgtgcctacctcagatagacagtgccagaattaagtgagtcaagccaagtaaagcccagagaagattctcatca

SEQ ID NO: 177653 - DNA, 3574 bp, Homo sapiens
  Payload ID: 14864
  Gene Symbol: RBM19
  Gene Name: RNA binding motif protein 19
  Uniprot ID: Q9Y4C8
  ENST ID: ENST00000392561
  CDS Start-End: 84-2966
gcggcgcccagggcggtagcgtgaaacttggtggaagacgctgaccagtcgtgttggaatcaaaacagcggggaccctgcgccatgtcgcgactgatcgtgaagaatctcccgaatgggatgaaggaggagcgtttcaggcagctgtttgccgccttcggcacgctgacagactgcagcctgaagttcaccaaagatggcaagttccgcaagtttggttttattggcttcaagtccgaggaagaggcccagaaggcacagaagcatttcaacaagagcttcatcgacacatcccggatcacagtggagttctgcaagtcattcggggacccggccaaacccagagcctggagcaaacatgcccagaaaccaagccagcccaagcagcctccaaaagactctactactccagaaattaagaaagatgagaagaagaaaaaggtggcaggtcaactggagaagctgaaggaggatacagagttccaggagtttctgtcagttcatcagaggcgggcgcaggcagccacttgggcgaatgatggcctggatgctgagccctcgaaagggaagagcaagccggccagtgactacctgaacttcgactccgattctgggcaggagagtgaggaggagggagccggggaggacctggaagaagaggcaagcctcgaaccaaaggcagctgtgcagaaggagctgtcggacatggattacctgaaatccaagatggtgaaggctgggtcgtcctcttcctcggaggaagaggaaagtgaagatgaagccgtgcactgtgatgaagggagtgaggccgaggaagaggattcctccgccaccccagtcctgcaggaaagagacagcaagggtgcaggccaagagcaagggatgccagctgggaaaaagagaccaccggaggccagagccgagacagagaaaccagcaaaccagaaggaacccaccacctgccacaccgtgaagctgcggggagccccgttcaatgtcacagagaaaaatgttatggaattcctggcacccctgaaaccagtggccattcgaattgtgagaaacgctcatgggaataaaacaggatacatctttgtggatttcagcaatgaagaggaagtgaagcaagctctgaaatgcaaccgggagtacatgggtgggcgctacatcgaggtgttcagggaaaagaacgtccccaccaccaagggtgcaccaaagaataccaccaaatcctggcaaggccggatactcggggagaacgaagaggaggaggacctggccgaatccggaaggctctttgtacggaacctgccctacaccagcaccgaggaggatctggagaagctcttctccaaatatggtcccctgtctgagctccactaccccatcgacagcctgaccaagaaacccaagggttttgcattcatcaccttcatgttccctgagcacgctgtgaaggcctactcggaggtggacgggcaggtattccagggcaggatgctccacgtgttaccatctaccatcaagaaggaagccagcgaggatgccagtgccctgggatcgtcgtcctacaagaagaagaaggaggcccaggacaaagccaacagtgccagctctcacaactggaacacactattcatggggccgaatgccgtggccgatgccatcgcacagaagtacaacgccaccaagagtcaagtgtttgaccacgagaccaagggcagcgtggccgtgcgcgtggctctgggggaaacccagctcgtccaggaagtgcggcgttttctcatagacaacggggtcagcctggattccttcagccaggctgcagcagagcgaagcaagactgtgattctggtcaagaacctcccggcaggcaccctggcggcccagctgcaggagaccttcggccattttggcagcctgggccgcgtgctgctgccagagggcggaatcactgccatcgtggagttcctggagcccctggaggcccgcaaggccttcaggcatctggcctattccaagttccatcatgtccccctctatctggagtgggctccagttggcgtcttctccagcacagccccacagaagaaaaagctccaagacacaccttcagaacccatggaaaaggacccagcagagccagaaacagtgcctgatggcgaaaccccagaagatgaaaatccaacagaggaaggagcagacaactcttcagcaaagatggaagaggaggaggaggaagaggaagaagaagaagagagcctcccaggatgtactctgtttattaagaatctcaattttgacacaacagaagagaagctgaaggaagtgttttcaaaagtggggacagtgaagagctgctccatctccaagaagaagaacaaagcaggagtgctcctttccatggggtttggatttgtggaatacaggaagccggagcaagcccagaaagctctcaagcagctccagggtcacgtcgtggacggccacaagctggaagtgaggatctcggaacgagccactaagccagccgtgacattggctcggaagaaacaagttcccagaaagcagaccacctccaagatcctggtgcggaacatccccttccaggcccacagccgggagatccgagagctcttcagcacctttggggagttgaagacggtccgcctgccaaagaagatgactgggacaggcacacacagaggcttcggctttgtggacttcctcaccaagcaggatgcgaagagagccttcaacgccctgtgtcacagcacccacttgtacgggcggaggctggtgctggagtgggccgactccgaggtgaccctgcaggccctgcggcggaagacggccgctcactttcacgagcccccgaagaaaaagcggtctgtggtgttggacgagatcctggagcagctggaaggcagtgacagcgacagcgaggagcagacccttcagctgtgagctggcaccgagaggggctgctgagctagaattcccacctatgtctttccaagggactgttcacggcttgggacttggtctctgtcctgccccatcctcgtcacttgggaccacgagccctggttcagtcacccagggaagcctcccagcggctcatgaagcatcgagctccaagcccagatgccaagctccctggctgagctgaatgatgtcactcatggtggacgcgttctgctcacgggcccagagccctgtgaaatgcatcaaggtcctctccgctggccagcagcatccccaggcttctctcaggcgcccgtgttcacattttctccagcctgagacgcagcctcccgcctggaagggcctgtgccagcaccaggcagagggcaagacggagagggcagagcaagaactgcactgcatctcactgcagtctgaatctagacatcgccattccccgaggtgcgacctcagactaatgacatcctggctgagcctctgtttttctctctaggaaatgggggtgataattgtgcctacctcagatagacagtgccagaattaagtgagtcaagccaagtaaagcccagagaagattctcatcagca

SEQ ID NO: 177654 - DNA, 4422 bp, Homo sapiens
  Payload ID: 14864
  Gene Symbol: RBM19
  Gene Name: RNA binding motif protein 19
  Uniprot ID: Q9Y4C8
  ENST ID: ENST00000545145
  CDS Start-End: 80-2962
cgcccagggcggtagcgtgaaacttggtggaagacgctgaccagtcgtgttggaatcaaaacagcggggaccctgcgccatgtcgcgactgatcgtgaagaatctcccgaatgggatgaaggaggagcgtttcaggcagctgtttgccgccttcggcacgctgacagactgcagcctgaagttcaccaaagatggcaagttccgcaagtttggttttattggcttcaagtccgaggaagaggcccagaaggcacagaagcatttcaacaagagcttcatcgacacatcccggatcacagtggagttctgcaagtcattcggggacccggccaaacccagagcctggagcaaacatgcccagaaaccaagccagcccaagcagcctccaaaagactctactactccagaaattaagaaagatgagaagaagaaaaaggtggcaggtcaactggagaagctgaaggaggatacagagttccaggagtttctgtcagttcatcagaggcgggcgcaggcagccacttgggcgaatgatggcctggatgctgagccctcgaaagggaagagcaagccggccagtgactacctgaacttcgactccgattctgggcaggagagtgaggaggagggagccggggaggacctggaagaagaggcaagcctcgaaccaaaggcagctgtgcagaaggagctgtcggacatggattacctgaaatccaagatggtgaaggctgggtcgtcctcttcctcggaggaagaggaaagtgaagatgaagccgtgcactgtgatgaagggagtgaggccgaggaagaggattcctccgccaccccagtcctgcaggaaagagacagcaagggtgcaggccaagagcaagggatgccagctgggaaaaagagaccaccggaggccagagccgagacagagaaaccagcaaaccagaaggaacccaccacctgccacaccgtgaagctgcggggagccccgttcaatgtcacagagaaaaatgttatggaattcctggcacccctgaaaccagtggccattcgaattgtgagaaacgctcatgggaataaaacaggatacatctttgtggatttcagcaatgaagaggaagtgaagcaagctctgaaatgcaaccgggagtacatgggtgggcgctacatcgaggtgttcagggaaaagaacgtccccaccaccaagggtgcaccaaagaataccaccaaatcctggcaaggccggatactcggggagaacgaagaggaggaggacctggccgaatccggaaggctctttgtacggaacctgccctacaccagcaccgaggaggatctggagaagctcttctccaaatatggtcccctgtctgagctccactaccccatcgacagcctgaccaagaaacccaagggttttgcattcatcaccttcatgttccctgagcacgctgtgaaggcctactcggaggtggacgggcaggtattccagggcaggatgctccacgtgttaccatctaccatcaagaaggaagccagcgaggatgccagtgccctgggatcgtcgtcctacaagaagaagaaggaggcccaggacaaagccaacagtgccagctctcacaactggaacacactattcatggggccgaatgccgtggccgatgccatcgcacagaagtacaacgccaccaagagtcaagtgtttgaccacgagaccaagggcagcgtggccgtgcgcgtggctctgggggaaacccagctcgtccaggaagtgcggcgttttctcatagacaacggggtcagcctggattccttcagccaggctgcagcagagcgaagcaagactgtgattctggtcaagaacctcccggcaggcaccctggcggcccagctgcaggagaccttcggccattttggcagcctgggccgcgtgctgctgccagagggcggaatcactgccatcgtggagttcctggagcccctggaggcccgcaaggccttcaggcatctggcctattccaagttccatcatgtccccctctatctggagtgggctccagttggcgtcttctccagcacagccccacagaagaaaaagctccaagacacaccttcagaacccatggaaaaggacccagcagagccagaaacagtgcctgatggcgaaaccccagaagatgaaaatccaacagaggaaggagcagacaactcttcagcaaagatggaagaggaggaggaggaagaggaagaagaagaagagagcctcccaggatgtactctgtttattaagaatctcaattttgacacaacagaagagaagctgaaggaagtgttttcaaaagtggggacagtgaagagctgctccatctccaagaagaagaacaaagcaggagtgctcctttccatggggtttggatttgtggaatacaggaagccggagcaagcccagaaagctctcaagcagctccagggtcacgtcgtggacggccacaagctggaagtgaggatctcggaacgagccactaagccagccgtgacattggctcggaagaaacaagttcccagaaagcagaccacctccaagatcctggtgcggaacatccccttccaggcccacagccgggagatccgagagctcttcagcacctttggggagttgaagacggtccgcctgccaaagaagatgactgggacaggcacacacagaggcttcggctttgtggacttcctcaccaagcaggatgcgaagagagccttcaacgccctgtgtcacagcacccacttgtacgggcggaggctggtgctggagtgggccgactccgaggtgaccctgcaggccctgcggcggaagacggccgctcactttcacgagcccccgaagaaaaagcggtctgtggtgttggacgagatcctggagcagctggaaggcagtgacagcgacagcgaggagcagacccttcagctgtgagctggcaccgagagggctggagtgcagtggcgtgatctgggctcacctccctggttcaagcgattgtcccgcctcagcctcccaaggctgggattacaggtatgcaccaccacgcccggctaattttgtatttttcatagagactgggtttcaccatgtagaccaggctggtctcgaattcctgacctcaagtgatccacctacctcggcctcccaaagtgtggggattacgggtgtgagccaccacgcccggctaattttttgtatttttagtagacagggtttcaccatgtgggccaggctggtcttgaactcccaacctcaagtgatccacccaccttgttctcccaaagtgctgagattacaggtgtgagccaccatgcccagcctgttcctaaccctttcaactggggggtctcaagtgggtgaggactccatggccacggcagcagaactgtctcttctgaaaaccagactccggggcccctgggtcagcacctctaggtcattccacagacttacacagtttaaagaaagagccagcgaacatggggtgatcctggggtgccactgggatcccaagccaggcccggaggtctgcctgtttcgtccccagaaacttgagctggcatcctccgctggtttgcactgggcacggggactggagagccaccaggccactgagcgcagcatgctatcacttctcaggaagttgtgagggtgaggagaatagccgggcccactctgcagaggggaggaacaggcacaggctagaggcacgggctgatagagtgagtcctctccctcattcattcattcattcattcattcatccatcagacacctgctgggcatctgctgtgtgcgagacactgtgctgggtgccccagacacaagacagaaactcgggtcgctctgtgtgcctccacactggccttccctgctgcgtggacgcaggctctgtctcctaggctttaagccccatgcatcaggtggaagacaatttccagcagcctctgcccgcttgtttttcctcctctccttttcctgccgccttggtcttttttgtcttttgtgcagggccgtctctcgcagcgcccgtctgtgctccgcagcgtctaggaaaggattagtgtgagcagagcacgcaggctttggtgaacagagccgagcttggtttcaacatctaattcaatttgttctgccgagattgaaatatgaaatggttgccagtcaaacgttcaaaggacggggaagggagagtgagcgcatgctgaaatttaaattttaatgaaaatgactttaaccctttggtacaccttgcaaaatgtaacccatcctcccatcctgtgaaagcggcctctcgggttagagcttttccacccacttctcttccactgagcttcactaataatatgtaatcatttttttcagccgtcttaataataaaagattaatag

SEQ ID NO: 177655 - DNA, 588 bp, Homo sapiens
  Payload ID: 14864
  Gene Symbol: RBM19
  Gene Name: RNA binding motif protein 19
  ENST ID: ENST00000552384
  CDS Start-End: 1-333
gtttctagcacctttggggagttgaagacggtccgcctgccaaagaagatgactgggacaggcacacacagaggcttcggctttgtggacttcctcaccaagcaggatgcgaagagagccttcaacgccctgtgtcacagcacccacttgtacgggcggaggctggtgctggagtgggccgactccgaggtgaccctgcaggccctgcggcggaagacggccgctcactttcacgagcccccgaagaaaaagcggtctgtggtgttggacgagatcctggagcagctggaaggcagtgacagcgacagcgaggagcagacccttcagctgtgagctggcaccgagagggtgtgtggctccggggccctggggaccgggacagccgctccagcttctgcactcaccaccatgtgggctggggggcggggcggggagcggcaggcggccccaccctgcactggtccaagctcaagctgggagaccctggcccagtttccttatctccttgggcccagccttccccttgctagctagttcttacttcataaggttttagagagaaataaacgcagtaatgcatgaagagtg

SEQ ID NO: 177656 - DNA, 7233 bp, Homo sapiens
  Payload ID: 14865
  Gene Symbol: RBM20
  Gene Name: RNA binding motif protein 20
  Uniprot ID: Q5T481
  ENST ID: ENST00000369519
  CDS Start-End: 59-3742
ccgggaccgcccctcccttgagctctctcgccgcgatcccgggcgggtctcgccccgcatggtgctggcagcagccatgagccaggacgcggaccccagcggtccggagcagccggacagagttgcctgcagtgtgcctggtgcccgggcgtccccggcaccctccggcccgcgagggatgcagcagccgccgccgccgccccagccaccgcccccgccccaagccggcctaccccagatcatccaaaatgccgccaagctcctggacaagaacccattctcggtcagtaacccgaaccctctgcttccttcacctgccagtctccagctggctcaactgcaggcccagctcaccctccaccggctgaagctggcacagacagctgtcaccaacaacactgcagccgccacagtcctgaaccaagtcctctccaaagtggccatgtcccagcctctcttcaatcaactgaggcatccgtctgtgatcactggcccccacggccatgctggggttccccaacatgctgcagccatacccagtacccggtttccctctaatgcaattgccttttcaccccccagccagacacgaggccccggaccctccatgaaccttcccaaccagccacccagtgccatggtgatgcatcctttcactggggtaatgcctcagacccctggccagccagcagtcatcttgggcattggcaagactgggcctgctccagctacagcaggattctatgagtatggcaaagccagctctggccagacatatggccctgaaacagatggtcagcctggcttcctgccatcctcggcctcaacctcgggcagtgtgacctatgaagggcactacagccacacagggcaggatggtcaagctgccttttccaaagatttttacggacccaactcccaaggttcacatgtggccagcggatttccagctgagcaggctgggggcctgaaaagtgaggtcgggccactgctgcagggcacaaacagccaatgggagagcccccatggattctcgggccaaagcaagcctgatctcacagcaggtcccatgtggcctccaccccacaaccagccctatgagctgtacgaccccgaggaaccaacctcagacaggacacctccttccttcgggggtcggcttaacaacagcaaacagggttttatcggtgctgggcggagggccaaggaggaccaggcgttgctatctgtgcggcccctgcaggctcatgagctgaacgactttcacggtgtggcccccctccacttgccgcatatctgtagcatctgtgacaagaaggtgtttgatttgaaggactgggagctgcatgtgaaagggaagctgcacgctcagaaatgcctggtcttctctgaaaatgctggcatccggtgtatacttggttcggcagagggaacattgtgtgcttctcccaacagcacagctgtttataaccctgctgggaatgaagattatgcctcaaatcttggaacatcatacgtgcccattccagcaaggtcattcactcagtcaagccccacatttcctttggcttctgtggggacaacttttgcacagcggaaaggggctggccgtgtggtgcacatctgcaatctccctgaaggaagctgcactgagaatgacgtcattaacctggggctgccctttggaaaggtcactaattacatcctcatgaagtcgactaatcaggcctttttagagatggcttacacagaagctgcacaggccatggtccagtattatcaagaaaaatctgctgtgatcaatggtgagaagttgctcattcggatgtccaagagatacaaggaattgcagctcaagaaacccgggaaggccgtggctgccatcatccaggacatccattcccagagggagagggacatgttccgggaagcagacagatatggcccagaaaggccgcggtctcgtagtccggtgagccggtcactctccccgaggtcccacactcccagcttcacctcctgcagctcttcccacagccctccgggcccctcccgggctgactggggcaatggccgggactcctgggagcactctccctatgccaggagggaggaagagcgagacccggctccctggagggacaacggagatgacaagagggacaggatggacccctgggcacatgatcgcaaacaccacccccggcaactggacaaggctgagttggacgagcgaccagaaggagggaggccccaccgggagaagtacccgagatctgggtctcccaacctgccccactctgtgtccagctacaaaagccgtgaagacggctactaccggaaagagcccaaagccaagtcggacaagtatctgaagcagcagcaggatgcccccgggaggtccaggaggaaagacgaggccaggctgcgggaaagcagacacccccatccggatgactcaggcaaggaagatgggctggggccaaaggtcactagggcccctgagggcgccaaggccaagcagaatgagaaaaataaaaccaagagaactgatagagaccaagaaggagctgatgatagaaaagaaaacacaatggcagagaatgaggctggaaaagaggaacaggagggcatggaagaaagccctcaatcagtgggcagacaggagaaagaagcagagttctctgatccggaaaacacaaggacaaagaaggaacaagattgggagagtgaaagtgaggcagagggggagagctggtatcccactaacatggaggagctggtgacagtggacgaggttggggaagaagaagattttatcgtggaaccagacatcccagagctggaagaaattgtgcccattgaccagaaagacaaaatttgcccagaaacatgtctgtgtgtgacaaccaccttagacttagacctggcccaggatttccccaaggaaggagtcaaggccgtagggaatggggctgcagaaatcagcctcaagtcacccagagaactgccctctgcttccacaagctgtcccagtgacatggacgtggaaatgcctggcctaaatctggatgctgagcggaagccagctgaaagtgagacaggcctctccctggaggattcagattgctacgagaaggaggcaaagggagtggagagctcagatgttcatccagcccctacagtccagcaaatgtcttcccctaagccagcagaggagagggcccggcagccaagcccatttgtggatgattgcaagaccagggggacccccgaagatggggcttgtgaaggcagccccctggaggagaaagccagcccccccatcgaaactgacctccaaaaccaagcttgccaagaagtgttgaccccggaaaactccaggtacgtggaaatgaaatctctggaggtgaggtcaccagagtacactgaagtggaactgaaacagcccctttctttgccctcttgggaaccagaggatgtgttcagtgaacttagcattcctctaggggtggagttcgtggttcccaggactggcttttattgcaagctgtgtgggctgttctacacgagcgaggagacagcaaagatgagccactgccgcagcgctgtccactacaggaacttacagaaatatttgtcccagctggccgaggagggcctcaaggagaccgagggggcagatagcccgaggccagaggacagcggaatcgtgccacgcttcgaaaggaaaaagctctgatgcttctgcttctgctgctactgctgctgctgcaaggttggaaaggagagcttgctgaagtggggccttcctgattctggggacaggactaaagcctgagaggaaggaaaaccaagcagggcacattgcttgggcttgttcccagagactcagtgaaatgcccctgatatgtctccaggagcaagtcacccaggtgtgtccagcccactgagggtcaccaactctctccctgctgactcttgtttctctcaatctttcaattcgtttttctctcttttcctcttgttctttctctccctccctccttatgtgccaaggatcgtttccttttcacaaaacccaacttctcagggattttcacagtgtttaaattcttggtaggatataacaggtcaggcctagctgagtcaggcaaggaaaaggtttaatggaaactcctgggtcaggcgaacccctgcagtgagtctacagcagtatctctgcctggtgtcccatgtatcccctgcatgaggagctgagtcaggtctgcagtcctggtgaggggacatcacggacaatctgttggcagagctgggagggtcttcattaacctcttcctccaactgggccacccttttgaaaagcccctgtttttaataactgtttcatcctctcagttattctagaaatctgccagacttatgccttaaagtaaaattaaatgaattttagagaagatgaaaagagcccttcattttggaagctctgataagtttcctccaaacttattcccctcctcttgatttcaggagatgtcagggtttttctattctggacaatgaatttggtacagagtcactgtaattaaatataaaaacagaagcatcttcctccagctaaagcagcagttggcgcgggcttaggttgaatgctggcctctctgcaaagcacagctttggctcgagaggcacagctccaggctgtggaaaacagagttgtcttgggggttaaatgagcttatttaagtcaaggaaacatcatctgtccttgattcagccttggtgcctgcactctggggtacaaccacctcacagtaggatggtttttaaatggccccccagttgggggagaagctaaggaaagagaaggctgcagatccaaagagtggcattgaagtttgctgggtgtctgtaggtggaccctttccagctgggcagatagttgagggctccctgggtttgactgtatgtgcagactttgataccaaaatgttatgaaaagtcgtgattcccgctgctctttctggtactggagggtgggtaccttcaggctgtggggtctctagcctgatattccattgaaagggtgtgggataaaggtgctgggggaaatgaggctctgccacagccatagagaggccctcgggcagttaagaagggagcctggagctgttttcatgagcagagatactctcctgaaagcacccttcatagcttagcccaggaaaaataaaacaaggaagacaggtcactctcccctaggcagttcctgttgtttctgttcctgaccttgggcaggcagactgagaagggactgtgtagggttttgttttgttttttttcattttcctttttatggcatgtgagagcatactgtacattctgtcctctgtactaatggaggaagggcagagagattagttcaaggctaacattttatatcaggtaactgaggcacacaaagggaacaaatgaagaacataaaatgatcagtgtaaacctgaaagcacgcagtcattggcaagggacaggctcatgggagctggtgagagagagcagttaaggcaagcaccaggggaaagcagaccaacttgaacagatgtgatgcggagaggttggaagaagcaagaaacctgaactcatcatcaggctattaaataaaatttataggaggctgttggtttggactgagctcctgcaataggcccaacagaccaaaacaaaagggagtcactcatgttgaagttctgtcttccaggaaatcaggagagagagagagagaaagaatagccaaatccccaaacaggccagttttaaccagcatgatgaagtgtccttggttttaacctttataaggaaagcagctttgagatgaccagtctggtttttgttctttgtgtctgctttcctcagcccttttctgtctataaagccaacctcctccgctcagctcatgggaacactcattctattttatagaatgacatgttgcccaattctagaatcaaaaataaaggccaactaagatcttcaaagtaaatttgttgtaattttatcttttgagaagaccatatgggggctgctgaaaagttggtatctcaaataaagtctgaagatcacggctcagcccagattgttcccctggccaactccacaggtttgaacctggcattctggacaccagctatgcctcctccatttctcagaaaacctttgatcttgtgtgtctttcttcctactgaagggaattgtgggggcagttctttggccttcttgctgaactttgctggaaatagcccacaatttttatcagaggttagaactgtacattatcagagagactggacactttatcccctagcaaagtgggagaagattttaccagctcattccactccaccctggccttcccccaccccccatccccagcagcatttccatggaaatccagatggtcgtgtagtgttatggctctcttgtgatagactggccttcatattggagagctagggagagcccctgggagggagagagataaggcgctatctgccttcaatcagaaccttcggtttaaaatcatctaagagtctatacttgtgtgtacatacgtatttatttttatttatttttatacaattccattggcatggtccttcaccgaccctatgatttgcactttttatttctatgtgtgccacacacaatgcagtattaatggcaaccaggtaaatattgatttattttttaaagcttttcttcagtgttttgtcaaccatttcaaagtgtctcccaaaaaaggatgctgaagagcaattgctcccttaagcaacagattcatatttaccctgggttaatacaacaaaaggcctgtataattgtcttttcattgttaacacccaaaatagcatctatctagacagtatccccaaagaatttggaaaatctgatggtgtgagcagcagccgttagtatcagggtttcccattcttggacagtccgaggctgtgacctgttagataattagattatacttgaactggaccagagtttgttttttgaatttatgagaaaaaccaaaacactaagttaagtttgaacttgtaaagtattgaaatttgttgagtgtcctataaattgtcactacttttcctgatctgtataactgactgcaaagtgtttgtttttacaaaagagaaaagaaaagatttttaataaagagaatttgaaagctgt

SEQ ID NO: 177657 - DNA, 2342 bp, Homo sapiens
  Payload ID: 14866
  Gene Symbol: RBM22
  Gene Name: RNA binding motif protein 22
  Uniprot ID: Q9NW64
  ENST ID: ENST00000199814
  CDS Start-End: 123-1385
aagaagccctagacgcgtaaataagacgccgaccggcgcggcgctagcctcggggcttgacgggattgtggcggtcctctctcccaattcggaagctacagctacctccggacgctctcaagatggcgacctctctgggttccaacacctacaacaggcagaactgggaggatgcggacttccccattctgtgccagacatgtcttggagaaaacccatatatccgaatgaccaaagaaaagtatgggaaggaatgcaaaatctgtgccaggccattcacagtgtttcgctggtgccctggagtccgcatgcgtttcaagaagactgaagtgtgccaaacctgcagtaaattgaagaatgtctgtcagacctgcctcttagacctagagtatggcctgcccatccaggttcgtgacgcaggattgtcttttaaagatgacatgccaaagtcagatgtcaacaaagagtactatacacagaatatggagagagagatttctaactctgatggaacacggccagttggcatgctggggaaagccacatctaccagtgacatgctgctcaaactggcccggaccacaccctactacaaaaggaatcgaccccacatttgctccttctgggtgaaaggagagtgtaagagaggagaggaatgtccatacagacatgagaagcctacagatccagatgacccccttgctgatcagaatattaaagaccgttattacggaatcaatgatcctgtagctgacaagcttctaaagcgggcttcaacaatgcctcggctggacccaccagaggataaaactatcaccacactatatgttggtggtctaggtgataccattactgagacagatttaagaaatcatttctaccagttcggagagatccggacgatcactgttgtgcagagacagcagtgtgctttcatccagtttgccacacggcaggctgcagaagtggctgctgagaagtcctttaataagttgattgtaaatggccgcagactgaatgtgaaatggggaagatcccaggcagccagaggaaaagaaaaagagaaagatggaactacagactctgggatcaaactagaacctgttccaggattgccaggagctcttcctcctcctcctgcagcagaagaagaagcctctgccaactacttcaacttgcccccaagtggtcctccagctgtggtgaacattgctctgccaccgccccctggcattgctccacccccacccccaggttttgggccacacatgttccacccaatgggaccaccccctcctttcatgcgggctccaggaccaatccactatccttctcaggaccctcagaggatgggagctcatgctggaaaacacagcagcccctagcaccttgtcaccactctggggctctgtggaagaaagggcacttaaaactcccagtaaatcttggaataaatatatttttccttcccttgtagtttccatggtagctgaatgtgctcagatgtgagcagtcagagactgacagccatgctttcctatacttgttcaaaggatcgatggaccgtaaataagctgccattaacacatctggttactgctgtaacatgactaataaaaccgaacgcctgttccccttacccgtgtgggggacacgcagatgagtgaattggaatgtccagcagagttaccctcccaattatatgttcattttgtatattttttggtcgggggaaaaattgacctgcagtaaaaaaacctttgaccatttttatgtccattggatactttcctttttatcatcttaaaaaaagataactagtactaatcattgtagtggcctaagtgtgatttaactcttgaagtcacaccctccgaaagatgagtagaaaccagcaccagcacagcccagatcttctctttcctctccttttcctcatttattcctaaaggaatctgaccattttacgtctctacggcccaaaaaaagacaaaaataaaaattcctttttattcctgtcaactggatggaaacacaaatttcatggagctgtgtaccatcgaagaaacctggtgtctggcatgaaattactgtaaagaacttcctgtaaaacacgttctttaacaaactgaaatgaaaagcattggagcgtctgaatgaaagacgtgacctcctgctgggactctgatggtcttcagcattcaccttcgtgtgtcttcagtgtctcattgtcatccctgcttctgtttggtcttagagtgtttggatataactgaattgtagatggtaaaggaaatttgatgtgttttttgtttttaaataattaaaacgggtcaattttt

SEQ ID NO: 177658 - DNA, 1386 bp, Homo sapiens
  Payload ID: 14866
  Gene Symbol: RBM22
  Gene Name: RNA binding motif protein 22
  Uniprot ID: Q9NW64
  ENST ID: ENST00000447771
  CDS Start-End: 39-1154
caattcggaagctacagctacctccggacgctctcaagatggcgacctctctgggttccaacacctacaacaggcagaactgggaggatgcggacttccccattctgtgccagacatgtcttggagaaaacccatatatccgaatgaccaaagaaaagtatggcctgcccatccaggttcgtgacgcaggattgtcttttaaagatgacatgccaaagtcagatgtcaacaaagagtactatacacagaatatggagagagagatttctaactctgatggaacacggccagttggcatgctggggaaagccacatctaccagtgacatgctgctcaaactggcccggaccacaccctactacaaaaggaatcgaccccacatttgctccttctgggtgaaaggagagtgtaagagaggagaggaatgtccatacagacatgagaagcctacagatccagatgacccccttgctgatcagaatattaaagaccgttattacggaatcaatgatcctgtagctgacaagcttctaaagcgggcttcaacaatgcctcggctggacccaccagaggataaaactatcaccacactatatgttggtggtctaggtgataccattactgagacagatttaagaaatcatttctaccagttcggagagatccggacgatcactgttgtgcagagacagcagtgtgctttcatccagtttgccacacggcaggctgcagaagtggctgctgagaagtcctttaataagttgattgtaaatggccgcagactgaatgtgaaatggggaagatcccaggcagccagaggaaaagaaaaagagaaagatggaactacagactctgggatcaaactagaacctgttccaggattgccaggagctcttcctcctcctcctgcagcagaagaagaagcctctgccaactacttcaacttgcccccaagtggtcctccagctgtggtgaacattgctctgccaccgccccctggcattgctccacccccacccccaggttttgggccacacatgttccacccaatgggaccaccccctcctttcatgcgggctccaggaccaatccactatccttctcaggaccctcagaggatgggagctcatgctggaaaacacagcagcccctagcaccttgtcaccactctggggctctgtggaagaaagggcacttaaaactcccagtaaatcttggaataaatatatttttccttcccttgtagtttccatggtagctgaatgtgctcagatgtgagcagtcagagactgacagccatgctttcctatacttgttcaaaggatcgatggaccgtaaataagctgccattaacacatctggttactgctgtaacatgactaataa

SEQ ID NO: 177659 - DNA, 566 bp, Homo sapiens
  Payload ID: 14866
  Gene Symbol: RBM22
  Gene Name: RNA binding motif protein 22
  ENST ID: ENST00000518917
  CDS Start-End: 30-566
agctacagctacctccggacgctctcaagatggcgacctctctgggttccaacacctacaacaggcagaactgggaggatgcgacatgtcttggagaaaacccatatatccgaatgaccaaagaaaagtatgggaaggaatgcaaaatctgtgccaggccattcacagtgtttcgctggtgccctggagtccgcatgcgtttcaagaagactgaagtgtgccaaacctgcagtaaattgaagaatgtctgtcagacctgcctcttagacctagagtatggcctgcccatccaggttcgtgacgcaggattgtcttttaaagatgacatgccaaagtcagatgtcaacaaagagtactatacacagaatatggagagagagatttctaactctgatggaacacggccagttggcatgctggggaaagccacatctaccagtgacatgctgctcaaactggcccggaccacaccctactacaaaaggaatcgaccccacatttgctccttctgggtgaaaggagagtgtaagagaggagaggaatgtccatacagacatgagaagcct

SEQ ID NO: 177660 - DNA, 731 bp, Homo sapiens
  Payload ID: 14866
  Gene Symbol: RBM22
  Gene Name: RNA binding motif protein 22
  ENST ID: ENST00000521464
  CDS Start-End: 3-731
ggatggaaggaggaggcgaagccgcgcaccttgcaagctggcaggacagggcctgcggcgcggccgaaggaataccggggaggagccagcgcggcggcctagcttggccggagcaggagggcggagggcgatcctcctgcgggcttgaagggagggggcttagccagggtcccgggaccagcaccctttccatccctgccccctccagcctattagagctggttttcttttctcccgccgcctgccggaagtgcagacagcgccccctcccgcgatcgggtcgtgatggacttcgggttcctgccgtgcctagttccccaccctcgcttcccgccccctcgccaccccaagtgtcactgaggtgtcagggtcttcggagggtggtcctcaaccagatttcccattttcaccaggacttccccattctgtgccagacatgtcttggagaaaacccatatatccgaatgaccaaagaaaagtatgggaaggaatgcaaaatctgtgccaggccattcacagtgtttcgctggtgccctggagtccgcatgcgtttcaagaagactgaagtgtgccaaacctgcagtaaattgaagaatgtctgtcagacctgcctcttagacctagagtatggcctgcccatccaggttcgtgacgcaggattgtcttttaaagatgacatgccaaagtcagatgtcaacaaagagtactatacacagaatatggagagagag

SEQ ID NO: 177661 - DNA, 2361 bp, Homo sapiens
  Payload ID: 14867
  Gene Symbol: RBM23
  Gene Name: RNA binding motif protein 23
  Uniprot ID: Q86U06
  ENST ID: ENST00000346528
  CDS Start-End: 191-1408
gcagattggggaaggttctggaagacggcagagctgccgccattttgcgggaagaggaggctctgtacctgcagtgctgcttttcttgcctagactctaggaactatccgagctccactccccacaacatactcaaaggaacggagagaaccgggacccccctgcggggacccggaactgatctgacaggatggcatctgatgactttgacatagtgattgaggccatgctggaagctccctataaaaaagaagaggatgagcaacaaaggaaagaagttaaaaaggattatcctagcaataccaccagcagcaccagcaacagtggcaatgagaccagtggaagcagcaccatcggggagacaagcaatcgtagtcgagatcgggatcggtatagacggagaaatagtcggagccgaagtccaggtcggcagtgtcgtcaccgtagccgtagctgggatcgtcgacatggtagtgagtcgcgaagtcgggaccatcgtcgtgaggatcgtgtgcattacaggagtcctccacttgccactggggagccagttgataatctgagtcctgaggagcgtgatgcccgcacagttttctgtatgcagttagctgcccgaattcggcctcgagatctggaggactttttctctgctgtaggcaaggttcgcgatgtacgtatcatctcagatcggaactcacgtcgttctaagggcattgcctacgtggaattctgtgaaatccagtctgtgccactggccattgggctgactgggcagcggttgctgggagtgcctatcattgtacaggcttcacaggcagagaaaaaccgactggcagccatggccaacaacctgcaaaagggcaatggtggaccaatgcgcctctatgtgggttccctgcacttcaatatcactgaagacatgctccggggcatctttgagccctttggtaaaattgataatattgtcctgatgaaggactcagatacaggccgctctaaaggttatggtttcatcacgttctctgattctgagtgtgcccggcgggccctggaacagttgaatgggtttgagcttgctggtcgacctatgagggttggccatgtgactgagcgactggatggtggcacagacatcacttttcctgatggggaccaggagctggatctgggatcagcaggtggacgttttcagctcatggcaaaactggcagaaggcgctggaatccaactgccaagcactgctgctgctgctgctgccgccgccgcccaggctgctgccttgcaactgaatggagcagttcccttgggggccctgaatccagcagctctgactgctctgagtccagccctgaaccttgcctcccagtgtttccagctctccagcctctttaccccccagaccatgtaaatcagtggcacagtatactgcctccttgtgcctctggatcctgccacttcacatctactcttccatggccccatttctccattttgtggaccaagccatcctgagggcatggacattgtctctgaggaaattggggccacccttaagataccaagaaaagctcctgcccatggtcccactggaaatggactctgctgagcaaagccaccagttgaagagaacagaatccacacctgcattgaatacctgtttctccatgtgtatcgtctctgagattaccttcttgccctttccaacaccttagtgattcctcaatttctcccccattgggaaggccatagggcatactgaaggaactgacctctctccttttcctgtacctttaacctttagtctgtcaaggaaaacccttaggacctctgaatcaagaggactgagtttgtgggtgaaccttgaaggtgctctttctgctacaagggccctgggagatagcatggacgtgcattgagaagccagcctcagaccttagcttgaagcagcttgaggccagacctactgtagcctcagcatcttgctaggaggcatggaagtgatctatcctgccaggaggcctcagagtgatctgtcctgccaggaggtgtgagagtgatctgtcctgtgaggcatttaggggctttcaggaatttagtaaaaggtggagtatgcctttccagtatcttccatcttcctttgtatacttgtccttcctcccatttcctccctttggcccgaggtaggaggatggagggaggctgctactctaccacttcctgtgtgcctctactgtggcctcaaccctggcaattatagctactcccatcccttacctgggcatgtgtgagcccttctcactggattttatacccttgtgtctgtgtacataaatatatatacatatatatatacataaaaac

SEQ ID NO: 177662 - DNA, 10040 bp, Homo sapiens
  Payload ID: 14867
  Gene Symbol: RBM23
  Gene Name: RNA binding motif protein 23
  Uniprot ID: Q86U06
  ENST ID: ENST00000359890
  CDS Start-End: 197-1516
gcatgcgcagattggggaaggttctggaagacggcagagctgccgccattttgcgggaagaggaggctctgtacctgcagtgctgcttttcttgcctagactctaggaactatccgagctccactccccacaacatactcaaaggaacggagagaaccgggacccccctgcggggacccggaactgatctgacaggatggcatctgatgactttgacatagtgattgaggccatgctggaagctccctataaaaaagaagaggatgagcaacaaaggaaagaagttaaaaaggattatcctagcaataccaccagcagcaccagcaacagtggcaatgagaccagtggaagcagcaccatcggggagacaagcaagaagaagaggagtcggagccataataaaagcagggatagaaagcgcagtcgtagtcgagatcgggatcggtatagacggagaaatagtcggagccgaagtccaggtcggcagtgtcgtcaccgtagccgtagctgggatcgtcgacatggtagtgagtcgcgaagtcgggaccatcgtcgtgaggatcgtgtgcattacaggagtcctccacttgccactggttataggtatggacacagtaagagtcctcatttcagagagaagagcccagtcagggagccagttgataatctgagtcctgaggagcgtgatgcccgcacagttttctgtatgcagttagctgcccgaattcggcctcgagatctggaggactttttctctgctgtaggcaaggttcgcgatgtacgtatcatctcagatcggaactcacgtcgttctaagggcattgcctacgtggaattctgtgaaatccagtctgtgccactggccattgggctgactgggcagcggttgctgggagtgcctatcattgtacaggcttcacaggcagagaaaaaccgactggcagccatggccaacaacctgcaaaagggcaatggtggaccaatgcgcctctatgtgggttccctgcacttcaatatcactgaagacatgctccggggcatctttgagccctttggtaaaattgataatattgtcctgatgaaggactcagatacaggccgctctaaaggttatggtttcatcacgttctctgattctgagtgtgcccggcgggccctggaacagttgaatgggtttgagcttgctggtcgacctatgagggttggccatgtgactgagcgactggatggtggcacagacatcacttttcctgatggggaccaggagctggatctgggatcagcaggtggacgttttcagctcatggcaaaactggcagaaggcgctggaatccaactgccaagcactgctgctgctgctgctgccgccgccgcccaggctgctgccttgcaactgaatggagcagttcccttgggggccctgaatccagcagctctgactgctctgagtccagccctgaaccttgcctcccagtgtttccagctctccagcctctttaccccccagaccatgtaaatcagtggcacagtatactgcctccttgtgcctctggatcctgccacttcacatctactcttccatggccccatttctccattttgtggaccaagccatcctgagggcatggacattgtctctgaggaaattggggccacccttaagataccaagaaaagctcctgcccatggtcccactggaaatggactctgctgagcaaagccaccagttgaagagaacagaatccacacctgcattgaatacctgtttctccatgtgtatcgtctctgagattaccttcttgccctttccaacaccttagtgattcctcaatttctcccccattgggaaggccatagggcatactgaaggaactgacctctctccttttcctgtacctttaacctttagtctgtcaaggaaaacccttaggacctctgaatcaagaggactgagtttgtgggtgaaccttgaaggtgctctttctgctacaagggccctgggagatagcatggacgtgcattgagaagccagcctcagaccttagcttgaagcagcttgaggccagacctactgtagcctcagcatcttgctaggaggcatggaagtgatctatcctgccaggaggcctcagagtgatctgtcctgccaggaggtgtgagagtgatctgtcctgtgaggcatttaggggctttcaggaatttagtaaaaggtggagtatgcctttccagtatcttccatcttcctttgtatacttgtccttcctcccatttcctccctttggcccgaggtaggaggatggagggaggctgctactctaccacttcctgtgtgcctctactgtggcctcaaccctggcaattatagctactcccatcccttacctgggcatgtgtgagcccttctcactggattttatacccttgtgtctgtgtacataaatatatatacatatatatatacataaaaactttgtacaaaaggcaagcctcctccttgtggcagctgttgcccatttgtgtgtggtctttgttgtgtgtctgacaacttctcattagcccaacttatgatgtttctagggatataaaacattagtaacatcattgtgtttatttatttaaccacctttagaaagaaaaatgaaaactcacacctgggtggggttcccattctgtatctgcattacactgttgatctatggttgtcttctccatctatcttcatcctaactatctccatcccagctacccactggacagaattacccaaacagccaagttgcagcaccaggacagacttagacttaacaggctccttctctgtgcctaatgacagatctttccagcagatggcactatgacagtactgcattctacacttgtttttttctagtggggcggggcggggaggggggggggttgtgatcttgaagagttaagtaccagagctaagctgagctttcttaactctattggcctttgtacctgcctttgaccctctttgtagtagcgatcccaatccaatatccaaaggggtttgggtcttgtataacagcagggttctcctgacctgatgtctactgttgttcctctgtcagtcccctcaactcctgctttccatgtggctctgcctgggataacacaggcctgggaccagtgaattgtagggaactgagtattccagaaatacctctgtgaaagggaaggtgcacctaccactgccttaataataagggggtgggagagaggctgtctcacccagcttagggaccaaatgagaaggcctgaattcaggggcagggctctgtggggctccttttttgatctctatggcaacaaaatgctaagactttcttatgctaaaaatatggataattgctgttaggttttaatttgtcagctctcagacttctaagccagtgatgttagcctctggggttgcttttaacacaaaatcatttaaatacttgaagcctgcttgagtcataaaaggccagtgggactctagctcctaagtctgtttgctgcttctgtaacaatagcacagactaatttgtaaagaaaagaggtgtaggctgggtgcactggctcacgcctgtaatcccagcactttgggaggccgaggtgggtggatcacgaggtcagttcaagaccagcctggccaacatggtgaaactctgtctctactagaaatacaaaaagtagctgggcatggtggtgggtgcctgtaatcccagctactcaggaggctgagacaggagaatcgcttgagcctgggaggcggaggttgcagtgagccgaggatgcaccactgcactccagcctgggcaacagagcgagcctccatctcaaaaaaacagaaaagtgtatttctcacagttctggaggctgggaatttcaagagcatggtgcctgcatcaggtgggggtcatcccatgtcagaagggcacaaggtagaaatgagtacatgagacaaagggaccatgggccaaacttgctttataacagccctctctcatgataacctgctgtgtgatagtgacattaatccactcatgagggctctgtccttgtgactcagtcacctcgtattaagccccatcttcaacactgttgcattgggagtcaaatttccaatgtgaacttttgggggacacattcaaaccacagcatttctgattcttccaggcctagatctcacatgatgttgctgttctcctggttaccacccccatcccttcccccatcttatcctagtttgctttctggaccgggggaaaagggaaggaggatgcactatttttaggtagaagctgctggctatgacccagcacccctacagttattgatttggcttctaatgtatcttgagaagtgcagtgggtaccgtttttgttagtcatcctgaggccatgaactgggtcttctcatggctggcttggctccttcagactattataaatatccacaggccttgcctccctgccttcctctgcttggtttccttatgtttccatccctagctaccttggccttcctacactcggatccttccacctcagttctttcttgttcttagttcctcacatagcctcttgctgggagagagacaatgttggaagtaaggacgtatctaagacaatttccagtcttactccatataaggtgatggtatctagtgagtgacagttgctgtccgtgtgtgactcagtgccttcttgttactcatccctccatacgaggtggttagagtggagagaagcgggctgtgaacagactctgggcccagcttaaggtaaaagaaacttccctcaacatctacctgcacatggtggctggtggcgtaggggtgacattgtgatctagatcctttgccagcatagttagaatttccctaccagtcttcagttctagaaaagattctcacctgatttttgacttccagtctatgcttctgtattcactaaggtggcagcatttcctccctgttctttaaactgctgtgctcttgacacaggaattctgcctgcttcctcagactcccaacaacccccagataggagttaccagtagaagcagaggcttgacctgtgaacttttagtcctggagcatatcatgaagggaattgagtaaaaacctgaaggatggaattatatcacagtccctcttttccgtgtaatggaaaggctttagtgaaaatcaggcagcaacacttggacagtgaaaagagactctgaaaggtgaggtgacaggaggtggcataatggtcattgttaacatttatgcaaggttggttgtaggttaggtgttctaatcgtgtattaagtcacaaaatcctcacaacaatcctctcaagtagtttattatctttactttgtaaacaaggaaacatatccaaataagttaaataattttccccataagcacaaagttagcaagttagggattccaatccaagtactctcgcttcagatcccttgatcttaaccttacctgcctctcagcaccaccatggaagacaaggccttggagtcagtgaggaagtgtcacttttcctatccctgtacccatagctctccgtagactcagaatttttccactgccatgtctttgcttatcttgagtgacagtgtttgtgggtgaaccttgaaggtgctctttctgctacaagggccctgggagatagcatgggcatgtgcattgagaagccagcctcagaccttatcttgaagcagcttgaggccagacctactgtaggctcagcatcttgctaggaggcatgggagtgatctaacctgccagctatctctcttcctttcctccttctgctgatcaaagtcctgtcctttaagaccctgaagctttcctaggtggagttgatctctcttttcagtattctttgtcctcttgtgggtcatcttactctacttttatttagtaaataaaataattgcaataaaaattattttattgaaaactccattacttgatggttacagcctgatgaggccagacttggatgtctttctcatgattgctttgccttgcacatattaaatgtctgtagaattgaatgaatgctgttcattaaagtgttaaagtcagcaccaggctttccaaaggctgccccttctaggctgcttttcccagcagcctcatccattccttcctcactccaccaggagagaagatgcagctttactctttctgatgttaccatggtagcctgtgatactttctttctaaagtgctgcttgccatccaccagagactgatgtttccatggcaaccaggtgaaggcaatagtcacgagctggatgcaggaaaggaattccggtctgagaagctgcatatctgaatcttctagcttcagacatcctttcccctctctcataacttttgcgctttatatccaggactggtttgctctctggtgtgcccttggttgagagagctctgtgaaagtgaggtgaagcagaccaaccaacttagatcacgtgggaaggtgggtgcaaggaaagagctgagcaaagatcacttcaaaaagttggatgaagtctattagttgttcagatgatctgctctcaagagcccttaaggagttggctggagtttctggagagccattaagcagttatttttgagagcaatgggtagatggatgaggtgcctgaagactggaaagcagccagtcagtgccggattgtagaaaggagaaacaatgaccttggaaatcggagacccgtcaaacttgccaatgttccagaaaggatgggagtttcagtcagctttcaggcatcaggaagcctacttgcttagaattagtggtgctaagaattcgcctcctcaactcctgagcataagcaagctaggggacctccaccctgtagccgagtgtcacactctggaaccacacagcatggttcagatccctcttccctcacaaactagctgaataagcttgggtaggttacttcacttctctcacacttcatctgtaaaaaggaaatgataacacctatctcatagggatgttgtgagaattcattgagaaaggtttggaacttggctcattactgtcctcagtattttcactcctctggatgcctactcacttgattttctagctgacttcattctccccaactttagagctcaaggtttatggggaaaagcaagggcagtgcaatggtgaaaataaatcttcatttttaaataaataaattgttcctgcactgaagccccaagcttacaaggtcttgggtcacacacaacctgcctagttttcaggaaaacagatcccactagcccaatctctttatgcttgaggctctgtccacatagttagattttaaccagatggtttcgaaaaatcaaaatgagcccccctcacaggtaccttcaaggtacctaacaccattagctttgtctggcaggggaaaaataccagggcactcagttttgttttgttttgagacagggtctggctctgttgcccatgctggagtacagtggtgccatcacagctcactgcagtctcaacctcctgagctcaaatgatcctcttgattagctggaactacaggtatgtgccactatgcccagctaagttttgtattttttgtagagatggggtcttgctatgttgcccaggtggtcttgaactcctgggcttaagtgatcctccctccttagcctcccaaagtgctaggattataggtgtgagccaccacaactgcctgagagcaccctctgttaccaccctttccttagcgtctcagcctcccccaagcacctgtctttgttggtctccagagcctagccctacactggcattttcctttctgaataagtattttttttatttatttatttttattttttctttgagatggagtttcgcttttgttgcccaggctggagtgcaatggtgcgatctcggctcaccgcaacctctgcttcctgggttcaagtgattctcctgcctcagcctcctgagtagctgggattacaggcgtgcgccaccactcccagctaattttgtatttttagtggagacagggtttctccatgttggtcaggctggtctcgaactcctgacctcaggtgatccacccgccttggcctcccaaagtgctgggattacagtcctgagccactgcactgggccttatttatttatttttaattaattaattaattttttttgagatggagtcttgctttgtcgcccaggctggagtgcagtggcgcaatctcgggtcactgcaagctctgcctcccaggttcatgccattctcctgcctcagcctcccaagtagctgggactacaggcacctgccactatgcccggctaattttttgtattttttagtagagatggggtttcactgttttagccaggatggtttcgatctcctgacctagtgatccgctcgcctcggcctcccagagtgctgggattacaggcgtgagccactgcgcccggctgggccttatttatgtatttttctgagacagagtctcatgctatcacccaggctggagtgcagtggcatgatctctgctcactgcgatctctgctcacttcaacctctgcttcccgggttcaagtgattctcccacctcagcctcccgagtagctggaattacaggcacccaccaccatgcctggctaatttttgtaattttttttagtagaaatagggtttcaccatgttggccaggctggtctctctcttgacctcaagtgatccacccacctcggcctcccaaagtgctgggattacaggcgtgagccaattgcccgacctgagtaagtattttaaatcagcacaggtcctctgcttaaagtcaagttgtaatttgaacacaaaaatggaaaatcatgcagtaaaataccatcgtggagcttcaattgccaatctgtcccccaaccttccatcagatgacaaaacccaaaaaagtgttacccgtgagtcctatggaaggcacgttggactttgtagaccataacttaaatttttatctccaaatggtgctgtgctttgagagtttagcaagctgctttgatgcctaaataaagggccaggacataggttgcaaaaggcattactacttccaccgcttctctgtataatgcttgagaaattacaaagatctttgctcttttatttagtcctcatgacttcgctataaggtaggtattcttcattttagagttgggatagcatagctgagttcagcaaaccagacaggttaagagtgacttcatccacagacccccatccaggaaacatcctgagcactaattgaaaagcattcaagggcttactgaatttgcattcacatctggagttttcaaggccactaagctgtggaaacttgacatcaatattcaaatagatgaaaagggaccttaagcatatccatcagggagtcaccgagatgataaaggcctgagaagcagtatgctcttgtccggcatttgtgtcctttgacgactgcaccatccacccaaattttgctgccttctttataggaagggccttttcctcatgtggtgggctgcccactgtttcttctctgtgcatttgctcatgtagtttgaccacaaggaatgcttttccttctttctctcaactatctatagcctacatatcctttaaggcccagtttctaaaatatgtcttccaaatttactgtttcttccattcagaattcctggagcacatgaggtagcccccagttagatagaatgtggtattgtttgctgctattttgcctgttttgtgctgtatcacctcatccatctccccagcttaattgcaagctatttgacgggcagaaattgtgtcttatttgtatttgttttccccattgggcccggcacactgattggcatattgcagatgtttagtacttgagagaaacaaaatgtcttctagcatttgtggatgaaagattaaaatgtccaggaaaatttacttagattgatgtggattgaaactatattagattaataaaaagatgtgtgtgtgtg

SEQ ID NO: 177663 - DNA, 2430 bp, Homo sapiens
  Payload ID: 14867
  Gene Symbol: RBM23
  Gene Name: RNA binding motif protein 23
  Uniprot ID: Q86U06
  ENST ID: ENST00000399922
  CDS Start-End: 195-1466
atgcgcagattggggaaggttctggaagacggcagagctgccgccattttgcgggaagaggaggctctgtacctgcagtgctgcttttcttgcctagactctaggaactatccgagctccactccccacaacatactcaaaggaacggagagaaccgggacccccctgcggggacccggaactgatctgacaggatggcatctgatgactttgacatagtgattgaggccatgctggaagctccctataaaaaagaagaggatgagcaacaaaggaaagaagttaaaaaggattatcctagcaataccaccagcagcaccagcaacagtggcaatgagaccagtggaagcagcaccatcggggagacaagcaatcgtagtcgagatcgggatcggtatagacggagaaatagtcggagccgaagtccaggtcggcagtgtcgtcaccgtagccgtagctgggatcgtcgacatggtagtgagtcgcgaagtcgggaccatcgtcgtgaggatcgtgtgcattacaggagtcctccacttgccactggttataggtatggacacagtaagagtcctcatttcagagagaagagcccagtcagggagccagttgataatctgagtcctgaggagcgtgatgcccgcacagttttctgtatgcagttagctgcccgaattcggcctcgagatctggaggactttttctctgctgtaggcaaggttcgcgatgtacgtatcatctcagatcggaactcacgtcgttctaagggcattgcctacgtggaattctgtgaaatccagtctgtgccactggccattgggctgactgggcagcggttgctgggagtgcctatcattgtacaggcttcacaggcagagaaaaaccgactggcagccatggccaacaacctgcaaaagggcaatggtggaccaatgcgcctctatgtgggttccctgcacttcaatatcactgaagacatgctccggggcatctttgagccctttggtaaaattgataatattgtcctgatgaaggactcagatacaggccgctctaaaggttatggtttcatcacgttctctgattctgagtgtgcccggcgggccctggaacagttgaatgggtttgagcttgctggtcgacctatgagggttggccatgtgactgagcgactggatggtggcacagacatcacttttcctgatggggaccaggagctggatctgggatcagcaggtggacgttttcagctcatggcaaaactggcagaaggcgctggaatccaactgccaagcactgctgctgctgctgctgccgccgccgcccaggctgctgccttgcaactgaatggagcagttcccttgggggccctgaatccagcagctctgactgctctgagtccagccctgaaccttgcctcccagtgtttccagctctccagcctctttaccccccagaccatgtaaatcagtggcacagtatactgcctccttgtgcctctggatcctgccacttcacatctactcttccatggccccatttctccattttgtggaccaagccatcctgagggcatggacattgtctctgaggaaattggggccacccttaagataccaagaaaagctcctgcccatggtcccactggaaatggactctgctgagcaaagccaccagttgaagagaacagaatccacacctgcattgaatacctgtttctccatgtgtatcgtctctgagattaccttcttgccctttccaacaccttagtgattcctcaatttctcccccattgggaaggccatagggcatactgaaggaactgacctctctccttttcctgtacctttaacctttagtctgtcaaggaaaacccttaggacctctgaatcaagaggactgagtttgtgggtgaaccttgaaggtgctctttctgctacaagggccctgggagatagcatggacgtgcattgagaagccagcctcagaccttagcttgaagcagcttgaggccagacctactgtagcctcagcatcttgctaggaggcatggaagtgatctatcctgccaggaggcctcagagtgatctgtcctgccaggaggtgtgagagtgatctgtcctgtgaggcatttaggggctttcaggaatttagtaaaaggtggagtatgcctttccagtatcttccatcttcctttgtatacttgtccttcctcccatttcctccctttggcccgaggtaggaggatggagggaggctgctactctaccacttcctgtgtgcctctactgtggcctcaaccctggcaattatagctactcccatcccttacctgggcatgtgtgagcccttctcactggattttatacccttgtgtctgtgtacataaatatatatacatatatatatacataaaaactttgtacaaaa

SEQ ID NO: 177664 - DNA, 1743 bp, Homo sapiens
  Payload ID: 14867
  Gene Symbol: RBM23
  Gene Name: RNA binding motif protein 23
  ENST ID: ENST00000542016
  CDS Start-End: 540-1349
gcagattggggaaggttctggaagacggcagagctgccgccattttgcgggaagaggaggctctgtacctgcagtgctgcttttcttgcctagactctaggaactatccgagctccactccccacaacatactcaaaggaacggagagaaccgggacccccctgcggggacccggaactgatctgacaggatggcatctgatgactttgacatagtgattgaggccatgctggaagctccctataaaaaagaagagtcgtagtcgagatcgggatcggtatagacggagaaatagtcggagccgaagtccaggtcggcagtgtcgtcaccgtagccgtagctgggatcgtcgacatggtagtgagtcgcgaagtcgggaccatcgtcgtgaggatcgtgtgcattacaggagtcctccacttgccactggttataggtatggacacagtaagagtcctcatttcagagagaagagcccagtcagggagccagttgataatctgagtcctgaggagcgtgatgcccgcacagttttctgtatgcagttagctgcccgaattcggcctcgagatctggaggactttttctctgctgtaggcaaggttcgcgatgtacgtatcatctcagatcggaactcacgtcgttctaagggcattgcctacgtggaattctgtgaaatccagtctgtgccactggccattgggctgactgggcagcggttgctgggagtgcctatcattgtacaggcttcacaggcagagaaaaaccgactggcagccatggccaacaacctgcaaaagggcaatggtggaccaatgcgcctctatgtgggttccctgcacttcaatatcactgaagacatgctccggggcatctttgagccctttggtaaaattgataatattgtcctgatgaaggactcagatacaggccgctctaaaggttatggtttcatcacgttctctgattctgagtgtgcccggcgggccctggaacagttgaatgggtttgagcttgctggtcgacctatgagggttggccatgtgactgagcgactggatggtggcacagacatcacttttcctgatggggaccaggagctggatctgggatcagcaggtggacgttttcagctcatggcaaaactggcagaaggcgctggaatccaactgccaagcactgctgctgctgctgctgccgccgccgcccaggctgctgccttgcaactgaatggagcagttcccttgggggccctgaatccagcagctctgactgctctgagtccagccctgaaccttgcctcccagtgtttccagctctccagcctctttaccccccagaccatgtaaatcagtggcacagtatactgcctccttgtgcctctggatcctgccacttcacatctactcttccatggccccatttctccattttgtggaccaagccatcctgagggcatggacattgtctctgaggaaattggggccacccttaagataccaagaaaagctcctgcccatggtcccactggaaatggactctgctgagcaaagccaccagttgaagagaacagaatccacacctgcattgaatacctgtttctccatgtgtatcgtctctgagattaccttcttgccctttccaacaccttagtgattcctcaatttctcccccattgggaaggccatagggcatactgaaggaactgacctctctccttttcctgtacctttaacctttagt

SEQ ID NO: 177665 - DNA, 552 bp, Homo sapiens
  Payload ID: 14867
  Gene Symbol: RBM23
  Gene Name: RNA binding motif protein 23
  ENST ID: ENST00000557227
  CDS Start-End: 490-552
atgcgcagattggggaaggttctggaagacggcagagctgccgccattttgcgggaagaggaggctctgtacctgcagtgctgcttttcttgcctagactctaggaactatccgagctccactccccacaacatactcaaaggaacggagagaaccgggacccccctgcggggacccggaactgatctgacaggatggcatctgatgactttgacatagtgattgaggccatgctggaagctccctataaaaaagaagagtcgtagtcgagatcgggatcggtatagacggagaaatagtcggagccgaagtccaggtcggcagtgtcgtcaccgtagccgtagctgggatcgtcgacatggtagtgagtcgcgaagtcgggaccatcgtcgtgaggatcgtgtgcattacaggagtcctccacttgccactggggagccagttgataatctgagtcctgaggagcgtgatgcccgcacagttttctgtatgcagttagctgcccgaattcggcctcgagatctggaggactttttctctgctgtaggcaag

SEQ ID NO: 177666 - DNA, 602 bp, Homo sapiens
  Payload ID: 14867
  Gene Symbol: RBM23
  Gene Name: RNA binding motif protein 23
  ENST ID: ENST00000555722
  CDS Start-End: 451-602
ggttctggaagacggcagagctgccgccattttgcgggaagaggaggctctgtacctgcagtgctgcttttcttgcctagactctaggaactatccgagctccactccccacaacatactcaaaggaacggagagaaccgggacccccctgcggggacccggaactgtcgtagtcgagatcgggatcggtatagacggagaaatagtcggagccgaagtccaggtcggcagtgtcgtcaccgtagccgtagctgggatcgtcgacatggtagtgagtcgcgaagtcgggaccatcgtcgtgaggatcgtgtgcattacaggagtcctccacttgccactggttataggtatggacacagtaagagtcctcatttcagagagaagagcccagtcagggagccagttgataatctgagtcctgaggagcgtgatgcccgcacagttttctgtatgcagttagctgcccgaattcggcctcgagatctggaggactttttctctgctgtaggcaaggttcgcgatgtacgtatcatctcagatcggaactcacgtcgttctaagggcattgcctacgtggaattctgtgaaatccagtctgtgcc

SEQ ID NO: 177667 - DNA, 582 bp, Homo sapiens
  Payload ID: 14867
  Gene Symbol: RBM23
  Gene Name: RNA binding motif protein 23
  ENST ID: ENST00000557549
  CDS Start-End: 280-582
agagctgccgccattttgcgggaagaggaggctctgtacctgcagtgctgcttttcttgcctagactctaggaactatccgagctccactccccacaacatactcaaaggaacggagagaaccgggacccccctgcggggacccggaactgggtcacacattgctgcccaggctggagtacagtggcgtgatcttggctcactgcaacctccaccttttgggttcaagtgattctcctgcctcagcctcctgagtagctgggattacagatctgacaggatggcatctgatgactttgacatagtgattgaggccatgctggaagctccctataaaaaagaagaggatgagcaacaaaggaaagaagttaaaaaggattatcctagcaataccaccagcagcaccagcaacagtggcaatgagaccagtggaagcagcaccatcggggagacaagcaatcgtagtcgagatcgggatcggtatagacggagaaatagtcggagccgaagtccaggtcggcagtgtcgtcaccgtagccgtagctgggatcgtcgacatggtagtgagtcgcgaagtcgggac

SEQ ID NO: 177668 - DNA, 267 bp, Homo sapiens
  Payload ID: 14867
  Gene Symbol: RBM23
  Gene Name: RNA binding motif protein 23
  ENST ID: ENST00000553876
  CDS Start-End: 89-267
gaaaaaactaccagcctgaaaatgcatagtgtttgctaccttattgcttttagcacatctagaaagacactaaacccaatctgacaggatggcatctgatgactttgacatagtgattgaggccatgctggaagctccctataaaaaagaagaggatgagcaacaaaggaaagaagttaaaaaggattatcctagcaataccaccagcagcaccagcaacagtggcaatgagaccagtggaagcagcaccatcggggagacaagcaa

SEQ ID NO: 177669 - DNA, 583 bp, Homo sapiens
  Payload ID: 14867
  Gene Symbol: RBM23
  Gene Name: RNA binding motif protein 23
  ENST ID: ENST00000555676
  CDS Start-End: 284-583
agagctgccgccattttgcgggaagaggaggctctgtacctgcagtgctgcttttcttgcctagactctaggaactatccgagctccactccccacaacatactcaaaggaacggagagaaccgggacccccctgcggggacccggaactgatggaatcttgctctgtcacccaggctggagcacagtggcgcgttctcggctcattgcaacctccacctcctgggttcaagcagttcttatgccacagccttccaagcagctgggactacagatctgacaggatggcatctgatgactttgacatagtgattgaggccatgctggaagctccctataaaaaagaagaggatgagcaacaaaggaaagaagttaaaaaggattatcctagcaataccaccagcagcaccagcaacagtggcaatgagaccagtggaagcagcaccatcggggagacaagcaatcgtagtcgagatcgggatcggtatagacggagaaatagtcggagccgaagtccaggtcggcagtgtcgtcaccgtagccgtagctgggatcgtcgacatggtagtgagtcgcgaagtcgg

SEQ ID NO: 177670 - DNA, 457 bp, Homo sapiens
  Payload ID: 14867
  Gene Symbol: RBM23
  Gene Name: RNA binding motif protein 23
  ENST ID: ENST00000557464
  CDS Start-End: 260-457
agagctgccgccattttgcgggaagaggaggctctgtacctgcagtgctgcttttcttgcctagactctaggaactatccgagctccactccccacaacatactcaaaggaacggagagaaccgggacccccctgcggggacccggaactggctggagcacagtggcgcgttctcggctcattgcaacctccacctcctgggttcaagcagttcttatgccacagccttccaagcagctgggactacagatctgacaggatggcatctgatgactttgacatagtgattgaggccatgctggaagctccctataaaaaagaagaggatgagcaacaaaggaaagaagttaaaaaggattatcctagcaataccaccagcagcaccagcaacagtggcaatgagaccagtggaagcagcaccatcggggagacaagcaatcgtagtcgagatcgggat

SEQ ID NO: 177671 - DNA, 588 bp, Homo sapiens
  Payload ID: 14867
  Gene Symbol: RBM23
  Gene Name: RNA binding motif protein 23
  ENST ID: ENST00000554618
  CDS Start-End: 362-588
agagctgccgccattttgcgggaagaggaggctctgtacctgcagtgctgcttttcttgcctagactctaggaactatccgagctccactccccacaacatactcaaaggaacggagagaaccgggacccccctgcggggacccggaactgagtcttggtctgtcacccaacctggagtgcaatggtgccatctcggctggctgcaacttccgcctcccgggttcaagcaattctcctgtctcagcctcccaggctggagcacagtggcgcgttctcggctcattgcaacctccacctcctgggttcaagcagttcttatgccacagccttccaagcagctgggactacagatctgacaggatggcatctgatgactttgacatagtgattgaggccatgctggaagctccctataaaaaagaagaggatgagcaacaaaggaaagaagttaaaaaggattatcctagcaataccaccagcagcaccagcaacagtggcaatgagaccagtggaagcagcaccatcggggagacaagcaagaagaagaggagtcggagccataataaaagcagggatagaaagcgcag

SEQ ID NO: 177672 - DNA, 808 bp, Homo sapiens
  Payload ID: 14867
  Gene Symbol: RBM23
  Gene Name: RNA binding motif protein 23
  ENST ID: ENST00000553884
  CDS Start-End: 1-643
ggctgactgggcagcggttgctgggagtgcctatcattgtacaggcttcacagagaaaaaccgactggcagccatggccaacaacctgcaaaagggcaatggtggaccaatgcgcctctatgtgggttccctgcacttcaatatcactgaagacatgctccggggcatctttgagccctttggtaaaattgataatattgtcctgatgaaggactcagatacaggccgctctaaaggttatggtttcatcacgttctctgattctgagtgtgcccggcgggccctggaacagttgaatgggtttgagcttgctggtcgacctatgagggttggccatgtgactgagcgactggatggtggcacagacatcacttttcctgatggggaccaggagctggatctgggatcagcaggtggacgttttcagctcatggcaaaactggcagaaggcgctggaatccaactgccaagcactgctgctgctgctgctgccgccgccgcccaggctgctgccttgcaactgaatggagcagttcccttgggggccctgaatccagcagctctgactgctctgagtccagccctgaaccttgcctcccagtgtttccagctctccagcctctttaccccccagaccatgtaaatcagtggcacagtatactgcctccttgtgcctctggatcctgccacttcacatctactcttccatggccccatttctccattttgtggaccaagccatcctgagggcatggacattgtctctgaggaaattggggccacccttaagataccaagaaaagctcct

SEQ ID NO: 177673 - DNA, 387 bp, Homo sapiens
  Payload ID: 14867
  Gene Symbol: RBM23
  Gene Name: RNA binding motif protein 23
  ENST ID: ENST00000557245
  CDS Start-End: 1-249
ctggatctgggatcagcaggtggacgttttcagctcatggcaaaactggcagaaggcgctggaatccaactgccaagcactgctgctgctgctgctgccgccgccgcccaggctgctgccttgcaactgaatggagcagttcccttgggggccctgaatccagcagctctgactgctctgagtccagccctgaaccttgcctcccagtgtttccagctctccagcctctttaccccccagaccatgtgagtctcagggtctagctcattctagcctttgattattctctttcctttggcttcccatttacctcttctttccacaggtaaatcagtggcacagtatactgcctccttgtgcctctggatcctgccacttcacatctac

SEQ ID NO: 177674 - DNA, 826 bp, Homo sapiens
  Payload ID: 14867
  Gene Symbol: RBM23
  Gene Name: RNA binding motif protein 23
  ENST ID: ENST00000557403
  CDS Start-End: 483-826
cattttgcgggaagaggaggctctgtacctgcagtgctgcttttcttgcctagactctaggaactatccgagctccactccccacaacatactcaaaggaacggagagaaccgggacccccctgcggggacccggaactggatgagcaacaaaggaaagaagttaaaaaggattatcctagcaataccaccagcagcaccagcaacagtggcaatgagaccagtggaagcagcaccatcggggagacaagcaatcgtagtcgagatcgggatcggtatagacggagaaatagtcggagccgaagtccaggtcggcagtgtcgtcaccgtagccgtagctgggatcgtcgacatggtagtgagtcgcgaagtcgggaccatcgtcgtgaggatcgtgtgcattacaggagtcctccacttgccactggggagccagttgataatctgagtcctgaggagcgtgatgcccgcacagttttctgtatgcagttagctgcccgaattcggcctcgagatctggaggactttttctctgctgtaggcaaggttcgcgatgtacgtatcatctcagatcggaactcacgtcgttctaagggcattgcctacgtggaattctgtgaaatccagtctgtgccactggccattgggctgactgggcagcggttgctgggagtgcctatcattgtacaggcttcacaggcagagaaaaaccgactggcagccatggccaacaacctgcaaaagggcaatggtggaccaatgcgcctctatgtgggttccctgcacttcaatatcactgaagacatgctccggggcatctttgagcc

SEQ ID NO: 177675 - DNA, 573 bp, Homo sapiens
  Payload ID: 14867
  Gene Symbol: RBM23
  Gene Name: RNA binding motif protein 23
  ENST ID: ENST00000557571
  CDS Start-End: 301-573
agagctgccgccattttgcgggaagaggaggctctgtacctgcagtgctgcttttcttgcctagactctaggaactatccgagctccactccccacaacatactcaaaggaacggagagaaccgggacccccctgcggggacccggaactggccgggctcggtggctcatgtctgtaatcccagccctttgggaggaccaggcaggcggatcacctgaggtcaggagttcgagaccagcctgaccaatgtggagaaaccccgtctctgctaaaaatacaacattagccagatctgacaggatggcatctgatgactttgacatagtgattgaggccatgctggaagctccctataaaaaagaagaggatgagcaacaaaggaaagaagttaaaaaggattatcctagcaataccaccagcagcaccagcaacagtggcaatgagaccagtggaagcagcaccatcggggagacaagcaatcgtagtcgagatcgggatcggtatagacggagaaatagtcggagccgaagtccaggtcggcagtgtcgtcaccgtagccgtagctgggatcgt

SEQ ID NO: 177676 - DNA, 571 bp, Homo sapiens
  Payload ID: 14867
  Gene Symbol: RBM23
  Gene Name: RNA binding motif protein 23
  ENST ID: ENST00000555691
  CDS Start-End: 400-571
attacaggtgtgtgccaccacacccagctaatttttatatttttggtagagggggtttcgccatgttggccaggctggtctcaaactcctgacctcaggtgatctgcctgccttgccctcccagagtgctaggattacaggtgtgagccactgcgcccggactatccttgactgttccaagccacaaagtcgaactagttcagatctatagggtgtaaaaataaacctagagtaagtgacagctggtaaggtttctttgcagttcaagaaacagaactgaaatctgtatatcctgaagtctctttcttggagtgggaaagaaatgtgtggtgctggaaagggaggaaaaatataaaacagattcttacatattaatatcctctccccagatctgacaggatggcatctgatgactttgacatagtgattgaggccatgctggaagctccctataaaaaagaagaggatgagcaacaaaggaaagaagttaaaaaggattatcctagcaataccaccagcagcaccagcaacagtggcaatgagaccagtggaagcagcaccatcggggaga

SEQ ID NO: 177677 - DNA, 569 bp, Homo sapiens
  Payload ID: 14867
  Gene Symbol: RBM23
  Gene Name: RNA binding motif protein 23
  ENST ID: ENST00000556862
  CDS Start-End: 292-569
aagacggcagagctgccgccattttgcgggaagaggaggctctgtacctgcagtgctgcttttcttgcctagactctaggaactatccgagctccactccccacaacatactcaaaggaacggagagaaccgggacccccctgcggggacccggaactgatggaatcttgctctgtcacccaggctggagcacagtggcgcgttctcggctcattgcaacctccacctcctgggttcaagcagttcttatgccacagccttccaagcagctgggactacagatctgacaggatggcatctgatgactttgacatagtgattgaggccatgctggaagctccctataaaaaagaagaggatgagcaacaaaggaaagaagttaaaaaggattatcctagcaataccaccagcagcaccagcaacagtggcaatgagaccagtggaagcagcaccatcggggagacaagcaagaagaagaggagtcggagccataataaaagcagggatagaaagcgcagtcgtagtcgagatcgggatcggtatagacggagaaatagtcggagccgaag

SEQ ID NO: 177678 - DNA, 581 bp, Homo sapiens
  Payload ID: 14867
  Gene Symbol: RBM23
  Gene Name: RNA binding motif protein 23
  ENST ID: ENST00000554256
  CDS Start-End: 150-581
attttgcgggaagaggaggctctgtacctgcagtgctgcttttcttgcctagactctaggaactatccgagctccactccccacaacatactcaaaggaacggagagaaccgggacccccctgcggggacccggaactgatctgacaggatggcatctgatgactttgacatagtgattgaggccatgctggaagctccctataaaaaagaagaggatgagcaacaaaggaaagaagttaaaaaggattatcctagcaataccaccagcagcaccagcaacagtggcaatgagaccagtggaagcagcaccatcggggagacaagcaagaagaagaggagtcggagccataataaaagcagggatagaaagcgcagtcgtagtcgagatcgggatcggtatagacggagaaatagtcggagccgaagtccaggtcggcagtgtcgtcaccgtagccgtagctgggatcgtcgacatggtagtgagtcgcgaagtcgggaccatcgtcgtgaggatcgtgtgcattacaggagtcctccacttgccactggggagccagttgataatctgagtcctgaggag

SEQ ID NO: 177679 - DNA, 2278 bp, Homo sapiens
  Payload ID: 14867
  Gene Symbol: RBM23
  Gene Name: RNA binding motif protein 23
  ENST ID: ENST00000555209
  CDS Start-End: 624-1193
ggaagaggaggctctgtacctgcagtgctgcttttcttgcctagactctaggaactatccgagctccactccccacaacatactcaaaggaacggagagaaccgggacccccctgcggggacccggaactggaagaagaggagtcggagccataataaaagcagggatagaaagcgcagtcgtagtcgagatcgggatcggtatagacggagaaatagtcggagccgaagtccaggtcggcagtgtcgtcaccgtagccgtagctgggatcgtcgacatggtagtgagtcgcgaagtcgggaccatcgtcgtgaggatcgtgtgcattacaggagtcctccacttgccactggggagccagttgataatctgagtcctgaggagcgtgatgcccgcacagttttctgtatgcagttagctgcccgaattcggcctcgagatctggaggactttttctctgctgtaggcaagatcggaactcacgtcgttctaagggcattgcctacgtggaattctgtgaaatccagtctgtgccactggccattgggctgactgggcagcggttgctgggagtgcctatcattgtacaggcttcacaggcagagaaaaaccgactggcagccatggccaacaacctgcaaaagggcaatggtggaccaatgcgcctctatgtgggttccctgcacttcaatatcactgaagacatgctccggggcatctttgagccctttggtaaaattgataatattgtcctgatgaaggactcagatacaggccgctctaaaggttatggtttcatcacgttctctgattctgagtgtgcccggcgggccctggaacagttgaatgggtttgagcttgctggtcgacctatgagggttggccatgtgactgagcgactggatggtggcacagacatcacttttcctgatggggaccaggagctggatctgggatcagcaggtggacgttttcagctcatggcaaaactggcagaaggcgctggaatccaactgccaagcactgctgctgctgctgctgccgccgccgcccaggctgctgccttgcaactgaatggagcagttcccttgggggccctgaatccagcagctctgactgctctgagtccagccctgaaccttgcctcccagtgtttccagctctccagcctctttaccccccagaccatgtaaatcagtggcacagtatactgcctccttgtgcctctggatcctgccacttcacatctactcttccatggccccatttctccattttgtggaccaagccatcctgagggcatggacattgtctctgaggaaattggggccacccttaagataccaagaaaagctcctgcccatggtcccactggaaatggactctgctgagcaaagccaccagttgaagagaacagaatccacacctgcattgaatacctgtttctccatgtgtatcgtctctgagattaccttcttgccctttccaacaccttagtgattcctcaatttctcccccattgggaaggccatagggcatactgaaggaactgacctctctccttttcctgtacctttaacctttagtctgtcaaggaaaacccttaggacctctgaatcaagaggactgagtttgtgggtgaaccttgaaggtgctctttctgctacaagggccctgggagatagcatggacgtgcattgagaagccagcctcagaccttagcttgaagcagcttgaggccagacctactgtagcctcagcatcttgctaggaggcatggaagtgatctatcctgccaggaggcctcagagtgatctgtcctgccaggaggtgtgagagtgatctgtcctgtgaggcatttaggggctttcaggaatttagtaaaaggtggagtatgcctttccagtatcttccatcttcctttgtatacttgtccttcctcccatttcctccctttggcccgaggtaggaggatggagggaggctgctactctaccacttcctgtgtgcctctactgtggcctcaaccctggcaattatagctactcccatcccttacctgggcatgtgtgagcccttctcactggattttatacccttgtgtctgtgtacataaatatatatacatatatatatacataaaaactttgtacaaaaggcaagcctcctccttgtggcagctgttgcccatttgtgtgtggtctttgttgtgtgtctgacaacttctcattagcccaacttatgatgtttctagggatataaaacattagtaacatca

SEQ ID NO: 177680 - DNA, 2394 bp, Homo sapiens
  Payload ID: 14868
  Gene Symbol: RBM24
  Gene Name: RNA binding motif protein 24
  Uniprot ID: Q9BX46
  ENST ID: ENST00000318204
  CDS Start-End: 72-647
gatctcagttttatcatgaatgacttctccattgtgattcttgatttccttcatgggttaatttagaggttatgtatgtatgtctgtgtgtgtctgttgctaaggtcaccatggctgaccgggctgctgccgaaagggcctgcaaggatcccaatcccatcattgatggcagaaaggccaacgtgaacctggcatacttaggagcaaaaccaaggatcatgcaaccaggttttgcctttggtgttcaacaacttcatccagcccttatacaaagacctttcgggatacctgcccactatgtctatccgcaggcttttgtgcagccgggagtggtcattccacacgtccagccgacagcagctgccgcctccaccaccccttacattgattacactggagctgcatacgcacaatactcagcagctgctgctgctgccgccgccgctgctgcctatgaccagtacccctatgcagcctctccagctgctgcaggatatgttactgctgggggctatggctacgcagtccagcagccaatcaccgcagcggcacctgggacagctgccgccgccgctgcagcagctgctgccgctgcagcatttggccagtaccagcctcagcagctgcagacagaccgaatgcaatagaccagccatctgatcaaagttgaattgttttctctttccctcccaattttccaatttttagtagctaataagagagttaacattgacttaacagctttaaaaaaaaaaacagccatgctattgtgaagcagagttattattttttttatactccaggtagtgttctagatgagaaagaggtaagaatgaggggaatgggcacaattttggaaatcaatcccaaagagcctgagtaaatgaaaggccactacgaaatgacgccaggagtaacaacggaacttcacttttgtaacgggatttttatttttgctctttttatagtatcagggaagcaaactgccttttacaagttagaaaatgctgtttgaatctagttgaaccagggaatacagagcgagcaatatgtagcttgaattacatttaaaagcagattttttacaaacaaaatggcgaaagcactgattgtcatttttagcagtcacttaaggcctatagaacttttttcaagtcggaaggtcctgttcttactatctcaaaaatgggcatcgaacaatcaatctaggagcgtggcagtgggtaaaatggtggacaggcaccaaagctattttctcatctgtcctgtggatgagtggaactgtggaacaagtgatgtggaattaatgggtgcaacagctgtacagacaatcaataacacacacagttctggaaagaacacatcacttgtgcttgtttgatgagcttgtcacattctaatccctctccccatcctgtttcaattttgggaaacttgtatctgctggtgtcagcaattctgattctgaaataggatcaggcttttactacaacagccttctctttctatttattgtgtcgactcgtggcttatgaataaaggcaggcaaagtttgcagaactgtcttaaggacatttattttttttccctttttaagtaattttacactttagtatctatttcagagtcatatttaaaactatttattagtgactacagtacatgagacaacaaggttactgagattacaattcttcaaaggttaatgataatgtggtttatactgtgccttaatagtaatgctatttaagatatttatttttaagttttactatgctgcactctaaagaaaggaactttagatgtgacactgtaaaattatgtattcatctcatggcataaattatttagtaagtctagatgtagcgtattaaatattaacctattcaactaaagatgttgacttggatttatttaaattcatatgtgcactgtataagagagtactcttacattaacacattttagtttagtttttagatttttttttaaacgatatattgctagtttcatgcttcctcctctgattttgcctgtgtagatttcatttattggtaattcattagtttaacactattatgtagtttttaaatgctgctttacatttttcttctgaaactgcaatacttgcaatttttattcttaaactaaattgaatactattttacactgtattggatttttatacttgaacaatttcatacaagggaagacaggttagcatttttatggactttctccattatcactggatttactttaagtattcccatactagacagtgttatgtaatgtagacatgactctcctgtgcaaattatttattcgttgtgtatattgctttataacatttcagatcttctaatctattcacttgtattaaatataattttt

SEQ ID NO: 177681 - DNA, 2703 bp, Homo sapiens
  Payload ID: 14868
  Gene Symbol: RBM24
  Gene Name: RNA binding motif protein 24
  Uniprot ID: Q9BX46
  ENST ID: ENST00000379052
  CDS Start-End: 237-947
ggagagagcgaagtcaagtctccagggccgctggcgacttcggaagccgcgcgcccggcgctctcggccgcccccggccgctcgcccccgccgcgccgccgccctcgcccccgggctcgcccttggcccccggcggccgcgaaagggtgcgggagacgcggagccggaggaggaggcgcagccgctgcccgagccgcagccgcagccggagcccgagccgcggggcgggtgcgaagatgcacacgacccagaaggacacgacgtacaccaagatcttcgtcggggggctgccctaccacaccaccgacgccagcctgcgcaagtacttcgaggtcttcggcgagatcgaggaggcggtggtcatcaccgaccggcagacgggcaagtcccggggctatggatttgtcaccatggctgaccgggctgctgccgaaagggcctgcaaggatcccaatcccatcattgatggcagaaaggccaacgtgaacctggcatacttaggagcaaaaccaaggatcatgcaaccaggttttgcctttggtgttcaacaacttcatccagcccttatacaaagacctttcgggatacctgcccactatgtctatccgcaggcttttgtgcagccgggagtggtcattccacacgtccagccgacagcagctgccgcctccaccaccccttacattgattacactggagctgcatacgcacaatactcagcagctgctgctgctgccgccgccgctgctgcctatgaccagtacccctatgcagcctctccagctgctgcaggatatgttactgctgggggctatggctacgcagtccagcagccaatcaccgcagcggcacctgggacagctgccgccgccgctgcagcagctgctgccgctgcagcatttggccagtaccagcctcagcagctgcagacagaccgaatgcaatagaccagccatctgatcaaagttgaattgttttctctttccctcccaattttccaatttttagtagctaataagagagttaacattgacttaacagctttaaaaaaaaaaacagccatgctattgtgaagcagagttattattttttttatactccaggtagtgttctagatgagaaagaggtaagaatgaggggaatgggcacaattttggaaatcaatcccaaagagcctgagtaaatgaaaggccactacgaaatgacgccaggagtaacaacggaacttcacttttgtaacgggatttttatttttgctctttttatagtatcagggaagcaaactgccttttacaagttagaaaatgctgtttgaatctagttgaaccagggaatacagagcgagcaatatgtagcttgaattacatttaaaagcagattttttacaaacaaaatggcgaaagcactgattgtcatttttagcagtcacttaaggcctatagaacttttttcaagtcggaaggtcctgttcttactatctcaaaaatgggcatcgaacaatcaatctaggagcgtggcagtgggtaaaatggtggacaggcaccaaagctattttctcatctgtcctgtggatgagtggaactgtggaacaagtgatgtggaattaatgggtgcaacagctgtacagacaatcaataacacacacagttctggaaagaacacatcacttgtgcttgtttgatgagcttgtcacattctaatccctctccccatcctgtttcaattttgggaaacttgtatctgctggtgtcagcaattctgattctgaaataggatcaggcttttactacaacagccttctctttctatttattgtgtcgactcgtggcttatgaataaaggcaggcaaagtttgcagaactgtcttaaggacatttattttttttccctttttaagtaattttacactttagtatctatttcagagtcatatttaaaactatttattagtgactacagtacatgagacaacaaggttactgagattacaattcttcaaaggttaatgataatgtggtttatactgtgccttaatagtaatgctatttaagatatttatttttaagttttactatgctgcactctaaagaaaggaactttagatgtgacactgtaaaattatgtattcatctcatggcataaattatttagtaagtctagatgtagcgtattaaatattaacctattcaactaaagatgttgacttggatttatttaaattcatatgtgcactgtataagagagtactcttacattaacacattttagtttagtttttagatttttttttaaacgatatattgctagtttcatgcttcctcctctgattttgcctgtgtagatttcatttattggtaattcattagtttaacactattatgtagtttttaaatgctgctttacatttttcttctgaaactgcaatacttgcaatttttattcttaaactaaattgaatactattttacactgtattggatttttatacttgaacaatttcatacaagggaagacaggttagcatttttatggactttctccattatcactggatttactttaagtattcccatactagacagtgttatgtaatgtagacatgactctcctgtgcaaattatttattcgttgtgtatattgctttataacatttcagatcttctaatctattcacttgtattaaatataatttttaaaaacttc

SEQ ID NO: 177682 - DNA, 1034 bp, Homo sapiens
  Payload ID: 14868
  Gene Symbol: RBM24
  Gene Name: RNA binding motif protein 24
  Uniprot ID: Q9BX46
  ENST ID: ENST00000425446
  CDS Start-End: 163-699
acaattgcattcccgggctggatgccggttgttaagcgcgctgttgctttgtaaaaatgcgtgtgttctggtgttttggctggggcagggaggggacaccccacgaggtctggggctgttgcccttgtgtcatccccccgccttttaactgcaaaggtcaccatggctgaccgggctgctgccgaaagggcctgcaaggatcccaatcccatcattgatggcagaaaggccaacgtgaacctggcatacttaggagcaaaaccaaggatcatgcaaccaggttttgcctttggtgttcaacaacttcatccagcccttatacaaagacctttcgggatacctgcccactatgtctatccgcaggcttttgtgcagccgggagtggtcattccacacgtccagccgacagcagctgccgcctccaccaccccttacattgattacactggagctgcatacgcacaatactcagcagctgctgctgctgccgccgccgctgctgcctatgaccagtacccctatgcagcctctccagctgctgcaggatatgttactgctgggggctatggctacgcagtccagcagccaatcaccgcagcggcacctgggacagctgccgccgccgctgcagcagctgctgccgctgcagcatttggccagtaccagcctcagcagctgcagacagaccgaatgcaatagaccagccatctgatcaaagttgaattgttttctctttccctcccaattttccaatttttagtagctaataagagagttaacattgacttaacagctttaaaaaaaaaaacagccatgctattgtgaagcagagttattattttttttatactccaggtagtgttctagatgagaaagaggtaagaatgaggggaatgggcacaattttggaaatcaatcccaaagagcctgagtaaatgaaaggccactacgaaatgacgccaggagtaacaacggaacttcacttttgtaacgggatttttatttttgctctttttatagtatcagggaagcaa

SEQ ID NO: 177683 - DNA, 622 bp, Homo sapiens
  Payload ID: 14868
  Gene Symbol: RBM24
  Gene Name: RNA binding motif protein 24
  ENST ID: ENST00000503965
  CDS Start-End: 1-605
agagtaggacaatagctattgtcgttggggagtgttttcgaggttgggagcgttgggcggatgtcaccatggctgaccgggctgctgccgaaagggcctgcaaggatcccaatcccatcattgatggcagaaaggccaacgtgaacctggcatacttaggagcaaaaccaaggatcatgcaaccaggttttgcctttggtgttcaacaacttcatccagcccttatacaaagacctttcgggatacctgcccactatgtctatccgcaggcttttgtgcagccgggagtggtcattccacacgtccagccgacagcagctgccgcctccaccaccccttacattgattacactggagctgcatacgcacaatactcagcagctgctgctgctgccgccgccgctgctgcctatgaccagtacccctatgcagcctctccagctgctgcaggatatgttactgctgggggctatggctacgcagtccagcagccaatcaccgcagcggcacctgggacagctgccgccgccgctgcagcagctgctgccgctgcagcatttggccagtaccagcctcagcagctgcagacagaccgaatgcaatagaccagccatctgatcaa

SEQ ID NO: 177684 - DNA, 1544 bp, Homo sapiens
  Payload ID: 14868
  Gene Symbol: RBM24
  Gene Name: RNA binding motif protein 24
  ENST ID: ENST00000509686
  CDS Start-End: 1-243
gtcatcaccgaccggcagacgggcaagtcccggggctatggatttgtcaccatggctgaccgggctgctgccgaaagggcctgcaaggatcccaatcccatcattgatggcagaaaggccaacgtgaacctggcatacttaggagcaaaaccaaggatcatgcaaccaggttttgcctttggtgttcaacaacttcatccagcccttatacaaagacctttcggagataaacaagctggctgaccctcaggtgcctgatagtcaaacaggatacctgcccactatgtctatccgcaggcttttgtgcagccgggagtggtcattccacacgtccagccgacagcagctgccgcctccaccaccccttacattgattacactggagctgcatacgcacaatactcagcagctgctgctgctgccgccgccgctgctgcctatgaccagtacccctatgcagcctctccagctgctgcaggatatgttactgctgggggctatggctacgcagtccagcagccaatcaccgcagcggcacctgggacagctgccgccgccgctgcagcagctgctgccgctgcagcatttggccagtaccagcctcagcagctgcagacagaccgaatgcaatagaccagccatctgatcaaagttgaattgttttctctttccctcccaattttccaatttttagtagctaataagagagttaacattgacttaacagctttaaaaaaaaaaacagccatgctattgtgaagcagagttattattttttttatactccaggtagtgttctagatgagaaagaggtaagaatgaggggaatgggcacaattttggaaatcaatcccaaagagcctgagtaaatgaaaggccactacgaaatgacgccaggagtaacaacggaacttcacttttgtaacgggatttttatttttgctctttttatagtatcagggaagcaaactgccttttacaagttagaaaatgctgtttgaatctagttgaaccagggaatacagagcgagcaatatgtagcttgaattacatttaaaagcagattttttacaaacaaaatggcgaaagcactgattgtcatttttagcagtcacttaaggcctatagaacttttttcaagtcggaaggtcctgttcttactatctcaaaaatgggcatcgaacaatcaatctaggagcgtggcagtgggtaaaatggtggacaggcaccaaagctattttctcatctgtcctgtggatgagtggaactgtggaacaagtgatgtggaattaatgggtgcaacagctgtacagacaatcaataacacacacagttctggaaagaacacatcacttgtgcttgtttgatgagcttgtcacattctaatccctctccccatcctgtttcaattttgggaaacttgtatctgctggtgtcagcaattctgattctgaaataggatcaggcttttactacaacagccttctctttctatttattgtgtcgactcgtggcttatgaataaaggcaggcaaagtttgcag

SEQ ID NO: 177685 - DNA, 6910 bp, Homo sapiens
  Payload ID: 14869
  Gene Symbol: RBM25
  Gene Name: RNA binding motif protein 25
  Uniprot ID: P49756
  ENST ID: ENST00000261973
  CDS Start-End: 286-2817
tggtgagtcagagccaacagcggagacgatctatatacgttcttctctatggttccgcgctccccgcccccggccgcagtgcacgccgggcaagaggaagacctccatcagctcgccgcgcagcgcggctgtatttgcggcctgtgcgagtaggcgcttgggcactcagtctccctggcgagcgacgggcagaaatctcgaaccagtggagcgcactcgtaacctggatcccagaaggtcgcgaaggcagtaccgtttcctcagcggcggactgctgcagtaagaatgtcttttccacctcatttgaatcgccctcccatgggaatcccagcactcccaccagggatcccacccccgcagtttccaggatttcctccacctgtacctccagggaccccaatgattcctgtaccaatgagcattatggctcctgctccaactgtcttagtacccactgtgtctatggttggaaagcatttgggcgcaagaaaggatcatccaggcttaaaggctaaagaaaatgatgaaaattgtggtcctactaccactgtttttgttggcaacatttccgagaaagcttcagacatgcttataagacaactcttagctaaatgtggtttggttttgagctggaagagagtacaaggtgcttccggaaagcttcaagccttcggattctgtgagtacaaggagccagaatctaccctccgtgcactcagattattacatgacctgcaaattggagagaaaaagctactcgttaaagttgatgcaaagacaaaggcacagctggatgaatggaaagcaaagaagaaagcttctaatgggaatgcaaggccagaaactgtcactaatgacgatgaagaagccttggatgaagaaacaaagaggagagatcagatgattaaaggggctattgaagttttaattcgtgaatactccagtgagctaaatgccccctcacaggaatctgattctcaccccaggaagaagaagaaggaaaagaaggaggacattttccgcagatttccagtggccccactgatcccttatccactcatcactaaggaggatataaatgctatagaaatggaagaagacaaaagagacctgatatctcgagagatcagcaaattcagagacacacataagaaactggaagaagagaaaggcaaaaaggaaaaagaaagacaggaaattgagaaagaacggagagaaagagagagggagcgtgaaagggaacgagaaaggcgagaacgggaacgagaaagggaaagagaacgtgaacgagaaaaggagaaagaacgggagcgggaacgagaacgggatagggaccgtgaccggacaaaagagagagaccgagatcgggatcgagagagagatcgtgaccgggatagagaaaggagctcagatcgtaataaggatcgcagtcgatcaagagaaaaaagcagagatcgtgaaagggaacgagagcgggaaagagagagagagagagaacgagagcgagaacgagaacgggagcgagagagagagcgagagagggaacgggagcgagaaagagaaaaagacaaaaaacgggaccgagaagaagatgaagaagatgcatacgaacgaagaaaacttgaaagaaaactccgagagaaagaagctgcttatcaagagcgccttaagaattgggaaatcagagaacgaaagaaaacccgggaatatgagaaagaagctgaaagagaagaagaaagaagaagagaaatggccaaagaagctaaacgactaaaagaattcttagaagactatgatgatgatagagatgaccccaaatattacagaggaagtgctcttcagaaaaggttgcgtgatagagaaaaggaaatggaagcagatgaacgagataggaagagagagaaggaggagcttgaggaaatcaggcagcgccttctggcagaagggcatccagatccagatgcagagctccagaggatggaacaagaggctgagaggcgcaggcagccacaaataaagcaagagccagaatcagaagaggaggaagaagaaaagcaagaaaaagaagaaaaacgagaagaacccatggaagaggaagaggagccagagcaaaagccttgtctgaaacctactctgaggcccatcagctctgctccatctgtttcctctgccagtggcaatgcaacacctaacactcctggggatgagtctccctgtggtattattattcctcatgaaaactcaccagatcaacagcaacctgaggagcataggccaaaaataggactaagtcttaaactgggtgcttccaatagtcctggtcagcctaattctgtgaagagaaagaaactacctgtagatagtgtctttaacaaatttgaggatgaagacagtgatgacgtaccccgaaaaaggaaactggttcccttggattatggtgaagatgataaaaatgcaaccaaaggcactgtaaacactgaagaaaagcgtaaacacattaagagtctcattgagaaaatccctacagccaaacctgagctcttcgcttatcccctggattggtctattgtggattctatactgatggaacgtcgaattagaccatggattaataagaaaatcatagaatatataggtgaagaagaagctacattagttgattttgtttgttctaaggttatggctcatagttcaccccagagcattttagatgatgttgccatggtacttgatgaagaagcagaagtttttatagtcaaaatgtggagattattgatatatgaaacagaagccaagaaaattggtcttgtgaagtaaaactttttatatttagagttccatttcagatttcttctttgccacccttttaaggactttgaatttttctttgtctttgaagacattgtgagatctgtaattttttttttttgtagaaaatgtgaattttttggtcctctaatttgttgttgccctgtgtactcccttggttgtaaagtcatctgaatccttggttctctttatactcaccaggtacaaattactggtatgttttataagccgcagctactgtacacagcctatctgatataatcttgttctgctgatttgtttcttgtaaatattaaaacgactccccaattattttgcagaattgcacttaatattgaaatgtactgtataggaaccaacatgaacaattttaattgaaaacaccagtcataaactattaccacccccactctcttttgatcagaaatggcaagcccttgtgaaggcatggagtttaaaattggaatgcaaaaattagcagacaatccattcctactgtatttctgtatgaatgtgtttgtgaatgtatgtgtaaaagtctttcttttccctaatttgctttggtggggtccttaaaacatttcccaactaaagaatagaattgtaaaggaaaagtggtactgttccaacctgaaatgtctgttataattaggttattagtttcccagagcatggtgttctcgtgtcgtgagcaatgtggtttgctaactggatggggttttcttattaataagatggctgcttcagcttctcttttaaaggaatgtggatcatagtgatttttccttttaattttattgctcagaaatgaggcatatcctaaaaatcctggagagctgtatttaatgcatttttgcactaattggtccttagtttaattctattgtatctgtttatttaacaaaaaattcatcataccaaaaagtgtaagtgaaaaccccctttaaaacaaaacaaaaaaatgaaataaaattaggcaaattgacagacagtgagagttttacaaacatgataggtattctgctcggcaatttgtaagtttacatgttatttaaggataaaggtaaatcattcaaggcagttaccaaccactaactatttgttttcatttttgtcttgtagaaggtttatatcttgttttaccttggctcattagtgtttaaaaatgtactgatgatgtgcttagagaaattcctggggctttcttcgttgtagatcagaatttcaccagggagtaaaattacctgaaaacgtaagaagttttaaacagcttttcacacaaattagatgcaactgttcccatgtctgagtacttatttaaaagaaaggtaaagattggcctgttagaaaaagcataatgtgagctttggattactggattttttttttttttaaacacacctggagaggacatttgaaaacactgttcttaccctcgaaccctgatgtggttccattatgtaaatatttcaaatattaaaaatgtatatatttgatcctggggactcatattctttcagaatcatgtaaataaatggcatcatgttgtaattgtgtggtgcatactagaaaagttaaaaatatgggctgaactttttatggacttgatttttatgactattggtatctaaaggtcaaggaagccatttacattattttggatgaatctactatacatctatggaaatgtctcttttattttaaattctggtttctcaacggaaaatttcagaaaagatgccccttgccattttcgttaatttttcagtcttttcttagacacacccccagcctaagaccttgttcgaggagtttattgtgtctgtcttttcttaacatactgcactgttcttaagcatcatattgtgttgtttttatttagccactattaacatgaaggtttattcaggtagatttgatttcctttgcttcgtttcttctcctgctctgtcaactgtacttatcttaaagggccactctaaaaacaagggagatgtcgtaatctgaaacctttggggagatgtactctgtactgcataacatctccagtgaggtttgtgacaggacctcaactaaatatatgaatttgtgcaagttcatatattaaagtttctgcagcagagtgaaaattgttacagtaaatgtggtagaaactgttaatcgcttaatgccagtttaaatcatgttttgtaaccaagcttcagtaaaaggctttagattgtcagagttggttgatttttagaattgtatatataaagaattagacattaaacaggcatattctagtgtctgaaaatacacataagaaatttctattaagttgcttgaactttgtgggttaattttaccataatctcataaattaattttagtttgaaaaccttatacagtatgaattcattttgccatttcaagttgttatataaagagcatgaaagtctttttttgttgtttttttggggtttttttttttttgagaggaagttgtgcttttgtcgcccaggatggagtgcaatggcgcgagctcagctcacttcaacttccgcctcccgggttctggagatattctgcttcagttttctgagtagctgggattacaggtgcccaccacgacacctggctaattttttgtatttttagtagagacaggatttcaccttgttggccaggctggtctcaaactcctgacctcaggtgatccacccgcctcagcctcccaaagtgctggtattacaggcgtgagccaccttgcctggccaaagcgtgaacatcttaagaaccagtcttgatctggcaaaaaagtagtagaatactacttttctttatttgtccctaaaaataaagtatgtacatctgttcacaaggaagaaaggtaagtttgaagttgtttttcttaaactttaatgtgaccccaaatcatctgaggagtgcttgtagaaatagagacactgaagtagcagcgctggggtggcgccgcaggctttgcatttctggacagctcccagctaatgtcattgccaactgatccaagactacattttgattagcactttaaggtgtctattcagtattattttatcctaacagactacataaatgcagctgaattttcctttaagtagattttaaagagaaaaacattttttgaggcaaatacacgtaactcatgaacgtaatgtaatcttgcaaaattatgtctgagaaagccctaatattctaggctttttttccatccagccctgaaaattttttctgtagataactttatgttgtaacttattctgaatcttattatggcatttccctgtaaactatgtaagtgtaagctaatgattattttgtgaagcgtgctgtttcaggtattaatctgccatgaatactagatatagtagaaaaactgagaaaacatttagcttgagagccaatttgaactagacactatctttttttctcctttttaatggaataaatttaatgcaaataagtgtaagcaggtatacaatgtttagatgaggcttattttcccaactctttttaacaggttttatgatatccccaatttatacccaaaagactgctgagaggttttatgtcaaattgattacaaacttctctgggttgtatttcagtcttctgttaagtatgaaattgagaaatagttttgctcaacaaaagatgatgagggattgatttgtgaatgtcactggagataaaagggtatgagaaggaatcccaagcaggcaaagaaacagtctagctgtcaagaagaaaacagggagatacataccaaacccaggagctactaatataacaatcatactatagagcgaagtgaacttacactttttgataaactgatagattttttgtaatgtgattatggtaaaatactgaaatatttatgttaatttatttgcatttgaatgcttacatttttaattgacagaatctttgcatttcattacttgagtcatgaaggcgaaattaaagaatggcagtctaaaatacccaggtaaagaagataatttctagaaacaaaaataaaaattcttttcaagccatgttgtttgaattaaatgac

SEQ ID NO: 177686 - DNA, 3375 bp, Homo sapiens
  Payload ID: 14869
  Gene Symbol: RBM25
  Gene Name: RNA binding motif protein 25
  Uniprot ID: P49756
  ENST ID: ENST00000527432
  CDS Start-End: 258-2789
gaagacctccatcagctcgccgcgcagcgcggctgtatttgcggcctgtgcgagtaggcgcttgggcactcagtctccctggcgagcgacgggcagaaatctcgaaccagtggagcgcactcgtaacctggatcccagaaggtcgcgaaggcagtaccgtttcctcagcggcggggtctttctctgtctctcagcctcaagccatcctcctgcatcagcctcccaagtagttgggaccatagactgctgcagtaagaatgtcttttccacctcatttgaatcgccctcccatgggaatcccagcactcccaccagggatcccacccccgcagtttccaggatttcctccacctgtacctccagggaccccaatgattcctgtaccaatgagcattatggctcctgctccaactgtcttagtacccactgtgtctatggttggaaagcatttgggcgcaagaaaggatcatccaggcttaaaggctaaagaaaatgatgaaaattgtggtcctactaccactgtttttgttggcaacatttccgagaaagcttcagacatgcttataagacaactcttagctaaatgtggtttggttttgagctggaagagagtacaaggtgcttccggaaagcttcaagccttcggattctgtgagtacaaggagccagaatctaccctccgtgcactcagattattacatgacctgcaaattggagagaaaaagctactcgttaaagttgatgcaaagacaaaggcacagctggatgaatggaaagcaaagaagaaagcttctaatgggaatgcaaggccagaaactgtcactaatgacgatgaagaagccttggatgaagaaacaaagaggagagatcagatgattaaaggggctattgaagttttaattcgtgaatactccagtgagctaaatgccccctcacaggaatctgattctcaccccaggaagaagaagaaggaaaagaaggaggacattttccgcagatttccagtggccccactgatcccttatccactcatcactaaggaggatataaatgctatagaaatggaagaagacaaaagagacctgatatctcgagagatcagcaaattcagagacacacataagaaactggaagaagagaaaggcaaaaaggaaaaagaaagacaggaaattgagaaagaacggagagaaagagagagggagcgtgaaagggaacgagaaaggcgagaacgggaacgagaaagggaaagagaacgtgaacgagaaaaggagaaagaacgggagcgggaacgagaacgggatagggaccgtgaccggacaaaagagagagaccgagatcgggatcgagagagagatcgtgaccgggatagagaaaggagctcagatcgtaataaggatcgcagtcgatcaagagaaaaaagcagagatcgtgaaagggaacgagagcgggaaagagagagagagagagaacgagagcgagaacgagaacgggagcgagagagagagcgagagagggaacgggagcgagaaagagaaaaagacaaaaaacgggaccgagaagaagatgaagaagatgcatacgaacgaagaaaacttgaaagaaaactccgagagaaagaagctgcttatcaagagcgccttaagaattgggaaatcagagaacgaaagaaaacccgggaatatgagaaagaagctgaaagagaagaagaaagaagaagagaaatggccaaagaagctaaacgactaaaagaattcttagaagactatgatgatgatagagatgaccccaaatattacagaggaagtgctcttcagaaaaggttgcgtgatagagaaaaggaaatggaagcagatgaacgagataggaagagagagaaggaggagcttgaggaaatcaggcagcgccttctggcagaagggcatccagatccagatgcagagctccagaggatggaacaagaggctgagaggcgcaggcagccacaaataaagcaagagccagaatcagaagaggaggaagaagaaaagcaagaaaaagaagaaaaacgagaagaacccatggaagaggaagaggagccagagcaaaagccttgtctgaaacctactctgaggcccatcagctctgctccatctgtttcctctgccagtggcaatgcaacacctaacactcctggggatgagtctccctgtggtattattattcctcatgaaaactcaccagatcaacagcaacctgaggagcataggccaaaaataggactaagtcttaaactgggtgcttccaatagtcctggtcagcctaattctgtgaagagaaagaaactacctgtagatagtgtctttaacaaatttgaggatgaagacagtgatgacgtaccccgaaaaaggaaactggttcccttggattatggtgaagatgataaaaatgcaaccaaaggcactgtaaacactgaagaaaagcgtaaacacattaagagtctcattgagaaaatccctacagccaaacctgagctcttcgcttatcccctggattggtctattgtggattctatactgatggaacgtcgaattagaccatggattaataagaaaatcatagaatatataggtgaagaagaagctacattagttgattttgtttgttctaaggttatggctcatagttcaccccagagcattttagatgatgttgccatggtacttgatgaagaagcagaagtttttatagtcaaaatgtggagattattgatatatgaaacagaagccaagaaaattggtcttgtgaagtaaaactttttatatttagagttccatttcagatttcttctttgccacccttttaaggactttgaatttttctttgtctttgaagacattgtgagatctgtaattttttttttttgtagaaaatgtgaattttttggtcctctaatttgttgttgccctgtgtactcccttggttgtaaagtcatctgaatccttggttctctttatactcaccaggtacaaattactggtatgttttataagccgcagctactgtacacagcctatctgatataatcttgttctgctgatttgtttcttgtaaatattaaaacgactccccaattattttgcagaattgcacttaatattgaaatgtactgtataggaaccaacatgaacaattttaattgaaaacaccagtcataaactattaccacccccactctcttttgatcagaaatggcaagcccttgtgaaggcatggagtttaaaattggaatgcaaaaattagcagacaatccattcctactgtatttctgtatgaatgtgtttgtgaatgtatgtgtaaaagtctttcttttccctaatttgctttggtggggtcctt

SEQ ID NO: 177687 - DNA, 541 bp, Homo sapiens
  Payload ID: 14869
  Gene Symbol: RBM25
  Gene Name: RNA binding motif protein 25
  ENST ID: ENST00000525161
  CDS Start-End: 160-541
agaaggtcgcgaaggcagtaccgtttcctcagcggcgggtgagtttgtgtctctgaacgcgtgtggaaaccgggagaccgggtgcctcagctggtggaggaggaaaagccggggtggctgcgaaagcgccagggtggggtagagactgctgcagtaagaatgtcttttccacctcatttgaatcgccctcccatgggaatcccagcactcccaccagggatcccacccccgcagtttccaggatttcctccacctgtacctccagggaccccaatgattcctgtaccaatgagcattatggctcctgctccaactgtcttagtacccactgtgtctatggttggaaagcatttgggcgcaagaaaggatcatccaggcttaaaggctaaagaaaatgatgaaaattgtggtcctactaccactgtttttgttggcaacatttccgagaaagcttcagacatgcttataagacaactcttagctaaatgtggtttggttttgagctggaagagagtacaaggtgcttccggaaagcttcaag

SEQ ID NO: 177688 - DNA, 1039 bp, Homo sapiens
  Payload ID: 14869
  Gene Symbol: RBM25
  Gene Name: RNA binding motif protein 25
  ENST ID: ENST00000531500
  CDS Start-End: 311-1039
aagacctccatcagctcgccgcgcagcgcggctgtatttgcggcctgtgcgagtaggcgcttgggcactcagtctccctggcgagcgacgggcagaaatctcgaaccagtggagcgcactcgtaacctggatcccagaaggtcgcgaaggcagtaccgtttcctcagcggcggacggagtcttactctgtcgttcaggttggagtgcagtggcgcgacctcggctcactgcaacatctgcctcccaggttcaagcaattctcctgcctcaccttccagagtagctgggattacagactgctgcagtaagaatgtcttttccacctcatttgaatcgccctcccatgggaatcccagcactcccaccagggatcccacccccgcagtttccaggatttcctccacctgtacctccagggaccccaatgattcctgtaccaatgagcattatggctcctgctccaactgtcttagtacccactgtgtctatggttggaaagcatttgggcgcaagaaaggatcatccaggcttaaaggctaaagaaaatgatgaaaattgtggtcctactaccactgtttttgttggcaacatttccgagaaagcttcagacatgcttataagacaactcttagctaaatgtggtttggttttgagctggaagagagtacaaggtgcttccggaaagcttcaagccttcggattctgtgagtacaaggagccagaatctaccctccgtgcactcagattattacatgacctgcaaattggagagaaaaagctactcgttaaagttgatgcaaagacaaaggcacagctggatgaatggaaagcaaagaagaaagcttctaatgggaatgcaaggccagaaactgtcactaatgacgatgaagaagccttggatgaagaaacaaagaggagagatcagatgattaaaggggctattgaagttttaattcgtgaatactccagtgagctaaatgccccctcacaggaatctgattctcaccccaggaagaagaagaaggaaaagaaggaggac

SEQ ID NO: 177689 - DNA, 3008 bp, Homo sapiens
  Payload ID: 14869
  Gene Symbol: RBM25
  Gene Name: RNA binding motif protein 25
  Uniprot ID: P49756
  ENST ID: ENST00000528081
  CDS Start-End: 6-500
taagaatgtcttttccacctcatttgaatcgccctcccatgggaatcccagcactcccaccagggatcccacccccgcagtttccaggatttcctccacctgtacctccagggaccccaatgattcctgtaccaatgagcattatggctcctgctccaactgtcttagtacccactgtgtctatggttggaaagcatttgggcgcaagaaaggatcatccaggcttaaaggctaaagaaaatgatgaaaattgtggtcctactaccactgtttttgttggcaacatttccgagaaagcttcagacatgcttataagacaactcttagctccttcggattctgtgagtacaaggagccagaatctaccctccgtgcactcagattattacatgacctgcaaattggagagaaaaagctactcgttaaagttgatgcaaagacaaaggcacagctggatgaatggaaagcaaagaagaaagcttctaatggggttgggatgaaagtagtaagggaggctggacaaggttaacttgccagagaaagcactggtacagactattccaaacagagctaattcattaaggcagctttgtaaaatgcaaggccagaaactgtcactaatgacgatgaagaagccttggatgaagaaacaaagaggagagatcagatgattaaaggggctattgaagttttaattcgtgaatactccagtgagctaaatgccccctcacaggaatctgattctcaccccaggaagaagaagaaggaaaagaaggaggacattttccgcagatttccagtggccccactgatcccttatccactcatcactaaggaggatataaatgctatagaaatggaagaagacaaaagagacctgatatctcgagagatcagcaaattcagagacacacataagaaactggaagaagagaaaggcaaaaaggaaaaagaaagacaggaaattgagaaagaacggagagaaagagagagggagcgtgaaagggaacgagaaaggcgagaacgggaacgagaaagggaaagagaacgtgaacgagaaaaggagaaagaacgggagcgggaacgagaacgggatagggaccgtgaccggacaaaagagagagaccgagatcgggatcgagagagagatcgtgaccgggatagagaaaggagctcagatcgtaataaggatcgcagtcgatcaagagaaaaaagcagagatcgtgaaagggaacgagagcgggaaagagagagagagagagaacgagagcgagaacgagaacgggagcgagagagagagcgagagagggaacgggagcgagaaagagaaaaagacaaaaaacgggaccgagaagaagatgaagaagatgcatacgaacgaagaaaacttgaaagaaaactccgagagaaagaagctgcttatcaagagcgccttaagaattgggaaatcagagaacgaaagaaaacccgggaatatgagaaagaagctgaaagagaagaagaaagaagaagagaaatggccaaagaagctaaacgactaaaagaattcttagaagactatgatgatgatagagatgaccccaaatattacagaggaagtgctcttcagaaaaggttgcgtgatagagaaaaggaaatggaagcagatgaacgagataggaagagagagaaggaggagcttgaggaaatcaggcagcgccttctggcagaagggcatccagatccagatgcagagctccagaggatggaacaagaggctgagaggcgcaggcagccacaaataaagcaagagccagaatcagaagaggaggaagaagaaaagcaagaaaaagaagaaaaacgagaagaacccatggaagaggaagaggagccagagcaaaagccttgtctgaaacctactctgaggcccatcagctctgctccatctgtttcctctgccagtggcaatgcaacacctaacactcctggggatgagtctccctgtggtattattattcctcatgaaaactcaccagatcaacagcaacctgaggagcataggccaaaaataggactaagtcttaaactgggtgcttccaatagtcctggtcagcctaattctgtgaagagaaagaaactacctgtagatagtgtctttaacaaatttgaggatgaagacagtgatgacgtaccccgaaaaaggaaactggttcccttggattatggtgaagatgataaaaatgcaaccaaaggcactgtaaacactgaagaaaagcgtaaacacattaagagtctcattgagaaaatccctacagccaaacctgagctcttcgcttatcccctggattggtctattgtggattctatactgatggaacgtcgaattagaccatggattaataagaaaatcatagaatatataggtgaagaagaagctacattagttgattttgtttgttctaaggttatggctcatagttcaccccagagcattttagatgatgttgccatggtacttgatgaagaagcagaagtttttatagtcaaaatgtggagattattgatatatgaaacagaagccaagaaaattggtcttgtgaagtaaaactttttatatttagagttccatttcagatttcttctttgccacccttttaaggactttgaatttttctttgtctttgaagacattgtgagatctgtaattttttttttttgtagaaaatgtgaattttttggtcctctaatttgttgttgccctgtgtactcccttggttgtaaagtcatctgaatccttggttctctttatactcaccaggtacaaattactggtatgttttataagccgcagctactgtacacagcctatctgatataatcttgttctgctgatttgtttcttgtaaatattaaaacgactccccaattattttgcagaattgcacttaatattgaaatgtactgtataggaaccaacatgaacaattttaattgaaaacaccagtcataaactattaccacccccactc

SEQ ID NO: 177690 - DNA, 898 bp, Homo sapiens
  Payload ID: 14869
  Gene Symbol: RBM25
  Gene Name: RNA binding motif protein 25
  ENST ID: ENST00000532192
  CDS Start-End: 1-221
taaatgccccctcacaggaatctgattctcaccccaggaagaagaagaaggaaaagaaggaggacattttccgcagatttccagtggccccactgatcccttatccactcatcactaaggaggatataaatgctatagaaatggaagaagacaaaagagacctgatatctcgagagatcagcaaattcagagacacacataagagatcatatggtgactaatgcaagatgaaactctcagcttggaaagtaacaaggaataggatgtaagtatgagcttctgttttttattatatttatggatgccccctcagaaaaatatgcaaaggggtaactggcttggaaatgggtatttatgcatagtaaatcccactcacgagttttgcctatttgaagcttctctcaatgacagtgcatctgtgaatgttcgctggtgttgaaaatgatgcttttgaacggtgcaatgcaaacactgcatgaaatgtattttgatggtcgagataataaggtgttgctggttcttactgatagactgagagatctttaactcagtgaaatgttaaatgttcattttctcttttattcttactttttcccattgctttcaaaatctgcagttcacaaataatgccaatgaatcagtgctgctgaacacttactatccagatgcccagcccttgctcacaaacacaatgctttttcaagaattaaatgtgtctaagagcacaaacataattctcccaaaattaattttgagagttgaaaaggtggtctatgggaaatcattttagatgaataattttggttaggtataatactgaaattcaggaccgagtaagcttaaaaatggtatatggttgtgtgtgtggtttaccccctttttgtttttatttatttgt

SEQ ID NO: 177691 - DNA, 1567 bp, Homo sapiens
  Payload ID: 14869
  Gene Symbol: RBM25
  Gene Name: RNA binding motif protein 25
  Uniprot ID: P49756
  ENST ID: ENST00000526754
  CDS Start-End: 173-1057
cgccgcgcagcgcggctgtatttgcggcctgtgcgagtaggcgcttgggcactcagtctccctggcgagcgacgggcagaaatctcgaaccagtggagcgcactcgtaacctggatcccagaaggtcgcgaaggcagtaccgtttcctcagcggcggactgctgcagtaagaatgtcttttccacctcatttgaatcgccctcccatgggaatcccagcactcccaccagggatcccacccccgcagtttccaggatttcctccacctgtacctccagggaccccaatgattcctgtaccaatgagcattatggctcctgctccaactgtcttagtacccactgtgtctatggttggaaagcatttgggcgcaagaaaggatcatccaggcttaaaggctaaagaaaatgatgaaaattgtggtcctactaccactgtttttgttggcaacatttccgagaaagcttcagacatgcttataagacaactcttagctaaatgtggtttggttttgagctggaagagagtacaaggtgcttccggaaagcttcaagccttcggattctgtgagtacaaggagccagaatctaccctccgtgcactcagattattacatgacctgcaaattggagagaaaaagctactcgttaaagttgatgcaaagacaaaggcacagctggatgaatggaaagcaaagaagaaagcttctaatgggaatgcaaggccagaaactgtcactaatgacgatgaagaagccttggatgaagaaacaaagaggagagatcagatgattaaaggggctattgaagttttaattcgtgaatactccagtgagctaaatgccccctcacaggaatctgattctcaccccaggaagaagaagaaggaaaagaaggaggacattttccgcagatttccagtggccccactgatcccttatccactcatcactaaggaggatataaatgctatagaaatggaagaagacaaaagagacctgatatctcgagagatcagcaaattcagagacacacataagagatcatatggtgactaatgcaagatgaaactctcagcttggaaagtaacaaggaataggatttcacaaataatgccaatgaatcagtgctgctgaacacttactatccagatgcccagcccttgctcacaaacacaatgctttttcaagaattaaatgtgtctaagagcacaaacataattctcccaaaattaattttgagagttgaaaaggtggtctatgggaaatcattttagatgaataattttggttaggtataatactgaaattcaggaccgagtaagcttaaaaatggtatatggttgtgtgtgtggtttaccccctttttgtttttatttatttgttaaaccctgtcatgttattggtaaattatgaggaaatcatgttttaagaaaaattcaaaaatatatttgctttaaagtttgggaatctgttaggcattttactgccttagtattatttcactggagggaatgttttgaattttcagaatgtcttttcaaaataaaaagaaatcaaaatgaaaaa

SEQ ID NO: 177692 - DNA, 2470 bp, Homo sapiens
  Payload ID: 14869
  Gene Symbol: RBM25
  Gene Name: RNA binding motif protein 25
  Uniprot ID: P49756
  ENST ID: ENST00000525321
  CDS Start-End: 175-1077
ctcgccgcgcagcgcggctgtatttgcggcctgtgcgagtaggcgcttgggcactcagtctccctggcgagcgacgggcagaaatctcgaaccagtggagcgcactcgtaacctggatcccagaaggtcgcgaaggcagtaccgtttcctcagcggcggactgctgcagtaagaatgtcttttccacctcatttgaatcgccctcccatgggaatcccagcactcccaccagggatcccacccccgcagtttccaggatttcctccacctgtacctccagggaccccaatgattcctgtaccaatgagcattatggctcctgctccaactgtcttagtacccactgtgtctatggttggaaagcatttgggcgcaagaaaggatcatccaggcttaaaggctaaagaaaatgatgaaaattgtggtcctactaccactgtttttgttggcaacatttccgagaaagcttcagacatgcttataagacaactcttagctaaatgtggtttggttttgagctggaagagagtacaaggtgcttccggaaagcttcaagccttcggattctgtgagtacaaggagccagaatctaccctccgtgcactcagattattacatgacctgcaaattggagagaaaaagctactcgttaaagttgatgcaaagacaaaggcacagctggatgaatggaaagcaaagaagaaagcttctaatgggaatgcaaggccagaaactgtcactaatgacgatgaagaagccttggatgaagaaacaaagaggagagatcagatgattaaaggggctattgaagttttaattcgtgaatactccagtgagctaaatgccccctcacaggaatctgattctcaccccaggaagaagaagaaggaaaagaaggaggacattttccgcagatttccagtggccccactgatcccttatccactcatcactaaggaggatataaatgctatagaaatggaagaagacaaaagagacctgatatctcgagagatcagcaaattcagagacacacataaggtagtattcttgtcttttcacttgataccaatctagactttttacagaatccaaagcaaagagacaaaaaaaatcaaccttaaattagaatataattttaaatgttttttataggtttaattgatatttagatagaaaaaagaaacagaagaccaataccatattaaagtggtccttgacatgttgtgcttagttttttcagttactgactattctgcagtcatctcactttaatatgaatagaagctaattttatttttagatttcaacataaacatcaaggtcagacttaaattagattcagggggcagcaggataacatacactgtagtgtatttctgggggcagttatttaacttgatcttaggaataccttttctttagagctgagattaaaatttacattttatatttgtatagatttaagttgagtgggggagattttaaacagtaggtcagtggttaccagacttaccaaattttagatgcatggaagaactgtaaattcccataaagctaatctattcattgacccccaccattatgatagagatcatatggtgactaatgcaagatgaaactctcagcttggaaagtaacaaggaataggatgtaagtatgagcttctgttttttattatatttatggatgccccctcagaaaaatatgcaaaggggtaactggcttggaaatgggtatttatgcatagtaaatcccactcacgagttttgcctatttgaagcttctctcaatgacagtgcatctgtgaatgttcgctggtgttgaaaatgatgcttttgaacggtgcaatgcaaacactgcatgaaatgtattttgatggtcgagataataaggtgttgctggttcttactgatagactgagagatctttaactcagtgaaatgttaaatgttcattttctcttttattcttactttttcccattgctttcaaaatctgcagttcacaaataatgccaatgaatcagtgctgctgaacacttactatccagatgcccagcccttgctcacaaacacaatgctttttcaagaattaaatgtgtctaagagcacaaacataattctcccaaaattaattttgagagttgaaaaggtggtctatgggaaatcattttagatgaataattttggttaggtataatactgaaattcaggaccgagtaagcttaaaaatggtatatggttgtgtgtgtggtttaccccctttttgtttttatttatttgttaaaccctgtcatgttattggtaaattatgaggaaatcatgttttaagaaaaattcaaaaatatatttgctttaaagtttgggaatctgttaggcattttactgccttagtattatttcactggagggaatgttttgaattttcagaatgtcttttcaaaataaaaagaaatcaaaatgaaaaa

SEQ ID NO: 177693 - DNA, 3624 bp, Homo sapiens
  Payload ID: 14870
  Gene Symbol: RBM26
  Gene Name: RNA binding motif protein 26
  Uniprot ID: Q5T8P6
  ENST ID: ENST00000267229
  CDS Start-End: 15-2957
tagggccgctgtggatggtttctaaaatgatcattgaaaacttcgaggcactcaagtcctggctcagcaagactctcgagcccatctgtgatgcagatccatccgccctagcaaaatatgttctggctttggtaaagaaagacaaaagtgaaaaagagttaaaggcattatgtattgatcagctggatgtatttcttcagaaagagacacagatatttgtggaaaaactttttgatgctgtgaatacaaagagttacctacctcctccagagcagccatcatcaggaagcctgaaggtagaattttttccacaccaagaaaaagatataaagaaggaagagatcactaaggaggaagagcgagagaagaagttttctagaaggctaaatcacagtcctccccagtcaagctcccgatacagggaaaatagaagccgtgatgagaggaaaaaagatgatcgttctcgcaaaagagattatgatcgaaaccctcctcgaagagattcatacagagaccggtacaatagaagacgagggcggagtcgcagttatagcaggagtcgaagtcgaagttggagtaaagagaggcttcgtgagagggacagagatagaagcaggactagaagcagaagcagaacacgaagcagggaaagggatctggtaaaacctaaatatgacctggatagaacagatccattagaaaataattatactccagtctcttcggtacctagtatttcatctggccactaccctgtacctactttgagcagcactattacagtaattgctcctactcatcatggaaacaacactaccgaaagttggtctgaatttcatgaagaccaagtggaccataactcttacgtaagaccacccatgccaaagaaacggtgtagagactatgatgaaaagggtttttgtatgagaggagacatgtgtccttttgatcatggaagtgatccagtagttgtagaagatgtgaatcttcctggtatgctgcctttcccagcacagcctcctgttgttgaaggaccacctcctcctggactccccccacctccaccaattcttacacccccacctgtgaatctcaggcccccagtaccaccgccaggtccattgccacccagtctcccacctgttacaggaccaccacctccacttcctcctttgcagccatctggcatggatgctcctccaaactctgcaaccagttctgttcctactgtagtaacaactggcattcatcaccagcctcctcctgctccaccctctctttttactgcagatacatatgacacagatggctacaatcctgaagccccaagcataacaaacacttccagacctatgtatagacacagagtgcatgcacaaaggcccaacttgataggactaacatcaggggatatggatttgccacccagagaaaagcctcccaataaaagcagtatgaggatagtagtggactcagaatcaaggaaaagaaccattggttctggagagcctggagttcctacaaagaagacttggtttgataaaccaaattttaatagaacaaacagcccaggctttcagaagaaggttcaatttggaaatgaaaataccaagcttgaacttagaaaagttcctccagaattaaataatatcagcaaacttaatgaacattttagtcgatttggaaccttggttaacttacaggttgcttataatggtgatcctgaaggtgccctaatccaatttgcaacatacgaagaagcaaagaaagcaatatcaagtacggaagcagtattaaacaatcgctttattaaggtttattggcacagagaaggaagcacccaacagttacaaactacttctccaaagcctttagtccagcagcccattttgcctgttgtgaagcagtcagtcaaagagcggctgggtccagtaccttcaagtactattgaacctgcagaagcccagagtgcctcttcagaccttcctcaggtgttgtctacatctactggcctaacaaaaacagtgtataatccagctgctttgaaggctgcacagaaaaccttacttgtttccacctctgcagttgataataatgaagcacagaaaaaaaaacaggaggcattgaaacttcagcaggatgtaaggaaaaggaaacaagaaattttagaaaagcacattgaaacacagaagatgttaatttcaaaactggagaaaaacaaaacaatgaagtctgaagataaagcagaaataatgaaaactttagaggttttgacaaaaaatattaccaagttgaaagatgaggtcaaagctgcttctcctggacgctgtcttccaaaaagtataaaaaccaagactcagatgcagaaggaattacttgacacagaactggatttatataagaagatgcaggctggagaagaagtcactgaacttaggagaaagtatacagaattacagctggaagctgccaaacgagggattctttcatctggtcggggcagaggaattcattcaagaggtcgaggtgcagttcatggccgaggcagggggcgagggcgagggcgaggtgtgcctggtcatgctgtggtggatcaccgtcccagggcattggagatttctgcatttacggagagcgatagagaagatcttcttcctcattttgcgcaatatggtgaaattgaagattgtcagattgatgattcctcacttcatgcagtaattacattcaagacaagagcagaagctgaagcagctgcagttcatggagctcgtttcaaagggcaagatctaaaactggcatggaataaaccagtaactaatatttcagctgttgaaacagaagaagttgagcctgatgaagaagaatttcaggaagagtctttggtggatgactcattacttcaagatgatgatgaagaagaagaggacaatgaatctcgttcttggagaagatgatttgactgatcattgatctgcatatgctagaactctacctgtgtttcattagtattatctaatgtacttttacatatttgtaaaaacaatttttggtaaaatgtgatgaagatggatttcacaaatagacaaaaaagaagaaaactaccttctgatcttgtattttgaaagattgatgtttgcattttacttcagtaaacaattgctaaagacatcacactagaaacatatgcaatgtttttattacatacttctactggacatcacagaattctttgggttctttgtaatttaatgaataggtctgaaaacttatgaccaatacttgttataacttagaggactttgttttattccaaataaggaatgaatttgcatttaaaatcttaatgaatgttttcaaaactgaatagataacatagtactctaactaaagtctccaagttatgtattataatattacatagtagtatgcttaggctttactatgtattagccttttgttggactgtgtatgtattttaccatatgggttttaatgataatggtgtatgactgctttacatgagtccttatgcatccagatgttataataaagtggaatggtctctttaaaaaaaaaaaaggaaagaaaagagaaaagcaatgacaaaaaaaaaaaaaaaaa

SEQ ID NO: 177694 - DNA, 4132 bp, Homo sapiens
  Payload ID: 14870
  Gene Symbol: RBM26
  Gene Name: RNA binding motif protein 26
  Uniprot ID: Q5T8P6
  ENST ID: ENST00000438737
  CDS Start-End: 442-3465
gctgggagccgggaagaccccctgaatcgttcccattgagctgcccttcgccttcgctttctttacttttgccttttcgacgtagccaacaagcacctggtcccgaggctgagagaaggctcgggtctaagcgcgtgtcgcgcttccggtctgggtagatttgctggggaagagggaagggggagggcccgggcaaaccgttgctgtttcagcccgggctgggggccggggacggggagctcctggcaccccgtgcacttgtggcctgcggcggtccttgcagagctgttcgccgaccggggcccgcgggaacctgccaccggcgcctcccaccgcggcccacgcgggcggcgcgcggaggagggggcgggggcagcggcggctgtagcggccgcgacctgggcgggcggaggagtgtgacgggccttagggccgctgtggatggtttctaaaatgatcattgaaaacttcgaggcactcaagtcctggctcagcaagactctcgagcccatctgtgatgcagatccatccgccctagcaaaatatgttctggctttggtaaagaaagacaaaagtgaaaaagagttaaaggcattatgtattgatcagctggatgtatttcttcagaaagagacacagatatttgtggaaaaactttttgatgctgtgaatacaaagagttacctacctcctccagagcagccatcatcaggaagcctgaaggtagaattttttccacaccaagaaaaagatataaagaaggaagagatcactaaggaggaagagcgagagaagaagttttctagaaggctaaatcacagtcctccccagtcaagctcccgatacagggaaaatagaagccgtgatgagaggaaaaaagatgatcgttctcgcaaaagagattatgatcgaaaccctcctcgaagagattcatacagagaccggtacaatagaagacgagggcggagtcgcagttatagcaggagtcgaagtcgaagttggagtaaagagaggcttcgtgagagggacagagatagaagcaggactagaagcagaagcagaacacgaagcagggaaagggatctggtaaaacctaaatatgacctggatagaacagatccattagaaaataattatactccagtctcttcggtacctagtatttcatctggccactaccctgtacctactttgagcagcactattacagtaattgctcctactcatcatggaaacaacactaccgaaagttggtctgaatttcatgaagaccaagtggaccataactcttacgtaagaccacccatgccaaagaaacggtgtagagactatgatgaaaagggtttttgtatgagaggagacatgtgtccttttgatcatggaagtgatccagtagttgtagaagatgtgaatcttcctggtatgctgcctttcccagcacagcctcctgttgttgaaggaccacctcctcctggactccccccacctccaccaattcttacacccccacctgtgaatctcaggcccccagtaccaccgccaggtccattgccacccagtctcccacctgttacaggaccaccacctccacttcctcctttgcagccatctggcatggatgctcctccaaactctgcaaccagttctgttcctactgtagtaacaactggcattcatcaccagcctcctcctgctccaccctctctttttactgcagatacatatgacacagatggctacaatcctgaagccccaagcataacaaacacttccagacctatgtatagacacagagtgcatgcacaaaggcccaacttgataggactaacatcaggggatatggatttgccacccagagaaaagcctcccaataaaagcagtatgaggatagtagtggactcagaatcaaggaaaagaaccattggttctggagagcctggagttcctacaaagaagacttggtttgataaaccaaattttaatagaacaaacagcccaggctttcagaagaaggttcaatttggaaatgaaaataccaagcttgaacttagaaaagttcctccagaattaaataatatcagcaaacttaatgaacattttagtcgatttggaaccttggttaacttacaggttgcttataatggtgatcctgaaggtgccctaatccaatttgcaacatacgaagaagcaaagaaagcaatatcaagtacggaagcagtattaaacaatcgctttattaaggtttattggcacagagaaggaagcacccaacagttacaaactacttctccaaaggtaatgcagcctttagtccagcagcccattttgcctgttgtgaagcagtcagtcaaagagcggctgggtccagtaccttcaagtactattgaacctgcagaagcccagagtgcctcttcagaccttcctcagaatgtaactaagttatctgtgaaggacaggttgggttttgtatcaaagccatctgtttcagcaactgaaaaggtgttgtctacatctactggcctaacaaaaacagtgtataatccagctgctttgaaggctgcacagaaaaccttacttgtttccacctctgcagttgataataatgaagcacagaaaaaaaaacaggaggcattgaaacttcagcaggatgtaaggaaaaggaaacaagaaattttagaaaagcacattgaaacacagaagatgttaatttcaaaactggagaaaaacaaaacaatgaagtctgaagataaagcagaaataatgaaaactttagaggttttgacaaaaaatattaccaagttgaaagatgaggtcaaagctgcttctcctggacgctgtcttccaaaaagtataaaaaccaagactcagatgcagaaggaattacttgacacagaactggatttatataagaagatgcaggctggagaagaagtcactgaacttaggagaaagtatacagaattacagctggaagctgccaaacgagggattctttcatctggtcggggcagaggaattcattcaagaggtcgaggtgcagttcatggccgaggcagggggcgagggcgagggcgaggtgtgcctggtcatgctgtggtggatcaccgtcccagggcattggagatttctgcatttacggagagcgatagagaagatcttcttcctcattttgcgcaatatggtgaaattgaagattgtcagattgatgattcctcacttcatgcagtaattacattcaagacaagagcagaagctgaagcagctgcagttcatggagctcgtttcaaagggcaagatctaaaactggcatggaataaaccagtaactaatatttcagctgttgaaacagaagaagttgagcctgatgaagaagaatttcaggaagagtctttggtggatgactcattacttcaagatgatgatgaagaagaagaggacaatgaatctcgttcttggagaagatgatttgactgatcattgatctgcatatgctagaactctacctgtgtttcattagtattatctaatgtacttttacatatttgtaaaaacaatttttggtaaaatgtgatgaagatggatttcacaaatagacaaaaaagaagaaaactaccttctgatcttgtattttgaaagattgatgtttgcattttacttcagtaaacaattgctaaagacatcacactagaaacatatgcaatgtttttattacatacttctactggacatcacagaattctttgggttctttgtaatttaatgaataggtctgaaaacttatgaccaatacttgttataacttagaggactttgttttattccaaataaggaatgaatttgcatttaaaatcttaatgaatgttttcaaaactgaatagataacatagtactctaactaaagtctccaagttatgtattataatattacatagtagtatgcttaggctttactatgtattagccttttgttggactgtgtatgtattttaccatatgggttttaatgataatggtgtatgactgctttacatgagtccttatgcatccagatgttataataaagtggaatggtctctttaaaaaaaaaaaaggaaagaaaagagaaaagcaatgacaaaaaaaaaaaaaaaaa

SEQ ID NO: 177695 - DNA, 5152 bp, Homo sapiens
  Payload ID: 14870
  Gene Symbol: RBM26
  Gene Name: RNA binding motif protein 26
  Uniprot ID: Q5T8P6
  ENST ID: ENST00000438724
  CDS Start-End: 448-3399
gggggtgctgggagccgggaagaccccctgaatcgttcccattgagctgcccttcgccttcgctttctttacttttgccttttcgacgtagccaacaagcacctggtcccgaggctgagagaaggctcgggtctaagcgcgtgtcgcgcttccggtctgggtagatttgctggggaagagggaagggggagggcccgggcaaaccgttgctgtttcagcccgggctgggggccggggacggggagctcctggcaccccgtgcacttgtggcctgcggcggtccttgcagagctgttcgccgaccggggcccgcgggaacctgccaccggcgcctcccaccgcggcccacgcgggcggcgcgcggaggagggggcgggggcagcggcggctgtagcggccgcgacctgggcgggcggaggagtgtgacgggccttagggccgctgtggatggtttctaaaatgatcattgaaaacttcgaggcactcaagtcctggctcagcaagactctcgagcccatctgtgatgcagatccatccgccctagcaaaatatgttctggctttggtaaagaaagacaaaagtgaaaaagagttaaaggcattatgtattgatcagctggatgtatttcttcagaaagagacacagatatttgtggaaaaactttttgatgctgtgaatacaaagagttacctacctcctccagagcagccatcatcaggaagcctgaaggtagaattttttccacaccaagaaaaagatataaagaaggaagagatcactaaggaggaagagcgagagaagaagttttctagaaggctaaatcacagtcctccccagtcaagctcccgatacagggaaaatagaagccgtgatgagaggaaaaaagatgatcgttctcgcaaaagagattatgatcgaaaccctcctcgaagagattcatacagagaccggtacaatagaagacgagggcggagtcgcagttatagcaggagtcgaagtcgaagttggagtaaagagaggcttcgtgagagggacagagatagaagcaggactagaagcagaagcagaacacgaagcagggaaagggatctggtaaaacctaaatatgacctggatagaacagatccattagaaaataattatactccagtctcttcggtacctagtatttcatctggccactaccctgtacctactttgagcagcactattacagtaattgctcctactcatcatggaaacaacactaccgaaagttggtctgaatttcatgaagaccaagtggaccataactcttacgtaagaccacccatgccaaagaaacggtgtagagactatgatgaaaagggtttttgtatgagaggagacatgtgtccttttgatcatggaagtgatccagtagttgtagaagatgtgaatcttcctggtatgctgcctttcccagcacagcctcctgttgttgaaggaccacctcctcctggactccccccacctccaccaattcttacacccccacctgtgaatctcaggcccccagtaccaccgccaggtccattgccacccagtctcccacctgttacaggaccaccacctccacttcctcctttgcagccatctggcatggatgctcctccaaactctgcaaccagttctgttcctactgtagtaacaactggcattcatcaccagcctcctcctgctccaccctctctttttactgcagatacatatgacacagatggctacaatcctgaagccccaagcataacaaacacttccagacctatgtatagacacagagtgcatgcacaaaggcccaacttgataggactaacatcaggggatatggatttgccacccagagaaaagcctcccaataaaagcagtatgaggatagtagtggactcagaatcaaggaaaagaaccattggttctggagagcctggagttcctacaaagaagacttggtttgataaaccaaattttaatagaacaaacagcccaggctttcagaagaaggttcaatttggaaatgaaaataccaagcttgaacttagaaaagttcctccagaattaaataatatcagcaaacttaatgaacattttagtcgatttggaaccttggttaacttacaggttgcttataatggtgatcctgaaggtgccctaatccaatttgcaacatacgaagaagcaaagaaagcaatatcaagtacggaagcagtattaaacaatcgctttattaaggtttattggcacagagaaggaagcacccaacagttacaaactacttctccaaaggtaatgcagcctttagtccagcagcccattttgcctgttgtgaagcagtcagtcaaagagcggctgggtccagtaccttcaagtactattgaacctgcagaagcccagagtgcctcttcagaccttcctcaggtgttgtctacatctactggcctaacaaaaacagtgtataatccagctgctttgaaggctgcacagaaaaccttacttgtttccacctctgcagttgataataatgaagcacagaaaaaaaaacaggaggcattgaaacttcagcaggatgtaaggaaaaggaaacaagaaattttagaaaagcacattgaaacacagaagatgttaatttcaaaactggagaaaaacaaaacaatgaagtctgaagataaagcagaaataatgaaaactttagaggttttgacaaaaaatattaccaagttgaaagatgaggtcaaagctgcttctcctggacgctgtcttccaaaaagtataaaaaccaagactcagatgcagaaggaattacttgacacagaactggatttatataagaagatgcaggctggagaagaagtcactgaacttaggagaaagtatacagaattacagctggaagctgccaaacgagggattctttcatctggtcggggcagaggaattcattcaagaggtcgaggtgcagttcatggccgaggcagggggcgagggcgagggcgaggtgtgcctggtcatgctgtggtggatcaccgtcccagggcattggagatttctgcatttacggagagcgatagagaagatcttcttcctcattttgcgcaatatggtgaaattgaagattgtcagattgatgattcctcacttcatgcagtaattacattcaagacaagagcagaagctgaagcagctgcagttcatggagctcgtttcaaagggcaagatctaaaactggcatggaataaaccagtaactaatatttcagctgttgaaacagaagaagttgagcctgatgaagaagaatttcaggaagagtctttggtggatgactcattacttcaagatgatgatgaagaagaagaggacaatgaatctcgttcttggagaagatgatttgactgatcattgatctgcatatgctagaactctacctgtgtttcattagtattatctaatgtacttttacatatttgtaaaaacaatttttggtaaaatgtgatgaagatggatttcacaaatagacaaaaaagaagaaaactaccttctgatcttgtattttgaaagattgatgtttgcattttacttcagtaaacaattgctaaagacatcacactagaaacatatgcaatgtttttattacatacttctactggacatcacagaattctttgggttctttgtaatttaatgaataggtctgaaaacttatgaccaatacttgttataacttagaggactttgttttattccaaataaggaatgaatttgcatttaaaatcttaatgaatgttttcaaaactgaatagataacatagtactctaactaaagtctccaagttatgtattataatattacatagtagtatgcttaggctttactatgtattagccttttgttggactgtgtatgtattttaccatatgggttttaatgataatggtgtatgactgctttacatgagtccttatgcatccagatgttataataaagtggaatggtctctttaaaaaaaaaaaaggaaagaaaagagaaaagcaatgacaaaaaaaaaaaaaaaaaaaaagccaagacaatgttccttgatttaaaaaaaaaaagaaaagaaaaaagaaaagaaaaaaattaaaatagaccattccagatggtgatctacccttccccccaattatcacaaaaggagctataatcactaacttattcttaataataatggttactggtacccttacaataatgtacaatccaatgtttaaaaattataccacttgagtttggtttgatcctataaattttcaacaaatgtcttaaaatttaaaagcaggctgattagtttggaaccagactgcaagtagagctaacatttggtgaataagaaaacatcacattacattttggatgtatgaaagaaaacttgaccatttgaagatatatgaataaagaaatgtactatagatactactttaggaaaacactgtttggtaagtgttccagtctgatattttaagtgtgtacttcctatacttgtataaaaatctttgatgtttgcaacaatactgtgatttttttaagtggatttcttttgcaagtgaacatgatcattgaaagttgatatggcagtttccaggaaataaatgcattctttgtagaatgggggtgggagattacatatttatattttcaaattcatcattttgattgcaagtgtttctgcctctcttgagattatagtgataatattaaaaaatcacatttaaaaaattactttcttccatattggggtcctcacaatcaaaagctgttgttccaccaccaccatagtcttctgccagtggagtaacttaaggatgctgttctttttcttcttccccatacacccctaattggggttgaagttgtgtgtattttcttgatggtaacactatttcatagaaatgctttgccttgcaattcgtgtctacgtttatatttaaaatttcaaaatcagatttcagttgtcaaaatagtgactttgctcaaaaagtcactatttttacttatatatttaaatcaaagatctatttttatgtagtctcttgtatgttgactatgtgctattctgattcattaggtaagtttgttttcttttctttttagtagtcgtgaaag

SEQ ID NO: 177696 - DNA, 3662 bp, Homo sapiens
  Payload ID: 14870
  Gene Symbol: RBM26
  Gene Name: RNA binding motif protein 26
  ENST ID: ENST00000449987
  CDS Start-End: 1-516
cttgacacagaactggatttatataagaagatgcaggctggagaagaagtcactgaacttaggagaaagtatacagaattacagctggaagctgccaaacgagggattctttcatctggtcggggcagaggaattcattcaagaggtcgaggtgcagttcatggccgaggcagggggcgagggcgagggcgaggtgtgcctggtcatgctgtggtggatcaccgtcccagggcattggagatttctgcatttacggagagcgatagagaagatcttcttcctcattttgcgcaatatggtgaaattgaagattgtcagattgatgattcctcacttcatgcagtaattacattcaagacaagagcagaagctgaagcagctgcagttcatggagctcgtttcaaagggcaagatctaaaactggcatggaataaaccagtaactaatatttcagctgttgaaacagaagaagttgagcctgatgaagaagaacagagagagatcatcattgcctgaatttagctttgtgactgcaagagcaagaccagttcctgtctggagacgactgttacaataatatcatcctattattttatgttcactctttatcaatttgaacagatgtttacatgtactataattagcattttatctctacagttctctaagagtacatctgagtccaaagtgtatctgaatgtgtgctctgaccttattcttaaatgttttctccccatactttatagccatttattttttaaacaccttaagaaggaacgaaaaagttctcttggatgacgtatattcaagtctgagccaaattgaggattgtgtctaggaaatctgtaaagccatactactgtgttcattagcatgagcaatttaaaatgaaaatgaattaaaaagttaaacatgagtttggttttaattttggggggatcttaagatatatttctgggagtaggatagccactgaaaataattttgaatagatgataaagtacttttttatgtactgtaatagcttgtgcatttcttctgaatatactttctgatgttgccaaggtcatttacccaaatatttttttaaaaattcttagcccttcaaaaccaacaaagaaaataattttcttccaagtgacaaatgatgatctgtggattataaatattttaaaaattatatgtcttaacataattttttcacatttttttgactttcaatcaagacatcgaagacgacctttaaagcaagaggaaatagtgttgtgtgcctaacattggtaaagactagtttttaaccattttaagaagtgtatgtccaaattatttataagcagtatgacttaatatggcttagaattacttataaagaatctgattaaatctcatcctaaatatgtagccacaatatcttttttataatgggactataagaaatgtttgcacttagtttctgagtattccttcatagattctcaggaggcatttaaaaagttggaagctatacttggtagtaactatattagaaaagtccaattgacactgatttttattcacccttgttttatttttatccagccatactacctttatcacttttttttttttttttggtgcaaagcttaacattctgcaaactttttttccccttgagtatgcattgcatttgtcatgaagagtaaaaagaatgtaataaacacatcagtcataatgtaaattaactgttttgatccacattggttggatacagcatggttaattctaggcttggttaaaaatacataatttggaaagtcttctaatattttaaagacctagtagtttacaaggcctttttttgttgttgttgttagacttttggttcacatttacaaactagccacagggtgttcataaatatttccccaaattagttgagtatttttaattgtaaacaaagaattttctgcccctactacactggtttactgctagggtaaagaccattgtctgaagacactaaacttggtgttaacagtgttgattgtttaatggatatggactacatgccactacctgcaactttgtcatcctggagtttttgtttggtttggtttgatttttcactttttgcttttaaaattaaaaacaaagcaaaacaaaattgaagataccattgagaatcagaattcaagatgacttgattctcactaagatcactgcgcttttttaaaattgctttgagatctagtcagttacatatttaaaatccccgtgttgattagagataaggttttcattattttattttcctaaataggattctcatggagctattgtagataactgtacagaatcacttttgtgtaattgaatgaagcagtttcctctgcatgattgcataatgaaagccttttatatatctatatttttcaatacttagattttacactattaagctgctctagtcatgctatatttgtttttttaatagagtttataaatatttatgctcaaaatacagatcaactgaatatttttggtcttgtttacaagataaatcatactttaaaatgatacaggcccctcaagtgtcttaggaaaaagtcattggtgctataaaacctttcagtatcatttttgaacccattgttcagactttgctaggttttaatctgattccttgtgatttattataatgtagcagcatacttataaaagtggtctgtgctgagtcagatagagagcccagcccattagaaacacatcataatttaagaatatgatgcagaatgcccttacacttatttgtgcccagcttcccaaaaagaaaattgttttgttaagaggaaggcagttaatttggctagaatccaaaaactcattcagcatggctgttttcccttatttcaaatgaaaaacttttctaatactaaaatatgtaatcctgctttgctttaaattcccatgtctgtcactcaacaggaggcatagtgattcttaaatatttacggaacatttggtgagttgtaaagagaagtattattgcattgtaggtttttgcattgatgtgtcgatttttttgttttgtcccaagatttccttccagcaccttaatgaatgttcatatgatagaatgttttaagtatcagcaaagcattcatggatgcctgcttttcattctcagaaggctaaacctgttttgggtatgatgctacttcagaacatattgtctggcacaagatttcttctaataagtggtttatttaaactcaatttcggtggactgttgaattgaaaaacaccaaaggagtcttcttgtctggagactggattgttccagttttaaatacctgtgcccataagtatcccatttcatgaatgtgtgttggcatggggaaaaaatttccctgctctttgagtggagcgaaagcaattggttaagctgtagcagcttttttgtttatttttttaaagtaataataaaacttgaactgaaaaaagataaaacttgaactagaatactactcttgtatgcttagaatgtttatagtgttaaatgtttatgtggggttgtcaacatttttattatttatagttgaattatgttttgttaaatccatattgtttattatttttatattttgaaaatttttaaaataaaagtcttactaaaaacagtt

SEQ ID NO: 177697 - DNA, 5230 bp, Homo sapiens
  Payload ID: 14870
  Gene Symbol: RBM26
  Gene Name: RNA binding motif protein 26
  ENST ID: ENST00000622611
  CDS Start-End: 448-3477
gggggtgctgggagccgggaagaccccctgaatcgttcccattgagctgcccttcgccttcgctttctttacttttgccttttcgacgtagccaacaagcacctggtcccgaggctgagagaaggctcgggtctaagcgcgtgtcgcgcttccggtctgggtagatttgctggggaagagggaagggggagggcccgggcaaaccgttgctgtttcagcccgggctgggggccggggacggggagctcctggcaccccgtgcacttgtggcctgcggcggtccttgcagagctgttcgccgaccggggcccgcgggaacctgccaccggcgcctcccaccgcggcccacgcgggcggcgcgcggaggagggggcgggggcagcggcggctgtagcggccgcgacctgggcgggcggaggagtgtgacgggccttagggccgctgtggatggtttctaaaatgatcattgaaaacttcgaggcactcaagtcctggctcagcaagactctcgagcccatctgtgatgcagatccatccgccctagcaaaatatgttctggctttggtaaagaaagacaaaagtgaaaaagagttaaaggcattatgtattgatcagctggatgtatttcttcagaaagagacacagatatttgtggaaaaactttttgatgctgtgaatacaaagagttacctacctcctccagagcagccatcatcaggaagcctgaaggtagaattttttccacaccaagaaaaagatataaagaaggaagagatcactaaggaggaagagcgagagaagaagttttctagaaggctaaatcacagtcctccccagtcaagctcccgatacagggaaaatagaagccgtgatgagaggaaaaaagatgatcgttctcgcaaaagagattatgatcgaaaccctcctcgaagagattcatacagagaccggtacaatagaagacgagggcggagtcgcagttatagcaggagtcgaagtcgaagttggagtaaagagaggcttcgtgagagggacagagatagaagcaggactagaagcagaagcagaacacgaagcagggaaagggatctggtaaaacctaaatatgacctggatagaacagatccattagaaaataattatactccagtctcttcggtacctagtatttcatctggccactaccctgtacctactttgagcagcactattacagtaattgctcctactcatcatggaaacaacactaccgaaagttggtctgaatttcatgaagaccaagtggaccataactcttacgtaagaccacccatgccaaagaaacggtgtagagactatgatgaaaagggtttttgtatgagaggagacatgtgtccttttgatcatggaagtgatccagtagttgtagaagatgtgaatcttcctggtatgctgcctttcccagcacagcctcctgttgttgaaggaccacctcctcctggactccccccacctccaccaattcttacacccccacctgtgaatctcaggcccccagtaccaccgccaggtccattgccacccagtctcccacctgttacaggaccaccacctccacttcctcctttgcagccatctggcatggatgctcctccaaactctgcaaccagttctgttcctactgtagtaacaactggcattcatcaccagcctcctcctgctccaccctctctttttactgcagtttttgtattaccagatacatatgacacagatggctacaatcctgaagccccaagcataacaaacacttccagacctatgtatagacacagagtgcatgcacaaaggcccaacttgataggactaacatcaggggatatggatttgccacccagagaaaagcctcccaataaaagcagtatgaggatagtagtggactcagaatcaaggaaaagaaccattggttctggagagcctggagttcctacaaagaagacttggtttgataaaccaaattttaatagaacaaacagcccaggctttcagaagaaggttcaatttggaaatgaaaataccaagcttgaacttagaaaagttcctccagaattaaataatatcagcaaacttaatgaacattttagtcgatttggaaccttggttaacttacaggttgcttataatggtgatcctgaaggtgccctaatccaatttgcaacatacgaagaagcaaagaaagcaatatcaagtacggaagcagtattaaacaatcgctttattaaggtttattggcacagagaaggaagcacccaacagttacaaactacttctccaaagcctttagtccagcagcccattttgcctgttgtgaagcagtcagtcaaagagcggctgggtccagtaccttcaagtactattgaacctgcagaagcccagagtgcctcttcagaccttcctcagaatgtaactaagttatctgtgaaggacaggttgggttttgtatcaaagccatctgtttcagcaactgaaaaggtgttgtctacatctactggcctaacaaaaacagtgtataatccagctgctttgaaggctgcacagaaaaccttacttgtttccacctctgcagttgataataatgaagcacagaaaaaaaaacaggaggcattgaaacttcagcaggatgtaaggaaaaggaaacaagaaattttagaaaagcacattgaaacacagaagatgttaatttcaaaactggagaaaaacaaaacaatgaagtctgaagataaagcagaaataatgaaaactttagaggttttgacaaaaaatattaccaagttgaaagatgaggtcaaagctgcttctcctggacgctgtcttccaaaaagtataaaaaccaagactcagatgcagaaggaattacttgacacagaactggatttatataagaagatgcaggctggagaagaagtcactgaacttaggagaaagtatacagaattacagctggaagctgccaaacgagggattctttcatctggtcggggcagaggaattcattcaagaggtcgaggtgcagttcatggccgaggcagggggcgagggcgagggcgaggtgtgcctggtcatgctgtggtggatcaccgtcccagggcattggagatttctgcatttacggagagcgatagagaagatcttcttcctcattttgcgcaatatggtgaaattgaagattgtcagattgatgattcctcacttcatgcagtaattacattcaagacaagagcagaagctgaagcagctgcagttcatggagctcgtttcaaagggcaagatctaaaactggcatggaataaaccagtaactaatatttcagctgttgaaacagaagaagttgagcctgatgaagaagaatttcaggaagagtctttggtggatgactcattacttcaagatgatgatgaagaagaagaggacaatgaatctcgttcttggagaagatgatttgactgatcattgatctgcatatgctagaactctacctgtgtttcattagtattatctaatgtacttttacatatttgtaaaaacaatttttggtaaaatgtgatgaagatggatttcacaaatagacaaaaaagaagaaaactaccttctgatcttgtattttgaaagattgatgtttgcattttacttcagtaaacaattgctaaagacatcacactagaaacatatgcaatgtttttattacatacttctactggacatcacagaattctttgggttctttgtaatttaatgaataggtctgaaaacttatgaccaatacttgttataacttagaggactttgttttattccaaataaggaatgaatttgcatttaaaatcttaatgaatgttttcaaaactgaatagataacatagtactctaactaaagtctccaagttatgtattataatattacatagtagtatgcttaggctttactatgtattagccttttgttggactgtgtatgtattttaccatatgggttttaatgataatggtgtatgactgctttacatgagtccttatgcatccagatgttataataaagtggaatggtctctttaaaaaaaaaaaaggaaagaaaagagaaaagcaatgacaaaaaaaaaaaaaaaaaaaaagccaagacaatgttccttgatttaaaaaaaaaaagaaaagaaaaaagaaaagaaaaaaattaaaatagaccattccagatggtgatctacccttccccccaattatcacaaaaggagctataatcactaacttattcttaataataatggttactggtacccttacaataatgtacaatccaatgtttaaaaattataccacttgagtttggtttgatcctataaattttcaacaaatgtcttaaaatttaaaagcaggctgattagtttggaaccagactgcaagtagagctaacatttggtgaataagaaaacatcacattacattttggatgtatgaaagaaaacttgaccatttgaagatatatgaataaagaaatgtactatagatactactttaggaaaacactgtttggtaagtgttccagtctgatattttaagtgtgtacttcctatacttgtataaaaatctttgatgtttgcaacaatactgtgatttttttaagtggatttcttttgcaagtgaacatgatcattgaaagttgatatggcagtttccaggaaataaatgcattctttgtagaatgggggtgggagattacatatttatattttcaaattcatcattttgattgcaagtgtttctgcctctcttgagattatagtgataatattaaaaaatcacatttaaaaaattactttcttccatattggggtcctcacaatcaaaagctgttgttccaccaccaccatagtcttctgccagtggagtaacttaaggatgctgttctttttcttcttccccatacacccctaattggggttgaagttgtgtgtattttcttgatggtaacactatttcatagaaatgctttgccttgcaattcgtgtctacgtttatatttaaaatttcaaaatcagatttcagttgtcaaaatagtgactttgctcaaaaagtcactatttttacttatatatttaaatcaaagatctatttttatgtagtctcttgtatgttgactatgtgctattctgattcattaggtaagtttgttttcttttctttttagtagtcgtgaaag

SEQ ID NO: 177698 - DNA, 6451 bp, Homo sapiens
  Payload ID: 14871
  Gene Symbol: RBM27
  Gene Name: RNA binding motif protein 27
  Uniprot ID: Q9P2N5
  ENST ID: ENST00000265271
  CDS Start-End: 167-3349
gggttagttcctgttaggccccggccgggggagtaggttgaagtctcctaagatgcccggtgggctggggcaccgggagctgtgaagggaacgtgagggggcggcgtagtggagacccacggcaggcctgaagaagagcggcggccgagcccgccttccctgcaccatgctcatagaggatgtggatgccctcaagtcctggctggccaagttactggagccgatatgtgatgctgatccttcagccttagccaactatgttgtagcactggtcaagaaggacaaacctgagaaagaattaaaagccttttgtgctgatcaacttgatgtctttttacaaaaagaaacttcaggttttgtggacaaactatttgaaagtctctatactaagaactaccttccacttttggaaccagtaaagcctgagccaaaaccactagtccaagaaaaagaagaaattaaagaagaggtatttcaggagccagcagaggaagaacgagatggcagaaaaaagaaatatcctagtccccagaagactcgttcagaatctagtgaacgaaggacacgtgagaaaaaaagagaagacgggaaatggagagactatgaccggtactatgagcggaatgaattgtaccgtgagaagtatgactggagaagaggcaggagtaagagtcggagtaagagtcgaggcctgagtcgcagtagaagccgaagtagggggcgcagcaaagaccgggatccaaataggaatgttgagcacagggaaagatcgaagtttaagagtgaaaggaatgacctggagagttcctatgtgcctgtgtctgcaccacctccaaactcttctgagcagtattcctctggggcacagtctattcccagcactgttactgtgatcgcacctgctcaccactctgaaaacacaactgagagttggtctaattactataacaatcatagctcttccaattcttttggtcgaaacctaccaccaaagaggcgatgcagagattatgatgaaagaggattttgtgtacttggtgacctttgtcagtttgatcatggaaatgatcccctagttgttgatgaagttgctctgccaagtatgattcctttcccaccccctcctcctgggcttcctcctccaccacctcctggaatgttaatgcctccaatgccaggtccaggcccaggcccgggcccaggtccaggcccaggcccgggcccaggtccaggtcctggccatagtatgagacttcctgttccccaaggacatggtcagcctccaccatccgttgtgcttcccataccaagaccacctataacacaatcaagcttgataaacagccgtgaccagcctgggacaagtgcagtgcccaatcttgcatcagtgggaacaagactacctcctcctttaccccagaacctcctttacacagtatcagaacgacagcccatgtactctcgtgaacatggtgctgctgcatctgagcgacttcagttggggacaccgcctcctctgttggcagctcgtttggtgccacctcgaaacctcatgggatcctccattggataccatacctcagtctccagccctacccctctggttccagatacatatgaaccagatggttacaacccagaagctcctagtattactagttctggtagatctcagtacagacagttcttttcaagaactcagacacagcgtcccaatctgattggcctaacatctggagatatggatgtaaatccaagagctgctaacattgtgatccagactgaaccaccagttcctgtttcgattaatagcaacataaccagagtagttcttgaaccagatagtcgaaaaagagctatgagtggtttggaagggccactcacaaagaaaccttggctgggaaagcaaggaaataacaatcaaaataaaccagggttcttacgaaagaatcagtatacaaacaccaaattagaagtcaagaaaatccctcaggaattgaacaacattaccaagctcaatgaacacttcagcaaatttggaactattgttaatatccaggttgcttttaagggtgacccagaagcagccctaatccaatatcttaccaatgaggaggccaggaaagccatttctagcacagaagcagttctaaacaaccgattcattcgagtcttgtggcatagggaaaataatgagcaaccgacactacagtcctcagcacagctgctcctgcaacaacagcaaacacttagtcacctctcacagcagcaccatcacctgccacagcatctacatcagcagcaggtgctagtggcccagtctgctccttcaacagtgcacggaggtatccagaagatgatgagcaaaccacagacatcaggtgcatatgttcttaacaaagttcctgttaaacatcgtcttggacatgcaggtggtaaccagagtgatgcatcacatttgttgaatcagtctggtggtgctggagaagattgccagatattttcaactccaggccatccaaaaatgatttacagctcctcaaacttaaagacaccttcaaagctctgttcagggtctaaatctcatgatgttcaagaagtgcttaaaaaaaaacaggaagcaatgaagttacaacaagatatgaggaaaaaaagacaggaagtgttagaaaagcaaatagaatgccaaaagatgttaatatccaagttagaaaaaaacaaaaacatgaaaccagaagaaagagcaaatataatgaagactttgaaagagcttggagagaagatctcacaattaaaagatgaattaaaaacatcttctgcagtctccacaccatctaaagtgaagacaaaaacggaggcccagaaggagttattagatactgaactggacctccacaagaggctgtcctcaggagaagacaccacagaattacggaaaaaactcagtcagttacaggttgaggctgcacggttaggtattttacctgtgggtcgaggaaagaccatgtcctctcaaggtcgaggaagaggccgagggcgtggaggaagaggaaggggctcactaaatcacatggtggtggaccatcgtcccaaagcactaacagttggaggattcattgaggaagaaaaagaagacttgcttcagcatttctcaaccgcaaaccaagggccaaaatttaaagaccgtcggctacagatatcatggcacaagcccaaggtaccatctatatccactgagactgaagaagaagaagtcaaggaggaggaaacagaaacctcagatttgtttttgcctgatgatgacgatgaagatgaagatgaatatgagtctcgctcatggcgaagatgaaatctgatgctagctgtataatttttaggaatattgtttagaagaacaacttttaaaaattatttaaaagaagtcaatgagccaaaaaaaatttttttatttttcttttcaacacagtaggttcaagaacagcaagtttgctatttaaacacatctcataactgtacatgatattaaagcaccaaaggcctagtgacttttacacagttgtgaagatccacagcaatgacatggataatctctagagccttattttccacaccaccttttttttgttgctgttggtgttggattatgatgtaaatgacagggtgttcagaaattttattttggattataatctactgataaaatttaattaaatgtcaaaatcacctgtaatcttttaactctcagttgttatggatgggtcatcagacagtaggaaatatttgtaattaaaatacccttttgctttcaagagtggtcttggaagaaaaatatgtttattttaattttaatttttttttttttttactttggaggagcccaatttgtattcagtctaaatttgtttttcatggtttttatgtgtggtagtactagttcagtgaaaatcacaacaaactgtgtgttcttaaatgctacagcaatggtagctagctctatagtatttccattctcttgtcatatgaactcctggacttttcctgctactgattcttagtttgctttgatatttagtgagcgctggttcggctggtctttttaaaaatttttataactcagaatgtaaaaggctttcacctattgcccctttctcgtcccccttttcttcctcttgcctttctattaataggcctgacttagtcatcattgatataagtggttcatttgggcaaccgcaggcagtctccaataaaaggttcaaaccagcacctggataaataagtgatgttttgatgagaatgatggaaggattttggggagaagagaatcaccagctttattttttccctcttttgaagcttcagttcagtatagttacacagaagggtttaaaaatgtctgaaattcttttcctaaatttaaaccatgatggtgaggtgactggggggtggggggtggaggtgggagggggttgagggctgagtatgctagtaataaatgggagtcatatatgactttgttcagatgaccttattttttcataattttgtagcttgttgctatccatgaacatacgcatccctcagtagacagtttcctttactgtgtgcatttttactgtacactgtatagagtagagtatctgttaagtaaaatatatatgtaaatttatgtcttcgtgttctgaatgttagatggaaaagcagaggagcaacactacactgtactgacccctgggaaaataaaatgattaatgtacctaggctgtcactttttcaaggatatacacatctgtgtttttatatatgtgtggtatgaaaatttgaaacctcctgttgtctccaaaagggtcttggtgaccactatatcaaggattttgtttgctgaggtaaagacaatttctcaatatagaaactattcactaagaacttaaaaccatcaggattctagatttacttagctataagaagttaaatcccacgttctgataatctttattcttctacatgttttcctggaatgatgtgtcaaaccagggtcatttttaagttcatataattttctttcataataatgaggacttcctttttctaggttattgttatatttctagtaacactgaaggtaaaataagcttataaaagaaggaaaacatcagaatggtgtatctagaatacacaatcttgctccttactcctccatcatctctaatgaaatttttcttgatgtctgtggctcagtcagtatatattttgaaagattcattgtggtgaatattttgagtcctgacagtttaaacgtgatagagggaacaaaggatttatatattttttgtacaaagttttttcttaaactgtataattttgtaaataatttgtttgggttttttttttgtgtactaaaactaccagcgtatagatttcaataagaattgttgtatttttgtatttggaaactgaaaattacagtaaataaatggaactctaagaaaaatttcagtagacagttcaacagaatgagattccttttcatatgatttttttgacctcaaaatggacatcttatttcactctcagtaaaaagttgaaaatttgactttttagtattgggggcagaagatagaagtgtgttaaagtgaaaaacagttttttcagtaaggtttgaggccctttctataagttttcagtacaccttaaacaggactaaaaatactttaaaagtgtgctttcaaagaattttaaaacatgtttgactcaaagatgaatttgaagtgagttaattataatactggaaaacttcaggttagcataaaatagtttatatatatcccctgccccctttgggatttacttccaccatcaaatcttcaactgttagaatttcacttaaaagtgaataactgccatacatgttttcttggcatcttcatttacagaaataacatacagcatctaaagcaagttctgtccctcttaatgtgtatgacatctttttaagtagctgatcagcaataatagccaccagttgactaggtcagcctgatatactagtggatcactgtccaagataaaaaggtaaccccaagtattgcaaaatttccctcaatttctttatgtaacattgaagaaatgttgttaccagctaagatgataaattggaaaacagtcttgttaaggtgaaaggggtccttggtgatggatcattatttcaaaaaagaaaaaaatcatgtgaaaaggaatagtggttcctcttgatgtatagtatgcctgtattatagtttttacaaaattgtgaacttgtgtaatagtataataggagatattgttgaatttctaactgtttatacatttaaattcatatatgtaatgtttgttttatcaattacaatctgaatttctaagaagcatgttgacttttgcaataaagatgcaatatggaatggttcacaattgg

SEQ ID NO: 177699 - DNA, 15507 bp, Homo sapiens
  Payload ID: 14872
  Gene Symbol: RBM28
  Gene Name: RNA binding motif protein 28
  Uniprot ID: Q9NW13
  ENST ID: ENST00000223073
  CDS Start-End: 116-2395
acttccggaatctctcggcgtgtgagcttggttgtcctaccaaagccagcgtttcggctcgcgtgcgccggcctagtttgctcgcgtcctcacgcgctttgggtttcccggtctcatggccggcctgaccttatttgtgggccgcctcccgccctcggcccgcagtgagcagctggaggaactgttcagtcaggtggggccggtgaagcagtgcttcgtggtgactgaaaaagggagtaaggcatgtcgaggctttggctatgtcactttttcaatgctggaagatgttcagagggccctcaaggagattaccacctttgaaggttgcaagatcaacgtgactgttgccaagaaaaaactgaggaacaagacaaaggaaaaggggaaaaatgaaaactcagagtgcccaaagaaggagccgaaggctaaaaaagccaaagtggcagataagaaagccagattaattattcggaacctgagctttaagtgttcagaagatgacttgaagacagtatttgctcaatttggagctgtcctggaagtaaatatccctaggaaaccagatgggaagatgcgcggttttggttttgttcagttcaaaaacctcctagaagcaggtaaagctctcaaaggcatgaacatgaaagagataaaaggccggacagtggctgtggattgggccgtggcaaaggataaatataaagatacacagtctgtttctgctataggtgaggaaaagagccatgaatctaaacatcaggaatcagttaaaaagaagggcagagaggaagaggatatggaagaggaagaaaacgatgatgatgacgatgatgatgatgaagaagatggggtttttgatgatgaagatgaagaggaagagaatatagaatcaaaggtgaccaagcctgtgcaaattcagaagagagcagtcaagagaccagcccctgcaaaaagcagtgatcattctgaggaggacagtgacctagaggaaagcgatagtattgatgatggagaggaactggctcagagtgataccagcactgaggagcaagaggataaagctgtgcaagtctcaaacaaaaagaagaggaaattaccctctgatgtgaatgaagggaaaactgtttttatcagaaatctgtcctttgactcagaagaagaagaacttggggagcttctccaacagtttggagaactcaaatatgtccgcattgtcttgcatccagacacagagcattctaaaggttgtgcatttgcccagttcatgactcaagaagcagctcagaaatgccttctagctgcttctccagagaatgaggctggtgggcttaaactggatggccggcagctcaaggttgacttggcggtgacccgtgatgaggctgcaaagcttcagacgacgaaggtgaagaagccgactggcacccggaatctctatctggcccgagaaggcttgattcgtgctgggacgaaggctgcagagggtgtgagtgctgctgatatggccaaaagagaacggtttgagctgctgaagcatcagaaactcaaggaccagaatatctttgtctcccgaaccaggctctgcctgcacaatctcccaaaggctgtagatgacaaacagctcagaaagctgctgctgagtgctactagtggagagaaaggggtgcgcatcaaggagtgtagagtgatgcgagacctcaaaggagttcatgggaacatgaagggtcagtccctgggctacgcctttgcggagttccaagagcacgagcatgccctgaaagccctccgcctcatcaacaacaatccagaaatctttgggcctctgaagagaccaatagtggagttctctttagaagatcgaagaaaacttaaaatgaaggaattaaggatccagcgcagcttgcaaaaaatgagatccaagcctgcaactggtgagcctcagaaggggcaaccagagcctgcaaaagaccagcaacagaaggcagctcaacaccacacagaggaacaaagcaaggtgcccccagagcagaagagaaaggcgggctctacctcatggaccgggttccagaccaaggctgaagtggagcaggtggagctgcctgatggaaagaagagaagaaaggtcctggcgctcccctcacaccgaggccccaaaatcaggttgcgggacaaaggcaaagtgaagcccgtccatcccaaaaagccaaagccacagataaaccagtggaagcaggagaagcagcaattatcgtccgagcaggtatctaggaaaaaagctaagggaaataagacggaaacccgcttcaaccagctggtcgaacaatataagcagaaattattgggaccttctaaaggagcacctcttgcaaagaggagcaaatggtttgatagttgatgatggcagcaggctgggtaagaagctgggttgtgtactttctggtgacactcctgggctcctccccatcccccgtgtctctcactgagggaaagaaaatccccaagggcactgccactgtgctcggaggtgccctggactgtgtacatctgaactttggtccatcctttgatgtgtggttcgttagccacaaagagaaatatctgaaagtcaacatgatgcttcttgcatattatccagattattgtatgaagttgtgtctataattattaccaatttttattctttatttctcaaatggaaacacctgaaaaagcattctggagtgctgaatttttaagatgtatattttgttaagcatattctctaaatgagatattgtgtggctttttagtaacaacgtcatttctaatatgtgtgactcctttattatgtatgaacattctttgacattcctaattcagctctgtagtcttacacactgcaggaactgtctaagcgagagcagagagaaatgctttctaacctaatcgctgcaggcggagacacttggaaaagaatggggggaggtggggcctgacagagagcagcacttatgtgtttgtcagatgaggggatttccagttgaattggcctgcagtggcctaaagacactagcctggttagcgatgacctgcatttctctcatagagcacctcccttttcatcgtatccactagctctctaagtcctccttaatgaggacacttgatcctcattaagtctgccccttaagatggcttcacacctactgaaaaactccaggggtttgacatctcactttgattgaaatcttgtcttcctataacatttgattccctgggctcttcagccctatcacctctgcttgtctttatccactctcttcttcattcacttttggctacacaggccttccttccatctcttgactcttgaccacctcagagcctttgtatccgttccctttgcctggagagtttttcccttgcatcttttacttgtcactcagatctccactagttgtcgcctcctcctggagctcttcccagactatctaaagtagggcttttcttcccctcccctctatcttgcccccttactgaaatctgcttccctgtttcttcttcttttttttttttttttgagatggagtctcactctgtcgcccaggctggagtgcaatggcgctgtctcagctcattgcaacctccacctcccgggttcaagcgactttcccgcctcaccctcccaagtagctgggactacaggtgcacgccaccattcttggctaaattttgtatttttagtagagatggggtttcaccatgttgactaggctggtcttgaactcctgacctcaggtgatccgcccacctcgacctcccaaagtcctggtattacaggcgtgagccaccacgcctggcctgcttccctgtttctttctagcactaatctctatctgaaatcatttgtctctttctagcactaatctctatctgaaattgtttgtctctccagttagaatgtatgctttgtgagagggactttatccctcttgttcactcctgtagacacagcacctagtactgacccaggcacgtagtaagtattgaataaatatttgttgaatgaaaaaaataaggtaggaaaggaagaaacagtattcagtaggcaagagaaaaagttgagaacgtggcccaaaattcttgattgcttagtctagttgagtgttacaaataatgctttgacagaaccattgctgagctagagatatggttatttcttttttttttttttttttgagacagtcttgctctgttgcccaggctggagtgcaatggcatgatcttggctcactgcaacctccgcctcctgggttcaagcgattctcctgcctcagcctcccgagtagcggggattacaggtgctgccaccacgcccggctaatttttgtatttttagtagagacgggttttcaccatgttggccaggctgatctcaaactcctgaccttgtgatctgcccacctcagcctcctgaagtgctgggattacaggcatgagcctggttgagacatggttatttcatcgcaatatcttggggaacccatgaatgctctgaaatgcctttggtttagaaatggatgaaggagaggccatggaaatatttagaccttttggagagatcgaaaggacaggtgatttatctccaagttcacctcgagacatgacttgggctgtcaaatgttcttacggtagcctggcaacatgtctttctcagcctggtctgtacagtgtggaggaagtaagggactttattaagagtgtcacaatagctataacctgccagtcaggtgatctgtttttccttggccatctctccgtctgctcaccactcttttttccctagtacacgaatatctttaacattcaaaaatatatcttaacacttaggatagatcaaaattggtgttcattcagataacattgtcagattctcttagatccaaatatttcttttaacaacttaacagtatgttaaaacctcattcacttgcttggagagctgttgtacagttctttaaagagttctttatatgaggttgaatcttccctttcttaatagtcaaattctatatatggtgtcttcctttggaacaccttaccatgggctatttggtcagctccattgactccttgccttgggaattttagtgcagtgagagttgtgctcacttctccttcacttcagggcctgatgtgtcaggaaatggagttttctgaattaacatgaaagttgagttgcagattgcttggttaaaaaacaacaggtggggcacagagtctcatacctatgattgcagcacttcgggaggtgggaggattgcttgaggtcaggagtttgagaccgacctggccaacatagtgagacccccatctctattattttgaaaaacaacagcaaattttttcttaacatccaagacaaggccaccagtcaaaactatcaagttttagtagtattttcctgcttgattatataatagcctggcttagagatacaacctttaaataaggaatcttaagatgatgtgcagctgttctttgccttatttgtttgtttgttggttagtttgtagtttctaagaatctgctctgttcagctgtacagttccttcttctggagttaacctgtggcaaggattatgtttcacctgtcacaaaaatgagatctgtgccttcctctattataaagttagggcatgtgattcattcttcgaaatacttcaaaatgtactttggtatgtttttgtcttgaaaagaggttttctagctagaaattcggggcccagaaggtcaaggctccagagatccccttctcatcatccttcagttgtctgaggagacagaggatcacatgtgtcacagtgagtgctgattccccagaatctgcagtcttaagctcccctgctgacgcacacagccagttctctgcttcatattcatgtgacccactgtgaagtgacaggcagctgccaattctgtcatataagaagcagctctgcccatgcaactttgaaagttcctgcacttctccatagactgctccttcatggaaataaacacatcatcacactgtgggtgcctaagctaagtttgtttgcagtttgatgatgcccagctccttttcaactcagccttaattggcactttaagggccaggatgaggtttctctcaggccaagtcgagatttccagatttccttttgtccaaggctgaccagtttagaagttattcacatccttgttttagttctttccttcttgtcctggtacctcttcctttccaggattatttgcagagtctgtgatggcttacttggtgaccagacatggggtgagctactggtatagtctgattactttggcatctattctgaactggtcattggctgtacatgagtttttgtgctggtaaaggaatatactgggaagattggaaggcacagactgggaactaattctgagaagagaactgctgagttactgaaagaccttttggaccacccctaaatggagcatcttgatagatggcaaatccagtgtttcttaaacttgtccatgctgcccagagcccactgccttttatcagatgtgagacttcactgccacagtgtcatcccacagtttccttccctggacatttgataaagggaaaatcatttcttgtcctttaaggcagggactattattttttcacttttccacataccccacaacacctaacattgatttactcgtagtaggagtttcatactgttgaactctctaaaggccatttgttccagggcctagctgggcttgtgaaggacaacagagtcatttcctaaggaccccaaaagacagcatgaaggaaaaaataataataaactgctgttcacagtgccttgagtgtaccaccgtactttctgctatgccttgtccattccaatctggacagtctctgtgcccctcctttccactcaagtgttatccagcactcaagttctggctcaaggcccaacatctccgtggggacctcagccatcccagggcattgtgaccccttcctctaagtccccggcacactcgctgattggtaccctctcattcgacaaagcatatgccattgtggcttacttgtcatttctttaggtcttgccttcccaagtagatcatgagccactataagaactagctcccatagtcccagcccctgggcctggtacatggcaatgcttagtgattggtgattgaggataatggtggtaaaggatgtaccagacagtcatctcctgaagagatgccgaacaacctgtccttgttttatgtattttctctttctttcctgtccagttttattcctctcatagtaactgctaaaaaaatatcagttcctgtcactcttccaccccttttctccctctcccctgcattgtggtctgggccttggtccactagcaactccccttaggtgttgcttaatctgcctcatggccaaagccaatcccattcctgtcccccgctacccaagggactcccagtctgtatgcacaaggcgggatgtgaagtctggatgtgcaagaaacccagctgtaagaaacagcttccctcggcttggcatggtggctcatgcctatattcccagcactttgagaggtcaaagtgggagaatcacttgagcccaggagttcaggactagcctgggcaacatagcaagatcccacctctacaaaaaaagaaaaaattcagagtctcaaatgtcccttcatctccttactctcgacctgtctccctagttctctgccgccttttcctctcccctggatctgacactcaattgtctgcatgcacttttcaactgaaagagactccaatgccatccttctgatgaaatttttgctttggatactactgcagaaaaaatgctatcttgtattctggtccatggtggggaagaccctgtcgtagaacctggcaactcaagtggagggaggggccagaacattgttcttatgctatttacagtgagacaacaggattgatgcagaactttctttttttttttttttttttgagacagagtttcattcttgttgcccagggctggagtgcagtggcatgatctcagctcactgcaacctccaccccccaggttcaagcagttcttcctcagcctccggagtagctgggattacaggcgtgcgccaccacgccccactaatttttgtatttttggtagagacggggtttcaccagtgttggccaggctggtctcgaactcctgacctcaggtgatccacccacctcggcctcccaaagtgctgggattacaggcatgaaccaccgtgcccggccgtgatgcgcaactttctaataacatacttttgaaagtgcccagacatacatccctcctctggtaccacagtggccatcagttgccagagaacatgaaattatccagccctcagctctgcagcaggattctgaggagtaaagcaggcctgtaaagtactctaaagtacttcagagaggtaatgccacaaagcgaagaacacctcttggaggcagagcccctcagccctatccaggccagcagtgtccacttgaaatctgaaagcagcctccctcaccaaaccagcaagatggaaaacctccctgggttggcaagtggccctgggaagtacatgccccatctctgtcaggatagcagtggagaggtttcgtgccagtgccagctccacccacccagatggtactcaagactccaagcctgtcaatggggtggaaactttctggcattttctgtcagaagggtgagttagcactgaaccatctcatgtgtcttttcactgagtaacagcccatatccattccatgaaatgagtgactgctttgttgaatcagatagtaacaaacatttatttgtagtctggttgtgtcatatcatggttgaattgcaaacaggttggatagaagagtcagcaaaaatcaacaaaagcattctgtaaaaaacttttctagaattacaataaatggcattgtatattttatttataaattatgtgctgcacatcatttttatcaatgaaatttataataaatttctgtacatatatacatttttatcccagagagccagttgttaagcatttaccagcaataaatgctttttgtttcctgcttacacaggttctgggagtggccagcccactctttgagatgtccccacttgcttttttagttgtccaagtagtgttctgcccagccttcccgactctctttcttatccttccctcgaaactattctgttccttatgcttaaatactttccagtcatgggagctttgctgtaggcccttggcctttcatgggtagcttctgatacgtgcatgggtgttaatagaggaagttgaccccgcctgggaagaataatgacctatggagacctggccctttctcttatggcttcttaaagtgacagctgttatgggaagttcaggcatcttgacgtggaaaatacattgttcattttcttttaattttttttcccctaaccactataccaacagggatggaaagatacttttagttggaaggaatttggagcccttaaacgacacctggagcagctgcctgtgggtggggctttgcacagtctcatcctggcaagggaggacgagccaaggaccagttttgcagaattgtcatcatgaggccctggttgtgtgctgggctggggcattgcccctttccaggaggccaggccaagcagggctgcctggcttaggcttttgcatcttcagcatcctttcacgtctcttatctcaggtgaccttcacagcaagcctggtgaaggttattgagaagcagatgtcaccacctagtcttagagctgatgaaagcaggatgtggggaagtccagaccctctcctgaaaccccttggccacctgagctagtaccagagcaaggtcccacttggccgtgagtgctgtctctagggcctatttcaggaactgtctcatatataagaacagaacactttttgccagctataccaaatgtttttgggattaaaaaaatagtttctcttttccaaattaggtggtaagaaaaggaagggcattttcattctcacattctttgaatgttgaaacgttttaaaaacttccagctgggcttggtggctcatacctgtaaccccagcactatgggaggctgagatgggaggatcccttgaggccaggagttcaggaccagcctgggcaacatagtaaaactgcccaaaatttgaaaattagccttgtgtggtggtgtgcactgtagtcccagctgctcgggaggctggggcaggaggattgcttgagcccaggagtttgaggctgcagtgagctatggttgtaccactgtactccaacctgggcaacagcgtgataccctgtctaaaaaaataataaaaataaaaaaggattaaaccctttacttgaccagcttcttttcctgctacccctggactaactaatcattacatatttttgtagttgttttttctttctttctctctcctgatctaccacaagccaaatgtactcatatacatactaataggtgaaaaaagagagtctgaggagtgaatacatttattttgtgatttcctaggcagtagctaggactcccttagaggttgctaatagggaaagggtgcgctggctctactcagttttataactgcttttccccgaattctgcagacatcttcattcccctggaggtcagataatggctatttattttccatagccatgaaaatctctggggagagctgtggcaatttgacgagagctattaaagggacattaggattgaagtagctgctcaggcagtcacataccctcgatcctcatctgcagggacagctgccagaacgaatgagcccagctctcctgcccgcagccagccgcgtgtgggtgcaactggcgaccagccactggagtgagtcccagggaaggggacaggttcttagaatcaccatttgtctctgctctctccctctctgcaataggacgggcactctaaactcacataatggttaataacaacagctaacaattactgagcacctactatgtgtcaggcatgtgctgaggatgatcgcatcaagtaaaatgcctgtctctggcccagaggcccagaagaagagaaagaagggaaatctgtaggaggcaaacagtcccttacccctctgcttgcagaccttcagtgacaggacactccctgtttgctccaagcacctcttgcattttcagagcttgggacacagattcagggacttgcacttcgatagagtgcctcaggacccctcgtcggagccatggaaagtcagtttctgggcccatccttcctgtgggggtgtctttccttctcttggccaccccctaggaatccctagtagagagcaggcacttaatagccagtgcagtgagagtggtctgtgatgtctgggccagggcaaggcccgccaagtgggctcccaggtgcctgccacagagcctctggggtttgaggccctcagtgacccttaggcaatagctgggtcttaatgagggatcatgtcctttcctgggtagtcgtgggtagaggggtgtgaactgatctgagctactctaggaaggctagagacaaaagcaggaaccaagagaagggctgaggctccttccaagagactccaagtcctgagggcaagaagcggagagccttgtgccaggccaggtgttgcccctgtcagtgctgacggacaggcaagagaggctgctgatgctgcagccctgtgaagctgagactcaccctttgcccactttcacagccatctccccaggaggctgtggtgacacaggtaaaagccaaaggacagaggatgaccctggacaaatcactcagaccctccagtcctctttgctcatttataaaatacaggcaaaaagccccctagtactaaatgaaatagccactgtaaaagagcacgggagatagggtctgtgatgtcttttgtccccagtgtcctgagtgaattcacaggaaaggggagaaagactggttgcccacttccagggtgattggctaatttccacttctttcctgctagggatgggaacacacgccagaatcctgggaaggctacatgtcctcaggtggtgctggccccacctccagcctctgcagggataccaggatatgagccaggctctgctcccggggtgacccatcctcctcagtgccccttctttcctcacaactgcaggcagaaggagagtgtgtcctgtctctctgaggagctggctgtgccatttaagcaggccctaggggtggagcgctgtgaagagatggcacccaggtccctgttcctccttttccagagcaaacactgctaagggatcatgacagtccctgcatctggcccagactgggccttgggaggcttttgacatcaatccatgcaaccgcacccaacaattggagtcagcatgggaggtgagacccacttgccaattttgctctcagggaacagccctctttactaaaacatagcacagtattgataacagttgtttccaggcatcgtagaaagcgtttagtgggcattaacgtctttgatcctcaccacaaggtcaggggttggatgatgttagcatgctcattgaaggatcagaaaagtcaggctcaagatagctcgcccttcattcagccagccggtgttaactgaatattaactgtgcacccgtctgtgccagtgttcccccaggagctgcagagggtcctgagcagagtgagctcaagccacttgggagctcacattccagctatcagtgctgattcatctcaaatgtttgatccacgctgggttctaacccttccctgctcagagccctcagagtccaggtcaggtagaacccagaacagagcctctggcaggaaggagcttgcatggtcctcaggcttcatgtccagagatcattcctccactttgagcttctttgtgaaaaccaatcacaaagagaggaggggtgaaatgtgccaaagcctctgccagggttgtagcaaggaaacctgggcttctagggaaagttgagaaagggcctatattagtcaggagggctactgtaagagagtaccacaggctgggtggcttaaacaacagaaatttatcaccttacggttctggaggctagaagtctaaaatcaaagtgttggcaaggttggttccttcatgaggaatttcttggcgttgcctggcatatagatgcatcactgcagtctctgcctcgttgtcacatggccatcttctccctgtgtctataggtctatgtccaaatttccctcttcttataaagacaccagtcatattggcttaggcccagcccaatgatttcatcttaatttgattacatctctgctatggtttgaatgtgtcccttccaaaattcaggttattgccaatgtgatagtattgagatggggtccttaaagaagtaattaggccatgagggtgcctctctctgaagggaggctcattggattgtatcagtgtaacataatttacataaccagttctttatgtgatggaaatcccattcaacggtttccaacctttgctattacaaactgctgtgaagagaaacatatgtcattatactaatcaggtgctgttgttgtttttataatgcattatcctggagagactgcccctcccagggctagctactttggggagagagtaaacaacttggtcgagcgtgcctttcgtatgcaaaccagtcaatccagagcccacacccccagtcacctcctttatcaaactctgacacagcaagccaatattccccctgccctaaatcactccagggccaggcatgggacaactagggacaatccctatagccagggcctgccaaagttatacagattagccaatcctaagcctgcttccctgccttgccttgcctttctgctggaaactacattaaaggcgctggatcgtgcttttccctcaccccctctgcttcttggctgacccaagttcttcctgtgtggccctgcaaggcgtgacacacctctcctcctgggaactgcataacaaactcttcttgcagagatagttttctctgtgtctgtcatcttaccatacctgatgaaaacaaatatgggtacatttttttttttttttgagagagagggtctcactctgtctcccaggctggagtgcagtggtgtaatcacaggtcactgcagcctcgacctcctgggctctagtgatcctcccacgtcagccttgcaaatagctgagactacaggcacacaccaccatgcctagctaatttttggtgtatttgttatagagacagagtttcgctatgttgcccaggctggtctcaaactcctgagctcaagtgatccacccaccttagcctctcaaagtgctgggattataagtgtgagccacagcatccagccatgggtacattttaaagcaggcgttttgttcatgtgcagcccttgttctcagttaaggggaaaatgagtgatcctttgcttggctctgaaggagcagtgttttatatgtaaagaatatattctgtatatttaaagaagagcaatggggggcatttgaaaataaatccgttcatttttttctgattgtaaaaataatatatgctcagtaaagagaatctgaaaaatacagaagtattgggggaacccacccccaatatttcaacataggttctttctattttccataagtgtcggccgactgagaaataaagagaaatagtacaaagagaggaattttaacagctgggctgccgggggtgacgtcgcatatcagtaggactgtgatgcccacctgagcctcaaaccagcaagttttttattaagggtttcaaaaggggagggggtgtaaaacagggagtaggtacaaagatcacatgcttcaaagggcaaaagcagaacaaagatcacatgcttctgaggaaacaagacaaaaggcaaaacagaactactgataagggtctatgttcaactgtgcgcgtattgtcttttttttttattatttaagttttagggtacatgtgcacactgtgcaggttagttacatatgtatacatgtgacatgctggtcgctgcacccactaactcgtcatctagcattaggtatatctcccaatgctatccctcccccctccccccacccctcaatagtccccagagtgtgatgttccccttcctgtgtccatgtgttctcattgttcaattcccacctatgagtgagaatatgcggtgtttggttttttgttcttgcgatagtttactgagaatgatgattttcaatttcatccgtgtccctacaaaggacatgaactcatcattttttatggctgcatatgtgtatatgtgccacattttcttaatccagtctatcattgttggacatttgggttggttccaagtctttgctattgtgaatagtgccgcaataaacatacgtgtgtgtgtgt

SEQ ID NO: 177700 - DNA, 2251 bp, Homo sapiens
  Payload ID: 14872
  Gene Symbol: RBM28
  Gene Name: RNA binding motif protein 28
  Uniprot ID: Q9NW13
  ENST ID: ENST00000415472
  CDS Start-End: 78-1934
accaaagccagcgtttcggctcgcgtgcgccggcctagtttgctcgcgtcctcacgcgctttgggtttcccggtctcatggccggcctgaccttatttgtgggccgcctcccgccctcggcccgcagtgagcagctggaggaactgttcagtcaggtggggccggtgaagcagtgcttcgtggtgactgaaaaaggccggacagtggctgtggattgggccgtggcaaaggataaatataaagatacacagtctgtttctgctataggtgaggaaaagagccatgaatctaaacatcaggaatcagttaaaaagaagggcagagaggaagaggatatggaagaggaagaaaacgatgatgatgacgatgatgatgatgaagaagatggggtttttgatgatgaagatgaagaggaagagaatatagaatcaaaggtgaccaagcctgtgcaaattcagaagagagcagtcaagagaccagcccctgcaaaaagcagtgatcattctgaggaggacagtgacctagaggaaagcgatagtattgatgatggagaggaactggctcagagtgataccagcactgaggagcaagaggataaagctgtgcaagtctcaaacaaaaagaagaggaaattaccctctgatgtgaatgaagggaaaactgtttttatcagaaatctgtcctttgactcagaagaagaagaacttggggagcttctccaacagtttggagaactcaaatatgtccgcattgtcttgcatccagacacagagcattctaaaggttgtgcatttgcccagttcatgactcaagaagcagctcagaaatgccttctagctgcttctccagagaatgaggctggtgggcttaaactggatggccggcagctcaaggttgacttggcggtgacccgtgatgaggctgcaaagcttcagacgacgaaggtgaagaagccgactggcacccggaatctctatctggcccgagaaggcttgattcgtgctgggacgaaggctgcagagggtgtgagtgctgctgatatggccaaaagagaacggtttgagctgctgaagcatcagaaactcaaggaccagaatatctttgtctcccgaaccaggctctgcctgcacaatctcccaaaggctgtagatgacaaacagctcagaaagctgctgctgagtgctactagtggagagaaaggggtgcgcatcaaggagtgtagagtgatgcgagacctcaaaggagttcatgggaacatgaagggtcagtccctgggctacgcctttgcggagttccaagagcacgagcatgccctgaaagccctccgcctcatcaacaacaatccagaaatctttgggcctctgaagagaccaatagtggagttctctttagaagatcgaagaaaacttaaaatgaaggaattaaggatccagcgcagcttgcaaaaaatgagatccaagcctgcaactggtgagcctcagaaggggcaaccagagcctgcaaaagaccagcaacagaaggcagctcaacaccacacagaggaacaaagcaaggtgcccccagagcagaagagaaaggcgggctctacctcatggaccgggttccagaccaaggctgaagtggagcaggtggagctgcctgatggaaagaagagaagaaaggtcctggcgctcccctcacaccgaggccccaaaatcaggttgcgggacaaaggcaaagtgaagcccgtccatcccaaaaagccaaagccacagataaaccagtggaagcaggagaagcagcaattatcgtccgagcaggtatctaggaaaaaagctaagggaaataagacggaaacccgcttcaaccagctggtcgaacaatataagcagaaattattgggaccttctaaaggagcacctcttgcaaagaggagcaaatggtttgatagttgatgatggcagcaggctgggtaagaagctgggttgtgtactttctggtgacactcctgggctcctccccatcccccgtgtctctcactgagggaaagaaaatccccaagggcactgccactgtgctcggaggtgccctggactgtgtacatctgaactttggtccatcctttgatgtgtggttcgttagccacaaagagaaatatctgaaagtcaacatgatgcttcttgcatattatccagattattgtatgaagttgtgtctataattattaccaatttttattctttatttctcaaatggaaacacctgaaaaagc

SEQ ID NO: 177701 - DNA, 932 bp, Homo sapiens
  Payload ID: 14872
  Gene Symbol: RBM28
  Gene Name: RNA binding motif protein 28
  ENST ID: ENST00000478061
  CDS Start-End: 82-932
tcctaccaaagccagcgtttcggctcgcgtgcgccggcctagtttgctcgcgtcctcacgcgctttgggtttcccggtctcatggccggcctgaccttatttgtgggccgcctcccgccctcggcccgcagtgagcagctggaggaactgttcagtcaggtggggccggtgaagcagtgcttcgtggtgactgaaaaagggagtaaggcatgtcgaggctttggctatgtcactttttcaatgctggaagatgttcagagggccctcaaggagattaccacctttgaaggttgcaagatcaacgtgactgttgccaagaaaaaactgaggaacaagacaaaggaaaaggggaaaaatgaaaactcagagtgcccaaagaaggagccgaaggctaaaaaagccaaagtggcagataagaaagccagattaattattcggaacctgagctttaagtgttcagaagatgacttgaagacagtatttgctcaatttggagctgtcctggaagtaaatatccctaggaaaccaggccggacagtggctgtggattgggccgtggcaaaggataaatataaagatacacagtctgtttctgctataggtgaggaaaagagccatgaatctaaacatcaggaatcagttaaaaagaagggcagagaggaagaggatatggaagaggaagaaaacgatgatgatgacgatgatgatgatgaagaagatggggtttttgatgatgaagatgaagaggaagagaatatagaatcaaaggtgaccaagcctgtgcaaattcagaagagagcagtcaagagaccagcccctgcaaaaagcagtgatcattctgaggaggacagtgacctagaggaaagcgatagtattgatgatggagaggaactggctcagagtgataccagcactgaggagcaagaggataa

SEQ ID NO: 177702 - DNA, 715 bp, Homo sapiens
  Payload ID: 14872
  Gene Symbol: RBM28
  Gene Name: RNA binding motif protein 28
  ENST ID: ENST00000487602
  CDS Start-End: 1-560
ataaagatacacagtctgtttctgctataggtgaggaaaagagccatgaatctaaacatcaggaatcagttaaaaagaagggcagagaggaagaggatatggaagaggaagaaaacgatgatgatgacgatgatgatgatgaagaagatggggtttttgatgatgaagatgaagaggaagagaatatagaatcaaaggtgaccaagcctgtgcaaattcagaagagagcagtcaagagaccagcccctgcaaaaagcagtgatcattctgaggaggacagtgacctagaggaaagcgatagtattgatgatggagaggaactggctcagagtgataccagcactgaggagcaagaggataaagctgtgcaagtctcaaacaaaaagaagaggaaattaccctctgatgtgaatgaagggaaaactgtttttatcagaaatctgtcctttgactcagaagaagaagaacttggggagcttctccaacagtttggagaactcaaatatgtccgcattgtcttgcatccagacacagagcattctaaaggctggtgggcttaaactggatggccggcagctcaaggttgacttggcggtgacccgtgatgaggctgcaaagcttcagacgacgaaggtgaagaagccgactggcacccggaatctctatctggcccgagaaggcttgattcgtgctgggacgaaggctgcagagggtg

SEQ ID NO: 177703 - DNA, 728 bp, Homo sapiens
  Payload ID: 14872
  Gene Symbol: RBM28
  Gene Name: RNA binding motif protein 28
  ENST ID: ENST00000459726
  CDS Start-End: 116-728
acttccggaatctctcggcgtgtgagcttggttgtcctaccaaagccagcgtttcggctcgcgtgcgccggcctagtttgctcgcgtcctcacgcgctttgggtttcccggtctcatggccggcctgaccttatttgtgggccgcctcccgccctcggcccgcagtgagcagctggaggaactgttcagtcaggtggggccggtgaagcagtgcttcgtggtgactgaaaaagtttatgtagatcagtgtcctgtgtcaaagggcttataccctgaaggagattcaaatgcagtggaaagagaagcagagcatatgaactatgtgtccttttcagggagtaaggcatgtcgaggctttggctatgtcactttttcaatgctggaagatgttcagagggccctcaaggagattaccacctttgaaggttgcaagatcaacgtgactgttgccaagaaaaaactgaggaacaagacaaaggaaaaggggaaaaatgaaaactcagagtgcccaaagaaggagccgaaggctaaaaaagccaaagtggcagataagaaagccagattaattattcggaacctgagctttaagtgttcagaagatgacttgaagacagtatttgctcaatttggagctgtcctggaagtaaatatccctaggaaaccagatgggaagatgcgcggttttggttttgttcagttcaaaaacctcctagaagcaggtaaagctc

SEQ ID NO: 177704 - DNA, 1404 bp, Homo sapiens
  Payload ID: 14873
  Gene Symbol: RBM33
  Gene Name: RNA binding motif protein 33
  Uniprot ID: Q96EV2
  ENST ID: ENST00000287912
  CDS Start-End: 427-1233
cccggaatcgacctatggccagcagtcgtccccgccctgcttcaaacatttgggtttcaggagccgggcggaggtgactgccgcgtgtttgcgttgcacgcccaccgcccgaaacacggcggcggcctcagggctgctgcggcctcggcgggggcaggccccggcgcccgcccgcctcccggcctccatcatcccagggtgcaccgcggcgggcgcgggcgcgcggccatgttgcggtagtttgttgttttcttcctgcggaggcgaagggccagctgtggaccgcgaagcgcccggcttcgcctctgcctcctgcagccccctcccttctctgtcctccgtcacccgtacccgggcccggaccaggcacgtcggcccaccagctggcttggtgggggaggctgaaggccgggccccgcgagtgccatggcggccgccctgggagcgagcggaggagcaggcgccggagatgatgactttgaccagtttgataagcctggcgcggaacggtcgtggagaagaagagctgctgatgaggactgggacagtgaacttgaagatgatttacttggagaagatttgctatctggcaaaaagaatcagtcggatttgtcagatgaagagctaaatgatgatcttttgcagagtgataatgaagatgaagaaaatttcagttctcagggtgttacaattagtctgaatgctacatctggcatggttacatcatttgaactctctgacaacactaacgaccaatctggagaacaggaatctgagtatgaacaagaacaaggagaggatgaactggtttatcacaaatctgatggatcagaattgtatactcaagagtacccagaagaaggacagtatgaaggccacgaagctgagttgacagaagaccaaatagaatatgtggaagagccagaggaggagcagctttacactgatgaagtgttagacatcgagatcaatgaacctttagatgaatttacaggaggtatggaaacattggaacttcaaaaggacatcaaagaagaatcagatgaagaagaagaagatgatgaagaatctggacgattacgtttcaaaactgaaaggaaagaaggaacaattattaggctctcagatgtaactagagagagaaggaacattccagaaactttgggtaacttttttgcctgtctcccatcctcctttactctcatttcaacttcctccatagtattgctgtaattaatcaaagtaggcaaagaaggttgactaggtaattgcggctgccgtccggagagtggccggactttggagtgagtgctgtttatggtactgtaaaactcattctttaaaatcattgctgtttatggatttaaaatgcttgaataaaatgtttaagataattaaaaaaaa

SEQ ID NO: 177705 - DNA, 4360 bp, Homo sapiens
  Payload ID: 14873
  Gene Symbol: RBM33
  Gene Name: RNA binding motif protein 33
  ENST ID: ENST00000307403
  CDS Start-End: 1-855
gatttacttggagaagatttgctatctggcaaaaagaatcagtcggatttgtcagatgaagagctaaatgatgatcttttgcagagtgataatgaagatgaagaaaatttcagttctcagggtgttacaattagtctgaatgctacatctggcatggttacatcatttgaactctctgacaacactaacgaccaatctggagaacaggaatctgagtatgaacaagaacaaggagaggatgaactggtttatcacaaatctgatggatcagaattgtatactcaagagtacccagaagaaggacagtatgaaggccacgaagctgagttgacagaagaccaaatagaatatgtggaagagccagaggaggagcagctttacactgatgaagtgttagacatcgagatcaatgaacctttagatgaatttacaggaggtatggaaacattggaacttcaaaaggacatcaaagaagaatcagatgaagaagaagaagatgatgaagaatctggacgattacgtttcaaaactgaaaggaaagaaggaacaattattaggctctcagatgtaactagagagagaaggaacattccagaaactttggagctttcagcagaggccaaggcagcattgcttgaatttgaagaaagggagcgacagcataaacaaggacgctacagctccaggcggggaggacggcgaggaggtccgctgatgtgtcgtggtgtgggggaccagaggagagagagcaccgagaggggcaggatgaaggaccacagacctgcgctgcttcctacacagcctcctgtcgtgatacttccagaggaggaattaatgagcgacctgatgccctaagatgacataagctgttggaccttgctacctaaagcctctagagagccccaggctccccctccaccgccaccgccgcctcagcagcagccgatcagaagcctgttccagccgcagccgctgcagccgctgcttccggtgcagcacccgcaccacccatccccgcctcagggaatgcacatgcctccccagctagagaccccaaggatgatgatgaccccgccacccgtgactccacagcagcccaagaacatacacatcaacccgcacttcaaagggacggtggtcacgcctgttcaagtgcccttgctaccagttccgagccagccgagacctgccgtgggaccccagagattcccaggccctccagaatttccacagcatacacctggacctgttcccaacagtttcagccagcccccacgactccctctccaggaccagtggagagccccacccccgcctcaggatcgagaccctttcttcttaggagtttcaggtgaaccaagattcccgagccatctttttctggaacagcgaagtccccctccaccaccaccgcctcctacccttcttaacagtagccatcctgttcctactcagagtcctctaccattcactcagccaggaccagcatttaatcagcaaggacagcagccagtgttcccaagagagcggcccgtacgaccagccttgcagcctccaggtccggtggggattctgcactttagccagcctgggtcggcaaccacacggcccttcattcctcctagacagccgttcctgccaggcccaggacagccgtttctgcccacacacacacagcccaacctgcaggtaatgcatcctgagtgaacctccagggaaaaaatgtgtagcttcaaggctttgtgttccataaagtttcagatttttatttgagcctactaatttgtggttatttaaagaatagagtattagtctcaaatgtactgtttgttaaagacaacttttttcaacaatgttacttatctcaatacaagaaaaaaatgggaaaatgtcattttttgggaattgaaaaatgctacttattataattgtttaaagggtatactactaataaaattaggacatgttttgataatacatttgctcatctgtataaaatttcatgagaggtttaccagtggaaatactttgtcaaattatattcctgcagtagacagttttgaaaagagtctttgcatggagggaagaagatgttgctgttcactggttatttgaaggccttgagtgccctctgccgaccggcttctgcttcatgggttttcactggttatttgaaggccttgagtgccctctgcccatcggcttctgcttcatgggttgacatgcgtctgtaacatctttcttaccaagtgtatatttcttcttgtattgtagggttactattaaaatacatagcgatggtaaacttgaatcaactatttaaaaatacgtggaatacgtatctaagccaaaaacggaaaatgaatattatctagggtgttaaaggaagataaaatgtttttaagaatttttctttttattaaaaaaatgcaattaatacatccccattgcagaaattttcaagtatatataagaaaggaaattaaatactctcgttacctagaaacaattcaggagcttttttttttgtctttttttaaatgcacatcttctcgccacctgctttttccctccagtgtcacatatcatttgatcttttcatgtcagcgagttggttttgatgccatcgtttgagagtgctgtatgcggttccctttcatgctgtctgtgtggttgcatgtgtgtatactggtttcagtactttagtatcatagtgctacagggaacatgctttagagttatgagtttgtctgcatacctagttttccttaggacaattcaatcctagaattactggattaaatataaaatttaaggtaatagcttctggcttattactgcattttagatagtattaccttcatcagcaagtctaaaatgaagttttggtatcgctgaaagttcctttcttgtgttgaggttttttaggaaatgattgaagtgattatgcccggtgtaaccatttatgaactgttgtttctctttctttggaaatggaaggggccgttgcatcctccattgccccctccgcatcagcctcagcctcagcaacctcagcaacagcccccgccacagcaccagcctccgcaccagcccccgcaccagcccccgccccagcaccagcccccaccccagcacccaccacagcacccgccgcagcaccagcaccaccaccaccaccaccacctgtccgtcccgccccctcctttgatgccgatgtctcagccacagttccggcctcacgtacagaccgctcagcctcaggccagcagcagccggatgcagtgcccccagcgccaggggctccggcataatacaacttctcagaatgtaagcaagcggcccatgcagcaaatgcagcccactgcgccaaggaacagcaatttgcgtgaattacccatagcgccgtcacacgtgatagaaatgagcagcagccgctgctctgccacgccctcagcacaagtgaaacctatcgtcagcgcgtcaccaccctcgcgggccgtggcgggttccagaagctcacagggaaagacggaagtgaaagtcaagccagctagccctgtggctcaacctaaagaagaggcaaaaacagaaacagagtttcctgatgaagatgaggaaacaaggttatatcgcttaaagatagaagaacagaaacgcctaagagaagaaatcctgaaacagaaggagttacggcggcagcagcaggctggtgccaggaagaaggagctgctggagagactcgcgcagcaacagcagcagctgtacgctcccccacccccagcagagcaggaagagcaggcactgtcaccatcacccaccaacggtaacccactgttgccctttccaggtgcacaggtcagacaaaatgtgaagaacagacttcttgttaaaaaccaggatgtcagtatttcaaacgttcagcccaaaacatccaattttgtaccatccagtgccaacatgcagtatcaaggacaacagatgaaagcactgaaacatttgagacagaccagaacagttcctcaaagtcagactcagccgctgcataaagtgctcccgatcaaacctgcagatgtggaggagccagctgtcccccagactcctcgagtggcgtccatccagggccggccccaggacacaaagcctggcgtgaaaaggactgtcacgcacaggacaaacagtggtggtggagacgggccccacatcagctccaaggtcagggtgattaagctgtcaggtggggtaagttgacaagttttatgagagcctctttgagtctgtgtatcacatagaatgtcctcatttgcagagaatgtttttgaagaaagaattaaaagttacctctgttatagtcttgtaa

SEQ ID NO: 177706 - DNA, 7058 bp, Homo sapiens
  Payload ID: 14873
  Gene Symbol: RBM33
  Gene Name: RNA binding motif protein 33
  ENST ID: ENST00000341148
  CDS Start-End: 294-614
attgcagaagattcttccataaagaagtgatctgtagaacacttgcttctttatcccaccatatagtcttattagttgtgggaggagagagcgatggcttttttcacccagaaggccagccccagcggcttccccagcctccggaagtgggaccacagcctgcccgcaaggtgacgctgaccagggggggcctccagcagcccccacatctgccagcggggccccacgcacactcgcctgtccctccagggatcaaaagcatccaaggaattcacccggcgaagaaggccatcatgcacggacgaggcagaggagtggccggtcccatgggccgggggcgcctgatgccaaacaagcagaacctgcgggtggtggagtgcaagccccagccctgcgtggtgtctgtggaggggctgtcctcgtccaccacggatgcccagctgaagagcctgctgatgtcagtgggacccattcagagtttacagatgcttcctcagcaacggaaagccatagctaagttcaaggagccagcccacgcattagcatttcagcagaaattccacaggcatatgatagatttgtcccacataaatgtggccctgatcgtggagtgagtcctaacaagagagcctgaccttaggctgtacacacactgtggaatttcttcaagggagctgccggccggcgcagaacccccaggagcacaggtctctccgggccgctgtcctgcgtaactgttctccagagcgccagccagccacgggcctgattccagaggagccgaactgacaggacacagcaggctggagttggtgttagattgcttcacattctcttgtcaccaccaagaactccaagtttttcgttttgttttgttttcaaagtgcttacaatgcatgtagacattgttctttgtggtctgactctatgatcgatcacagtgacttagattcaggaaagaacattaacgtcacaagttctaagtagttttcacagcaaagaatatttgataatggttgcacttatcttcagtgcaggttagaagagtcttctcaaccaagcttaactcgagttgtcttctcagccctcaaaaggctcttgtacaaaatgtagattaaaatttgggtgattgttgattgacctttgcataccctggaaagccagggtgtgagtggggtggttgggagtggtgccagttgaacagcagattctgcttcttgtcactgtttcaaaagcgtcaactctgtgttcctagtttcgatgaactccccattcatttttaacacacttcccagataaggcaatgtgctggacaggcacacggcatggccctcggctagagcagggtctgtgatggcctcacctggcagccctctggcctagttcccaccacacatgaggtggtggaatggcctgaaggtggaacagacctgtttttttcctttttaaatgcagtaaggtggcctgtttatcactggctctgtgatacatgacattctttgggaatttggtggccactgcttcagtcacctctgtttttctgaaggctgttccagcagggctgccctgttcatcagcggatgttcactctggcctgccgttccccgtggcatgcggggtgagggtggctttcttccagccccaaatgagacgagtctgtgtcatcattgaaactgcttttcgtaattgcgggtaggttcctgtaggtgagacatattctccataaagctactgtagtagaattcattctgggcaaacactgaaaaaagtgccttacagtatttctgctcatgaaagagtttcactattttggatatattctaaagtggacctgagctatttgagcaaataatgatagggcatactcagacattttagctaccttttatacctacgatttcatgtcacatttactaatagaattaagggaaatagaagcccgttctttcttactgcccctggagggagcatggcgctagggctctcagcctcctagaaggaagggactaaggagacgggcacagacttgcgtcatctcgtttccacagttgacgttttatattactttctcaaattaagttaccaaaacaaactgaagagctgaagcaggtcttccagaccctgcgatcctttctgtagcagtgattctaaagtggcgtttgctgtgtgcttgagagtaacactgcacgctgcaggggctgttgcagcagtcagtcccaggaagccacagcgcttgtaggatctgctaggaccctgcagctgtgctgccgccacctctgctccagagtgtcccagccaaccctcggaagatgggattgccagtcagccctgcctcaccatgcctgcaggaggctgtccagggagcaggtctgtgtgcccatcagcaggttcccatggctgtcactgcccactcatttccacagttagatacggatgtgttgatgtatttcgtctagtttatttggctcagtccacagctgcgttggagtggtgactttggtagcccttgagctctaattaagagagatccaaaccactcagtacccactgggcagtgggaaggcctaccgacttactttatcattgagggcttactgatacaatgaaatgagtttcatgactttttttttttttaaacactttttgaaatagagtgtgctgtgtttaaaaccaaaaatatgcatgttgtctctgaaaagtaggcattgaaacagacttttttgtagtcagtgttaataaaacggatcctgtttgggccttcattgttaaggtggacttcatggccactggaaggtctgttttggtgttacctgagtgtgacacaggccctggggtgtgcgtgtttctctaactgtctacacgtgcacataggcagactttctcatagaatgttcttgaaaggtgattggcaaagtcatgcaggcccgccttaaagcgctgattagaacagtccaacacagtccgacctcactcaatacccacaaccatcgaaaatggattcttagtaccagacaatcccagtaatgaaggtttagtttccttgaaggaaactacagaaaaggaaagaagcagaatgagaaaggaatggtacttaggtgtttggtatgctgctcacgtgaagtcagcccacaccagccaaaccctcgtggaagatctgctgcaaccattatctttgttcttgagttcatcatgcatttaaaatgagatgcaagagcatttagcataccatgtaaatatggaccttttaaaattaaaatactattggaagtgctttcaactcagccacatcttagctattagttctttgtgttgtcttatcaaagtttaatggatacagttccacagttgttgatgtgtttgtgtgtatattcgatttttataaagatggtagtaagtcaatacatttatcctgatctgtgtattatttgttcacaaattcaagaagcttaaaggtcgtaaatatcagtatctcataaggtaaaccaatagctgattatgtggagccaagttacttcttttctttttgcattatcttgttttggttttgtgctgtaatagaagttcacttagctactttagataaccttgcattaccactggtctggccacgtttgttaaatccttatactgatattcttctaaagagtaaatctcatcatttttccagacaaattttgaggggtttctctgttttgtggacaggcagcagcctccgtaggcacccgcaccctgccttgctggaggagatgggatggggcgggaggtggcttcaccataactatttttaatatgggtcattcttagcatgatttgtaaaggtctcaggcaaacagttgttgaagcttgcttctgtggcatttctgaattgtggcagagcttagatcctgcacccaggggtctttttttcaaacagcatcttgctcagttctgtgaacagaaggctttgttactgaaggaggtggaagaggagtttagggtgaaaaggaggaagggatggacagacccaggtgaggagaggcctggggattggggaagctgtcatctcagtgttaataatcaacttgcttctaacacactggcttatcaggggaggtcatccagtccggtcggtggagttgagagcccttgggccagggtgtttggcggcacaggggcatccgctggatggcctggaggagtgggggaggggaacgtcttcactgggtggtgatcagctgggacagttcaggtagggcaggtgagggacccccgaggccctggagccttgtcctgggatgggtttgaagaactcatcactcatcacttgttttcttttggcttttgttgtttttgttttgttctgtttgttttgttttgtatttctttgttattttattgggaaggtaagcggaatgtgctcatagaccatcagacgcttgtcgaaggcaggtcctagtcatgtaattgcacaggacaaggaggtcagcgtgtgtgatggcagcatgctgtgccggcacatcgtggagtcctagaaactctctagtccctgcggctgttcccctcctctgctctctccctggagaggactgccagctcttaagaaacattcctggtgcggtgtctgcagtgccctttgtgggtgacttcaggcttcccgctttcgtggtgctcttcctgggattcgtttttttattaccctccctccctacttgtaggcctcagctatggcttgacgtaatcgcttttagacccaggttggcttcccttcattaagctatgatcctccaccccattttttttttttttaatttggagtgggagggaggggggtgggcgagagaaagctcgaaaggtattattggtttttcaaaaaattagaggtgacgattctaccagggagttgactgataggagtgtgtgcagggcaggaaaggttcggaggcacccgactaccaccactcggaaagccgctagtccagatcgactagggagaggcttagatactttagtgtatttaaagagcatttcagttaactttttcagctatttttaaagtttgtgaatggagtgttattttggacattcttaaatatgaattctccaaaggcatttagccttgacttaatattaaatcctaaggattttatgtaaggtttttttgcaacctatttaattttttttaaatgcctaacttctgaggtgcataagcccgtggtttgtgtactggaactaaagcggaactcactgattcatattggatccccaggtataccttctgctggtagcatatggctggaaaaggccgtttgcctcacacattgtaacctgccttggctagaaaatgcttttaatgtctcaactctctcttttctgtgtcatgttttggtaggaaatctttaagattggcggacggaacaggtattttagtgagacacttctgagtacttgctttttcctttgacttctaaccaactaaaagagaaggaggtcttcatgttgatattttgcttggttttattttactgattttaaaaggtatatagaaaaatgtaggcctttaaaaagaaacagcatgtagttttttattttaatatgttccatagagtggataggcagacaggtactattgtaatgtattctgtatttaataatttaatatactctagaaagtagacctcatgcattcttttagcatgattttcttttaaactgcttttcattttaagggcacccgtggcggaagctggttttgcaaggactgtgtaagctgtatgcgttctagctgtatgcgttctgtagtcttttcttaggtgggtaacattttcaataacgcgcgcacagcacacaggggtgccctgagccgaaggagcaaaaaaagccaccgctcgtttctataatccagctttgcttttcacaggcgtgggatccaggatggtgtcctctgtgaggacttgaactctggggctttaattccactgtttaattttcaggtaccacagcagcaaagcacagagtgtgacctttttcatgtctgagctgattctgtttgctccacgtgcctgcttcttgctactgttcatttagtaatgggatcacctcaccatgccatgctctgggctctccctctctgtccatttctgttttgctttcctggctaaacccatctaccattcttaacactggtagctcctgtcccattccaagactcactctctcagaccttcccatctccctggctttccatgctcctctccctccacctcctggcttcaactgggtgagggccgtattcctgccactctgctccgcctcagccttgagaactccacgtgggctgggtgggaaggtgctgacgattttcacactgtgtttaccactccatcacctctcaacctttgcttcgacaggtcttcactcacgatttattcctccaggtctttgattggagagagtaactttttaattctgttgttttgcagtttggctctgtaggagtgagtggcgattcaaagatgccggcgtcccgcagtgtgcggttcgtgcccttaaccacccgcttctttgtttcccgcccctctgctttcgcaggagctcttgtgcttgagttcagtgttagtggtagcgtggctcactccacttggaggtggcggccgtctgaccgtgtgttactgctttgccgacggggcctcccggccctgatgcgtgtacactctgcgggctgcaccgggtggctctggttgggggcgaagctgtgttgactgggagagcgttggaaattgagacatggagagatgacgggagtgcgtttctctgggtttgatctccatcctgttttctcccagacacaccacacctaccttgggggaatgccgttgcctgttccacccctttgttcacttcgcgttaactgctgtggtaactttttcaggatctgtgtgaagaatggtaatgacgtagttgaaaggaaaatgtactgttgtgtgtttcatttgtgtgatttcgtaccaaaaaaatgtgtttgaactatattgtatgtaatttggaagtcgtgttaataaaaccctgcagtttccactctg

SEQ ID NO: 177707 - DNA, 552 bp, Homo sapiens
  Payload ID: 14873
  Gene Symbol: RBM33
  Gene Name: RNA binding motif protein 33
  ENST ID: ENST00000392755
  CDS Start-End: 1-253
gtgcaagccccagccctgcgtggtgtctgtggaggggctgtcctcgtccaccacggatgcccagctgaagagcctgctgatgtcagtgggacccattcagagtttacagatgcttcctcagcaacggaaagccatagctaagttcaaggagccagcccacgcattagcatttcagcagaaattccacagggagctgccggccggcgcagaacccccaggagcacaggtctctccgggccgctgtcctgcgtaactgttctccagagcgccagccagccacgggcctgattccagaggagccgaactgacaggacacagcaggctggagttggtgttagattgcttcacattctcttgtcaccaccaagaactccaagtttttcgttttgttttgttttcaaagtgcttacaatgcatgtagacattgttctttgtggtctgactctatgatcgatcacagtgacttagattcaggaaagaacattaacgtcacaagttctaagtagttttcacagcaaagaatatttgataatggttgcacttatcttcagt

SEQ ID NO: 177708 - DNA, 1580 bp, Homo sapiens
  Payload ID: 14873
  Gene Symbol: RBM33
  Gene Name: RNA binding motif protein 33
  ENST ID: ENST00000392759
  CDS Start-End: 176-1102
cttcctgcggaggcgaagggccagctgtggaccgcgaagcgcccggcttcgcctctgcctcctgcagccccctcccttctctgtcctccgtcacccgtacccgggcccggaccaggcacgtcggcccaccagctggcttggtgggggaggctgaaggccgggccccgcgagtgccatggcggccgccctgggagcgagcggaggagcaggcgccggagatgatgactttgaccagtttgataagcctggcgcggaacggtcgtggagaagaagagctgctgatgaggactgggacagtgaacttgaagatgatttacttggagaagatttgctatctggcaaaaagaatcagtcggatttgtcagatgaagagctaaatgatgatcttttgcagagtgataatgaagatgaagaaaatttcagttctcagggtgttacaattagtctgaatgctacatctggcatggttacatcatttgaactctctgacaacactaacgaccaatctggagaacaggaatctgagtatgaacaagaacaaggagaggatgaactggtttatcacaaatctgatggatcagaattgtatactcaagagtacccagaagaaggacagtatgaaggccacgaagctgagttgacagaagaccaaatagaatatgtggaagagccagaggaggagcagctttacactgatgaagtgttagacatcgagatcaatgaacctttagatgaatttacagatgaagaatacttgcaggcttatggtgggcaacaagggctgcaagagcaggaagactgtgtggctgaagatgaattagatgagattactgatgcccaggttgctcctgcaactgaagagggaggtatggaaacattggaacttcaaaaggacatcaaagaagaatcagatgaagaagaagaagatgatgaagaatctggacgattacgtttcaaaactgaaaggaaagaaggaacaattattaggctctcagatgtaactagagagagaaggaacattccagaaactttgggtaacttttttgcctgtctcccatcctcctttactctcatttcaacttcctccatagtattgctgtaattaatcaaagtaggcaaagaaggttgactaggtaattgcggctgccgtccggagagtggccggactttggagtgagtgctgtttatggtactgtaaaactcattctttaaaatcattgctgtttatggatttaaaatgcttgaataaaatgtttaagataattaaaaaaaatttttttttgagtctgtggcctacagctgctcttgtacatgctgtggttcctggctggtcttgaaaaggtggcatggggatggtagctatggggccaggttgacccttcccaagaccctgaggttgtcagggcgaattctggacaagaccggtttatattttgtaccttttagtgtcttcatagctatatctttttttgtgttttctgcagttcctctgactttaatgagacaagttgactcgtttatagaaataatcactctgagcaaagcttgctgtgtgaaaggtctactacagactgctgctg

SEQ ID NO: 177709 - DNA, 2934 bp, Homo sapiens
  Payload ID: 14873
  Gene Symbol: RBM33
  Gene Name: RNA binding motif protein 33
  ENST ID: ENST00000392761
  CDS Start-End: 1-2729
ttattaggctctcagatgtaactagagagagaaggaacattccagaaactttggagctttcagcagaggccaaggcagcattgcttgaatttgaagaaagggagcgacagcataaacaaggacgctacagctccaggcggggaggacggcgaggaggtccgctgatgtgtcgtggtgtgggggaccagaggagagagagcaccgagaggggcaggatgaaggaccacagacctgcgctgcttcctacacagcctcctgtcgtgccccaggctccccctccaccgccaccgccgcctcagcagcagccgatcagaagcctgttccagccgcagccgctgcagccgctgcttccggtgcagcacccgcaccacccatccccgcctcagggaatgcacatgcctccccagctagagaccccaaggatgatgatgaccccgccacccgtgactccacagcagcccaagaacatacacatcaacccgcacttcaaagggacggtggtcacgcctgttcaagtgcccttgctaccagttccgagccagccgagacctgccgtgggaccccagagattcccaggccctccagaatttccacagcatacacctggacctgttcccaacagtttcagccagcccccacgactccctctccaggaccagtggagagccccacccccgcctcaggatcgagaccctttcttcttaggagtttcaggtgaaccaagattcccgagccatctttttctggaacagcgaagtccccctccaccaccaccgcctcctacccttcttaacagtagccatcctgttcctactcagagtcctctaccattcactcagccaggaccagcatttaatcagcaaggacagcagccagtgttcccaagagagcggcccgtacgaccagccttgcagcctccaggtccggtggggattctgcactttagccagcctgggtcggcaaccacacggcccttcattcctcctagacagccgttcctgccaggcccaggacagccgtttctgcccacacacacacagcccaacctgcaggggccgttgcatcctccattgccccctccgcatcagcctcagcctcagcaacctcagcaacagcccccgccacagcaccagcctccgcaccagcccccgcaccagcccccgccccagcaccagcccccaccccagcacccaccacagcacccgccgcagcaccagcaccaccaccaccaccaccacctgtccgtcccgccccctcctttgatgccgatgtctcagccacagttccggcctcacgtacagaccgctcagcctcaggccagcagcagccggatgcagtgcccccagcgccaggggctccggcataatacaacttctcagaatgtaagcaagcggcccatgcagcaaatgcagcccactgcgccaaggaacagcaatttgcgtgaattacccatagcgccgtcacacgtgatagaaatgagcagcagccgctgctctgccacgccctcagcacaagtgaaacctatcgtcagcgcgtcaccaccctcgcgggccgtggcgggttccagaagctcacagggaaagacggaagtgaaagtcaagccagctagccctgtggctcaacctaaagaagaggcaaaaacagaaacagagtttcctgatgaagatgaggaaacaaggttatatcgcttaaagatagaagaacagaaacgcctaagagaagaaatcctgaaacagaaggagttacggcggcagcagcaggctggtgccaggaagaaggagctgctggagagactcgcgcagcaacagcagcagctgtacgctcccccacccccagcagagcaggaagagcaggcactgtcaccatcacccaccaacggtaacccactgttgccctttccaggtgcacaggtcagacaaaatgtgaagaacagacttcttgttaaaaaccaggatgtcagtatttcaaacgttcagcccaaaacatccaattttgtaccatccagtgccaacatgcagtatcaaggacaacagatgaaagcactgaaacatttgagacagaccagaacagttcctcaaagtcagactcagccgctgcataaagtgctcccgatcaaacctgcagatgtggaggagccagctgtcccccagactcctcgagtggcgtccatccagggccggccccaggacacaaagcctggcgtgaaaaggactgtcacgcacaggacaaacagtggtggtggagacgggccccacatcagctccaaggtcagggtgattaagctgtcaggtgggcagggaggagagagcgatggcttttttcacccagaaggccagccccagcggcttccccagcctccggaagtgggaccacagcctgcccgcaaggtgacgctgaccagggggggcctccagcagcccccacatctgccagcggggccccacgcacactcgcctgtccctccagggatcaaaagcatccaaggaattcacccggcgaagaaggccatcatgcacggacgaggcagaggagtggccggtcccatgggccgggggcgcctgatgccaaacaagcagaacctgcgggtggtggagtgcaagccccagccctgcgtggtgtctgtggaggggctgtcctcgtccaccacggatgcccagctgaagagcctgctgatgtcagtgggacccattcaggtagccgcctgggggtggcatctgtgccacgggtagttgtgtcccaagacaaaatcatttcttgatttaaaacacagtgccctttgtgttggctacttcatattaaaataatacttgggaagtaagacaaataacctgttgtgcatacttagtatcagaacatttgcctcaaacgtttattttgaaattttcagattcttagttataaattttaagaaataaataccccagctgaacagat

SEQ ID NO: 177710 - DNA, 10149 bp, Homo sapiens
  Payload ID: 14873
  Gene Symbol: RBM33
  Gene Name: RNA binding motif protein 33
  Uniprot ID: Q96EV2
  ENST ID: ENST00000401878
  CDS Start-End: 199-3711
atgttgcggtagtttgttgttttcttcctgcggaggcgaagggccagctgtggaccgcgaagcgcccggcttcgcctctgcctcctgcagccccctcccttctctgtcctccgtcacccgtacccgggcccggaccaggcacgtcggcccaccagctggcttggtgggggaggctgaaggccgggccccgcgagtgccatggcggccgccctgggagcgagcggaggagcaggcgccggagatgatgactttgaccagtttgataagcctggcgcggaacggtcgtggagaagaagagctgctgatgaggactgggacagtgaacttgaagatgatttacttggagaagatttgctatctggcaaaaagaatcagtcggatttgtcagatgaagagctaaatgatgatcttttgcagagtgataatgaagatgaagaaaatttcagttctcagggtgttacaattagtctgaatgctacatctggcatggttacatcatttgaactctctgacaacactaacgaccaatctggagaacaggaatctgagtatgaacaagaacaaggagaggatgaactggtttatcacaaatctgatggatcagaattgtatactcaagagtacccagaagaaggacagtatgaaggccacgaagctgagttgacagaagaccaaatagaatatgtggaagagccagaggaggagcagctttacactgatgaagtgttagacatcgagatcaatgaacctttagatgaatttacaggaggtatggaaacattggaacttcaaaaggacatcaaagaagaatcagatgaagaagaagaagatgatgaagaatctggacgattacgtttcaaaactgaaaggaaagaaggaacaattattaggctctcagatgtaactagagagagaaggaacattccagaaactttggagctttcagcagaggccaaggcagcattgcttgaatttgaagaaagggagcgacagcataaacaaggacgctacagctccaggcggggaggacggcgaggaggtccgctgatgtgtcgtggtgtgggggaccagaggagagagagcaccgagaggggcaggatgaaggaccacagacctgcgctgcttcctacacagcctcctgtcgtgccccaggctccccctccaccgccaccgccgcctcagcagcagccgatcagaagcctgttccagccgcagccgctgcagccgctgcttccggtgcagcacccgcaccacccatccccgcctcagggaatgcacatgcctccccagctagagaccccaaggatgatgatgaccccgccacccgtgactccacagcagcccaagaacatacacatcaacccgcacttcaaagggacggtggtcacgcctgttcaagtgcccttgctaccagttccgagccagccgagacctgccgtgggaccccagagattcccaggccctccagaatttccacagcatacacctggacctgttcccaacagtttcagccagcccccacgactccctctccaggaccagtggagagccccacccccgcctcaggatcgagaccctttcttcttaggagtttcaggtgaaccaagattcccgagccatctttttctggaacagcgaagtccccctccaccaccaccgcctcctacccttcttaacagtagccatcctgttcctactcagagtcctctaccattcactcagccaggaccagcatttaatcagcaaggacagcagccagtgttcccaagagagcggcccgtacgaccagccttgcagcctccaggtccggtggggattctgcactttagccagcctgggtcggcaaccacacggcccttcattcctcctagacagccgttcctgccaggcccaggacagccgtttctgcccacacacacacagcccaacctgcaggggccgttgcatcctccattgccccctccgcatcagcctcagcctcagcaacctcagcaacagcccccgccacagcaccagcctccgcaccagcccccgcaccagcccccgccccagcaccagcccccaccccagcacccaccacagcacccgccgcagcaccagcaccaccaccaccaccaccacctgtccgtcccgccccctcctttgatgccgatgtctcagccacagttccggcctcacgtacagaccgctcagcctcaggccagcagcagccggatgcagtgcccccagcgccaggggctccggcataatacaacttctcagaatgtaagcaagcggcccatgcagcaaatgcagcccactgcgccaaggaacagcaatttgcgtgaattacccatagcgccgtcacacgtgatagaaatgagcagcagccgctgctctgccacgccctcagcacaagtgaaacctatcgtcagcgcgtcaccaccctcgcgggccgtggcgggttccagaagctcacagggaaagacggaagtgaaagtcaagccagctagccctgtggctcaacctaaagaagaggcaaaaacagaaacagagtttcctgatgaagatgaggaaacaaggttatatcgcttaaagatagaagaacagaaacgcctaagagaagaaatcctgaaacagaaggagttacggcggcagcagcaggctggtgccaggaagaaggagctgctggagagactcgcgcagcaacagcagcagctgtacgctcccccacccccagcagagcaggaagagcaggcactgtcaccatcacccaccaacggtaacccactgttgccctttccaggtgcacaggtcagacaaaatgtgaagaacagacttcttgttaaaaaccaggatgtcagtatttcaaacgttcagcccaaaacatccaattttgtaccatccagtgccaacatgcagtatcaaggacaacagatgaaagcactgaaacatttgagacagaccagaacagttcctcaaagtcagactcagccgctgcataaagtgctcccgatcaaacctgcagatgtggaggagccagctgtcccccagactcctcgagtggcgtccatccagggccggccccaggacacaaagcctggcgtgaaaaggactgtcacgcacaggacaaacagtggtggtggagacgggccccacatcagctccaaggtcagggtgattaagctgtcaggtgggggaggagagagcgatggcttttttcacccagaaggccagccccagcggcttccccagcctccggaagtgggaccacagcctgcccgcaaggtgacgctgaccagggggggcctccagcagcccccacatctgccagcggggccccacgcacactcgcctgtccctccagggatcaaaagcatccaaggaattcacccggcgaagaaggccatcatgcacggacgaggcagaggagtggccggtcccatgggccgggggcgcctgatgccaaacaagcagaacctgcgggtggtggagtgcaagccccagccctgcgtggtgtctgtggaggggctgtcctcgtccaccacggatgcccagctgaagagcctgctgatgtcagtgggacccattcagagtttacagatgcttcctcagcaacggaaagccatagctaagttcaaggagccagcccacgcattagcatttcagcagaaattccacaggcatatgatagatttgtcccacataaatgtggccctgatcgtggagtgagtcctaacaagagagcctgaccttaggctgtacacacactgtggaatttcttcaagggagctgccggccggcgcagaacccccaggagcacaggtctctccgggccgctgtcctgcgtaactgttctccagagcgccagccagccacgggcctgattccagaggagccgaactgacaggacacagcaggctggagttggtgttagattgcttcacattctcttgtcaccaccaagaactccaagtttttcgttttgttttgttttcaaagtgcttacaatgcatgtagacattgttctttgtggtctgactctatgatcgatcacagtgacttagattcaggaaagaacattaacgtcacaagttctaagtagttttcacagcaaagaatatttgataatggttgcacttatcttcagtgcaggttagaagagtcttctcaaccaagcttaactcgagttgtcttctcagccctcaaaaggctcttgtacaaaatgtagattaaaatttgggtgattgttgattgacctttgcataccctggaaagccagggtgtgagtggggtggttgggagtggtgccagttgaacagcagattctgcttcttgtcactgtttcaaaagcgtcaactctgtgttcctagtttcgatgaactccccattcatttttaacacacttcccagataaggcaatgtgctggacaggcacacggcatggccctcggctagagcagggtctgtgatggcctcacctggcagccctctggcctagttcccaccacacatgaggtggtggaatggcctgaaggtggaacagacctgtttttttcctttttaaatgcagtaaggtggcctgtttatcactggctctgtgatacatgacattctttgggaatttggtggccactgcttcagtcacctctgtttttctgaaggctgttccagcagggctgccctgttcatcagcggatgttcactctggcctgccgttccccgtggcatgcggggtgagggtggctttcttccagccccaaatgagacgagtctgtgtcatcattgaaactgcttttcgtaattgcgggtaggttcctgtaggtgagacatattctccataaagctactgtagtagaattcattctgggcaaacactgaaaaaagtgccttacagtatttctgctcatgaaagagtttcactattttggatatattctaaagtggacctgagctatttgagcaaataatgatagggcatactcagacattttagctaccttttatacctacgatttcatgtcacatttactaatagaattaagggaaatagaagcccgttctttcttactgcccctggagggagcatggcgctagggctctcagcctcctagaaggaagggactaaggagacgggcacagacttgcgtcatctcgtttccacagttgacgttttatattactttctcaaattaagttaccaaaacaaactgaagagctgaagcaggtcttccagaccctgcgatcctttctgtagcagtgattctaaagtggcgtttgctgtgtgcttgagagtaacactgcacgctgcaggggctgttgcagcagtcagtcccaggaagccacagcgcttgtaggatctgctaggaccctgcagctgtgctgccgccacctctgctccagagtgtcccagccaaccctcggaagatgggattgccagtcagccctgcctcaccatgcctgcaggaggctgtccagggagcaggtctgtgtgcccatcagcaggttcccatggctgtcactgcccactcatttccacagttagatacggatgtgttgatgtatttcgtctagtttatttggctcagtccacagctgcgttggagtggtgactttggtagcccttgagctctaattaagagagatccaaaccactcagtacccactgggcagtgggaaggcctaccgacttactttatcattgagggcttactgatacaatgaaatgagtttcatgactttttttttttttaaacactttttgaaatagagtgtgctgtgtttaaaaccaaaaatatgcatgttgtctctgaaaagtaggcattgaaacagacttttttgtagtcagtgttaataaaacggatcctgtttgggccttcattgttaaggtggacttcatggccactggaaggtctgttttggtgttacctgagtgtgacacaggccctggggtgtgcgtgtttctctaactgtctacacgtgcacataggcagactttctcatagaatgttcttgaaaggtgattggcaaagtcatgcaggcccgccttaaagcgctgattagaacagtccaacacagtccgacctcactcaatacccacaaccatcgaaaatggattcttagtaccagacaatcccagtaatgaaggtttagtttccttgaaggaaactacagaaaaggaaagaagcagaatgagaaaggaatggtacttaggtgtttggtatgctgctcacgtgaagtcagcccacaccagccaaaccctcgtggaagatctgctgcaaccattatctttgttcttgagttcatcatgcatttaaaatgagatgcaagagcatttagcataccatgtaaatatggaccttttaaaattaaaatactattggaagtgctttcaactcagccacatcttagctattagttctttgtgttgtcttatcaaagtttaatggatacagttccacagttgttgatgtgtttgtgtgtatattcgatttttataaagatggtagtaagtcaatacatttatcctgatctgtgtattatttgttcacaaattcaagaagcttaaaggtcgtaaatatcagtatctcataaggtaaaccaatagctgattatgtggagccaagttacttcttttctttttgcattatcttgttttggttttgtgctgtaatagaagttcacttagctactttagataaccttgcattaccactggtctggccacgtttgttaaatccttatactgatattcttctaaagagtaaatctcatcatttttccagacaaattttgaggggtttctctgttttgtggacaggcagcagcctccgtaggcacccgcaccctgccttgctggaggagatgggatggggcgggaggtggcttcaccataactatttttaatatgggtcattcttagcatgatttgtaaaggtctcaggcaaacagttgttgaagcttgcttctgtggcatttctgaattgtggcagagcttagatcctgcacccaggggtctttttttcaaacagcatcttgctcagttctgtgaacagaaggctttgttactgaaggaggtggaagaggagtttagggtgaaaaggaggaagggatggacagacccaggtgaggagaggcctggggattggggaagctgtcatctcagtgttaataatcaacttgcttctaacacactggcttatcaggggaggtcatccagtccggtcggtggagttgagagcccttgggccagggtgtttggcggcacaggggcatccgctggatggcctggaggagtgggggaggggaacgtcttcactgggtggtgatcagctgggacagttcaggtagggcaggtgagggacccccgaggccctggagccttgtcctgggatgggtttgaagaactcatcactcatcacttgttttcttttggcttttgttgtttttgttttgttctgtttgttttgttttgtatttctttgttattttattgggaaggtaagcggaatgtgctcatagaccatcagacgcttgtcgaaggcaggtcctagtcatgtaattgcacaggacaaggaggtcagcgtgtgtgatggcagcatgctgtgccggcacatcgtggagtcctagaaactctctagtccctgcggctgttcccctcctctgctctctccctggagaggactgccagctcttaagaaacattcctggtgcggtgtctgcagtgccctttgtgggtgacttcaggcttcccgctttcgtggtgctcttcctgggattcgtttttttattaccctccctccctacttgtaggcctcagctatggcttgacgtaatcgcttttagacccaggttggcttcccttcattaagctatgatcctccaccccattttttttttttttaatttggagtgggagggaggggggtgggcgagagaaagctcgaaaggtattattggtttttcaaaaaattagaggtgacgattctaccagggagttgactgataggagtgtgtgcagggcaggaaaggttcggaggcacccgactaccaccactcggaaagccgctagtccagatcgactagggagaggcttagatactttagtgtatttaaagagcatttcagttaactttttcagctatttttaaagtttgtgaatggagtgttattttggacattcttaaatatgaattctccaaaggcatttagccttgacttaatattaaatcctaaggattttatgtaaggtttttttgcaacctatttaattttttttaaatgcctaacttctgaggtgcataagcccgtggtttgtgtactggaactaaagcggaactcactgattcatattggatccccaggtataccttctgctggtagcatatggctggaaaaggccgtttgcctcacacattgtaacctgccttggctagaaaatgcttttaatgtctcaactctctcttttctgtgtcatgttttggtaggaaatctttaagattggcggacggaacaggtattttagtgagacacttctgagtacttgctttttcctttgacttctaaccaactaaaagagaaggaggtcttcatgttgatattttgcttggttttattttactgattttaaaaggtatatagaaaaatgtaggcctttaaaaagaaacagcatgtagttttttattttaatatgttccatagagtggataggcagacaggtactattgtaatgtattctgtatttaataatttaatatactctagaaagtagacctcatgcattcttttagcatgattttcttttaaactgcttttcattttaagggcacccgtggcggaagctggttttgcaaggactgtgtaagctgtatgcgttctagctgtatgcgttctgtagtcttttcttaggtgggtaacattttcaataacgcgcgcacagcacacaggggtgccctgagccgaaggagcaaaaaaagccaccgctcgtttctataatccagctttgcttttcacaggcgtgggatccaggatggtgtcctctgtgaggacttgaactctggggctttaattccactgtttaattttcaggtaccacagcagcaaagcacagagtgtgacctttttcatgtctgagctgattctgtttgctccacgtgcctgcttcttgctactgttcatttagtaatgggatcacctcaccatgccatgctctgggctctccctctctgtccatttctgttttgctttcctggctaaacccatctaccattcttaacactggtagctcctgtcccattccaagactcactctctcagaccttcccatctccctggctttccatgctcctctccctccacctcctggcttcaactgggtgagggccgtattcctgccactctgctccgcctcagccttgagaactccacgtgggctgggtgggaaggtgctgacgattttcacactgtgtttaccactccatcacctctcaacctttgcttcgacaggtcttcactcacgatttattcctccaggtctttgattggagagagtaactttttaattctgttgttttgcagtttggctctgtaggagtgagtggcgattcaaagatgccggcgtcccgcagtgtgcggttcgtgcccttaaccacccgcttctttgtttcccgcccctctgctttcgcaggagctcttgtgcttgagttcagtgttagtggtagcgtggctcactccacttggaggtggcggccgtctgaccgtgtgttactgctttgccgacggggcctcccggccctgatgcgtgtacactctgcgggctgcaccgggtggctctggttgggggcgaagctgtgttgactgggagagcgttggaaattgagacatggagagatgacgggagtgcgtttctctgggtttgatctccatcctgttttctcccagacacaccacacctaccttgggggaatgccgttgcctgttccacccctttgttcacttcgcgttaactgctgtggtaactttttcaggatctgtgtgaagaatggtaatgacgtagttgaaaggaaaatgtactgttgtgtgtttcatttgtgtgatttcgtaccaaaaaaatgtgtttgaactatattgtatgtaatttggaagtcgtgttaataaaaccctgcagtttcc

SEQ ID NO: 177711 - DNA, 1027 bp, Homo sapiens
  Payload ID: 14873
  Gene Symbol: RBM33
  Gene Name: RNA binding motif protein 33
  ENST ID: ENST00000440108
  CDS Start-End: 1-1027
caatctggagaacaggaatctgagtatgaacaagaacaaggagaggatgaactggtttatcacaaatctgatggatcagaattgtatactcaagagtacccagaagaaggacagtatgaaggccacgaagctgagttgacagaagaccaaatagaatatgtggaagagccagaggaggagcagctttacactgatgaagtgttagacatcgagatcaatgaacctttagatgaatttacaggaggtatggaaacattggaacttcaaaaggacatcaaagaagaatcagatgaagaagaagaagatgatgaagaatctggacgattacgtttcaaaactgaaaggaaagaaggaacaattattaggctctcagatgtaactagagagagaaggaacattccagaaactttggagctttcagcagaggccaaggcagcattgcttgaatttgaagaaagggagcgacagcataaacaaggacgctacagctccaggcggggaggacggcgaggaggtccgctgatgtgtcgtggtgtgggggaccagaggagagagagcaccgagaggggcaggatgaaggaccacagacctgcgctgcttcctacacagcctcctgtcgtgactcattctccaaggttaattcctccacagccccaggctccccctccaccgccaccgccgcctcagcagcagccgatcagaagcctgttccagccgcagccgctgcagccgctgcttccggtgcagcacccgcaccacccatccccgcctcagggaatgcacatgcctccccagctagagaccccaaggatgatgatgaccccgccacccgtgactccacagcagcccaagaacatacacatcaacccgcacttcaaagggacggtggtcacgcctgttcaagtgcccttgctaccagttccgagccagccgagacctgccgtgggaccccagagattcccaggccctccagaatttccacagcatacacctggacctgttcccaacagtttcagccagcccccac

SEQ ID NO: 177712 - DNA, 547 bp, Homo sapiens
  Payload ID: 14873
  Gene Symbol: RBM33
  Gene Name: RNA binding motif protein 33
  ENST ID: ENST00000438356
  CDS Start-End: 464-547
cttcccacatgctttcagaagtggagcatgcctcatttctttctcttgcttttcatcattgtccatatcaggtcattttcagtcaggcacaggaagtgcagttttccactgtagtttggataggttcagtactctaaaataaaaccagtcactgcagatagatttccattgcagaagattcttccataaagaagtgatctgtagaacacttgcttctttatcccaccatatagtcttattagttgtgcagggaggagagagcgatggcttttttcacccagaaggccagccccagcggcttccccagcctccggaagtgggaccacagcctgcccgcaaggtgacgctgaccagggggggcctccagcagcccccacatctgccagcggggccccacgcacactcgcctgtccctccagggatcaaaagcatccaaggaattcacccggcgaagaaggccatcatgcacggacgaggcagaggagtggccggtcccatgggccgggggcgcctgatgccaaacaagcagaacctgcgggtggtggag

SEQ ID NO: 177713 - DNA, 2054 bp, Homo sapiens
  Payload ID: 14874
  Gene Symbol: RBM34
  Gene Name: RNA binding motif protein 34
  Uniprot ID: P42696
  ENST ID: ENST00000408888
  CDS Start-End: 232-1524
gcttcaaccactcccagaagacgtccttcactcccaaaatgaggcttttctgaaacggcgaggaccaccaaccgacggcgacaaacctgctccctcacccagcgcctcccttcgccgccgcccggcggccgactgccggaggggagggggcgtggccagagagcggaagtgcccggaacccggaagtgcgagctggcgcgcagctgcagtctgggagtctttggagtaagaatggccttggaagggatgagcaaacggaagagaaagagaagtgtccaggagggagagaatcctgacgacggcgttcgcgggagtccgccggaagactacaggcttggacaggtcgccagtagcttatttcgcggcgaacaccattccagaggtggcaccggtcggctggcgtccctcttcagttctctggagccccagattcaacccgtgtacgtgcctgtgcctaaacaaaccatcaaaaaaacgaaacggaatgaggaggaagaaagtacatcccagattgaaagaccactttcgcaagaacctgccaaaaaagtgaaagcgaagaagaaacacactaacgcagaaaaaaagttggcagacagggaaagcgctctagcgagtgctgatttagaagaagaaattcaccagaaacaagggcagaaaaggaaaaattctcaacctggtgttaaagtagcagatagaaaaatacttgatgacacagaagacacagttgtcagtcaaagaaagaaaattcaaatcaaccaagaagaagagagattaaagaatgagagaactgtgtttgttgggaatttgcctgttacatgtaataagaagaagctgaagtcgttttttaaagagtatggacaaatagaatctgtacgatttcgttctctgattccagcagagggaacgctatccaaaaagttggcagcaataaaacgtaaaattcatcctgatcagaaaaatattaatgcctatgttgtgtttaaggaggagagtgctgccacgcaagcattgaaaagaaatggggcccagattgcagatggatttcgtattagagttgatctcgcatctgagacctcatctagagacaagagatcggtttttgtggggaatctcccttataaagttgaagaatctgccattgagaagcactttctggactgtggaagtatcatggccgtgaggattgtgagagacaaaatgacaggcatcggcaaagggtttggctatgtgctctttgagaatacagattctgttcatcttgctctgaaattaaataattctgaactcatggggagaaaactcagagtcatgcgttctgttaataaagaaaaatttaaacaacaaaattcaaatccacgattgaagaatgtcagtaaacctaagcagggacttaattttacttccaaaactgcagaaggacatcctaaaagcttatttattggagaaaaagctgttctccttaaaacgaagaagaaaggacagaagaaaagtggacgccctaagaaacagagaaaacagaaataacaaccaggaactgctttttcttttcctgctgagtactgctaataaaagtgctattatctgctgatagcatcgtctgctattcatgtgttgagttttatacttctttatggatggtgtatgtgaaatgtggagacttccacattctcagtttattcacattgtgatactacctttgaaggtttttttgtttttgttttgttttttgagatggagtttggctgttgtctcccaggctggagtgcagtggcgtgatcttggctcactgcaacctctgccttctgggttcaagcgcttctcctgcctcagcctcccaagtagctgggattacaggcgcctgccaccacgcctggctaattttttgtatttttagtagagacggggtttcaccatgttggccaggctggtctcgaactcctgacctcaggtgatccacctgccttggcctctcaaagtgctgggattacaggcgtgagtcactgcacccaagcctcctttctcttttgcctattaaacctctgctcttaacctta

SEQ ID NO: 177714 - DNA, 1273 bp, Homo sapiens
  Payload ID: 14874
  Gene Symbol: RBM34
  Gene Name: RNA binding motif protein 34
  ENST ID: ENST00000447801
  CDS Start-End: 1-1227
ttggaagggatgagcaaacggaagagaaagagaagtgtccaggagggagagaatcctgacgacggcgttcgcgggagtccgccggaagactacaggcttggacaggtcgccagtagcttatttcgcggcgaacaccattccagaggtggcaccggtcggctggcgtccctcttcagttctctggagccccagattcaacccgtgtacgtgcctgtgcctaaacaaaccatcaaaaaaacgaaacggaatgaggaggaagaaagtacatcccagattgaaagaccactttcgcaagaacctgccaaaaaagtgaaagcgaagaagaaacacactaacgcagaaaaaaagttggcagacagggaaagcgctctagcgagtgctgatttagaagaagaaattcaccagaaacaagggcagaaaaggaaaaattctcaacctggtgttaaagtagcagatagaaaaatacttgatgacacagaagacacagttgtcagtcaaagaaagaaaattcaaatcaaccaagaagaagagagattaaagaatgagagaactgtgtttgttgggaatttgcctgttacatgtaataagaagattccagcagagggaacgctatccaaaaagttggcagcaataaaacgtaaaattcatcctgatcagaaaaatattaatgcctatgttgtgtttaaggaggagagtgctgccacgcaagcattgaaaagaaatggggcccagattgcagatggatttcgtattagagttgatctcgcatctgagacctcatctagagacaagagatcggtttttgtggggaatctcccttataaagttgaagaatctgccattgagaagcactttctggactgtggaagtatcatggccgtgaggattgtgagagacaaaatgacaggcatcggcaaagggtttggctatgtgctctttgagaatacagattctgttcatcttgctctgaaattaaataattctgaactcatggggagaaaactcagagtcatgcgttctgttaataaagaaaaatttaaacaacaaaattcaaatccacgattgaagaatgtcagtaaacctaagcagggacttaattttacttccaaaactgcagaaggacatcctaaaagcttatttattggagaaaaagctgttctccttaaaacgaagaagaaaggacagaagaaaagtggacgccctaagaaacagagaaaacagaaataacaaccaggaactgctttttcttttcctgctgagtactgctaataaa

SEQ ID NO: 177715 - DNA, 667 bp, Homo sapiens
  Payload ID: 14874
  Gene Symbol: RBM34
  Gene Name: RNA binding motif protein 34
  ENST ID: ENST00000429912
  CDS Start-End: 33-667
gcagctgcagtctgggagtctttggagtaagaatggccttggaagggatgagcaaacggaagagaaagagaagtgtccaggagggagagaatcctgacgacggcgttcgcgggagtccgccggaagactacaggcttggacaggtcgccagtagcttatttcgcggcgaacaccattccagaggtggcaccggtcggctggcgtccctcttcagttctctggagccccagattcaacccgtgtacgtgcctgtgcctaaacaaaccatcaaaaaaacgaaacggaatgaggaggaagaaagtacatcccagattgaaagaccactttcgcaagaacctgccaaaaaagtgaaagcgaagaagaaacacactaacgcagaaaaaaagttggcagacagttctcctttcagattgatgctcagaccttgcttatccatatccagcaatactttatattgtatttaccgtttcacaatttacttttgggaaagcgctctagcgagtgctgatttagaagaagaaattcaccagaaacaagggcagaaaaggaaaaattctcaacctggtgttaaagtagcagatagaaaaatacttgatgacacagaagacacagttgtcagtcaaagaaagaaaattcaaatcaaccaagaagaagagagattaaagaa

SEQ ID NO: 177716 - DNA, 882 bp, Homo sapiens
  Payload ID: 14874
  Gene Symbol: RBM34
  Gene Name: RNA binding motif protein 34
  ENST ID: ENST00000474086
  CDS Start-End: 1-260
gagtaagaatggccttggaagggatgagcaaacggaagagaaagagaagtgtccaggagggagagaatcctgacgacggcgttcgcgggagtccgccggaagactacaggcttggacaggtcgccagtagcttatttcgcggcgaacaccattccagaggtggcaccggtcggctggcgtccctcttcagttctctggagccccagattcaacccgtgtacgtgcctgtgcctaaaggaaagcgctctagcgagtgctgatttagaagaagaaattcaccagaaacaagggcagaaaaggaaaaattctcaacctggtgttaaagtagcagatagaaaaatacttgatgacacagaagacacagttgtcagtcaaagaaagaaaattcaaatcaaccaagaagaagagagattaaagaatgagagaactgtgtttgttgggaatttgcctgttacatgtaataagaagaagctgaagtcgttttttaaagagtatggacaaatagaatctgtacgatttcgttctctgattccagcagagggaacgctatccaaaaagttggcagcaataaaacgtaaaattcatcctgatcagaaaaatattaatgcctatgttgtgtttaaggaggagagtgctgccacgcaagcattgaaaagaaatggggcccagattgcagatggatttcgtattagagttgatctcgcatctgagacctcatctagagacaagagatcggtttttgtggggaatctcccttataaagttgaagaatctgccattgagaagcactttctggactgtggaagtatcatggccgtgaggattgtgagagacaaaatgacaggcatcggcaaagggtttggctatgtgctctttgaggta

SEQ ID NO: 177717 - DNA, 852 bp, Homo sapiens
  Payload ID: 14875
  Gene Symbol: RBM38
  Gene Name: RNA binding motif protein 38
  ENST ID: ENST00000342690
  CDS Start-End: 130-363
cgggacgggcgccggagtggtcgggcctggcggctggacgggcgcccctcgctgccccgcgcgctccccgccgccccccatgagcgcagccccgcgcggcccgggtccgtaggcggcggggcgccccccatgctgctgcagcccgcgccgtgcgccccgagcgcgggcttcccgcggcccctggccgcccccggcgccatgcacggctcgcagaaggacaccacgttcaccaagatcttcgtgggcggcctgccgtaccacactaccgacgcctcgctcaggaagtacttcgagggcttcggcgacatcgaggaggccgtggtcatcaccgaccgccagacgggggattatttttgtccttgaaggccacatttcccaggccttgaactttgacgggaggagctggaatccaggaggcatctttgtgggagagccccaggtgaccatggccgaccgggcggcagctgagagggcttgcaaagacccgaaccccatcatcgacggccgcaaggccaacgtgaacctggcatatctgggcgccaagccgcggagcctccagacgggctttgccattggggtgcagcagctgcaccccaccttgatccagcggacttacgggctgaccccgcactacatctacccaccagccatcgtgcagcccagcgtggtgatcccagccgcccctgtcccgtcgctgtcctcgccctacattgagtacacgccggccagcccggcctacgcccagtacccaccggccacctatgaccagtacccatacgccgcctcgcctgccacggctgccagcttcgtgggctacagctaccctgccgccgtgccccaggccctctcagc

SEQ ID NO: 177718 - DNA, 2193 bp, Homo sapiens
  Payload ID: 14875
  Gene Symbol: RBM38
  Gene Name: RNA binding motif protein 38
  ENST ID: ENST00000344785
  CDS Start-End: 15-386
ccgcccccggcgccatgcacggctcgcagaaggacaccacgttcaccaagatcttcgtgggcggcctgccgtaccacactaccgacgcctcgctcaggaagtacttcgagggcttcggcgacatcgaggaggccgtggtcatcaccgaccgccagacgggcaagtcccgcggctacggcttcgtgaccatggccgaccgggcggcagctgagagggcttgcaaagacccgaaccccatcatcgacggccgcaaggccaacgtgaacctggcatatctgggcgccaagccgcggagcctccagacgggctttgccattggggtgcagcagctgcaccccaccttgatccagcggacttacggaggcgactttatgttcagaaaatgagtcctcctgggccgtggctgaccccgcactacatctacccaccagccatcgtgcagcccagcgtggtgatcccagccgcccctgtcccgtcgctgtcctcgccctacattgagtacacgccggccagcccggcctacgcccagtacccaccggccacctatgaccagtacccatacgccgcctcgcctgccacggctgccagcttcgtgggctacagctaccctgccgccgtgccccaggccctctcagccgcagcacccgcgggcaccactttcgtgcagtaccaggcgccgcagctgcagcctgacaggatgcagtgaggggcgttcctgccccgaggactgtggcattgtcaccttcacagcagacagagctgccaggccatgatgggctggcgacagcccggctgagcttcagtgaggtgccaccagcacccgtgcctccgaagaccgctcgggcattccgcctgcgccctgggacagcggagagacggcttctctttaatctaggtcccattgtgtcttgagggaggactttaagaatgactgagaactatttaaagacgcaatcccaggttccttgcacaccatggcagcctctccttgcaccttctcctgcctctccacactccaggttccctcaggcttgtgtccccactgctgcatcgtggcggggtgtcacagaccctctgcagcccctggctgccctggactgtgcagagatgcctgactccagggaaacctgaaagcaagaagttaatggactgtttattgtaacttgatcctcccgagctgtgagcgcagtctgaggtgtgaggacacggcctcctgttggagtcccattttctccatcagggcacgtgggcggcttcctcaagcccggaggagctcccaggcgcacaggggccgccggtaacaggggccgccggccaaaggcccctttccagtcatagcactgaagttgcaacttttttcttgtaattgttttgctactaagataatttcagaagttcagtctattttttcagcggatactgccgccaccaagaatccaaaacctatttttgacttggagagacttgcttttgttggttccgcccgtggagacgacgatagtgtttctgtataataaagtgtctgccggctcgcgggccaggatcctctcggtgggatgggcaccacagacaggaggcccctcaggcccgtgcgggccactgtctgctgccgcctgccggggtggcagagtgagttgtctcaggaccccgtcactgcgacgttgacactcctctcccttcccttcctccccaactccccaaacactgtggaaggggagaaggaagtgatccacagcattcaggccacttggggtctagaccatggtggtgccagcctggggggggcagtggccctcagctctgcccgctggagcggttgagtgcagaagggtgcgcctcttccctctacccccgcaccacctgctgtgtgccagcctgagacggttcctgcctgtcttgggggttggtggagggtggaggcagttctgccagccgtggcagggctgctatggggcatccagggctgtgggggtctggaggaggggacatgaggtgagaggtatcctggccgagggcggggggcagcggggggtctccctccggacctacctcagggagctgagcgtgcaggcgctccagggcaggcctgggacagagtcaaggctcagagaataaaggtagctaatctcatcataatatttttattagaatgttctgatgataaaaataaaacttgttttctttaaagaaaaa

SEQ ID NO: 177719 - DNA, 2382 bp, Homo sapiens
  Payload ID: 14875
  Gene Symbol: RBM38
  Gene Name: RNA binding motif protein 38
  Uniprot ID: Q9H0Z9
  ENST ID: ENST00000356208
  CDS Start-End: 176-895
gcagcgccggtcgggagcgcagcgcggcgcacgtcggcgcgcacggcgggacgggcgccggagtggtcgggcctggcggctggacgggcgcccctcgctgccccgcgcgctccccgccgccccccatgagcgcagccccgcgcggcccgggtccgtaggcggcggggcgccccccatgctgctgcagcccgcgccgtgcgccccgagcgcgggcttcccgcggcccctggccgcccccggcgccatgcacggctcgcagaaggacaccacgttcaccaagatcttcgtgggcggcctgccgtaccacactaccgacgcctcgctcaggaagtacttcgagggcttcggcgacatcgaggaggccgtggtcatcaccgaccgccagacgggcaagtcccgcggctacggcttcgtgaccatggccgaccgggcggcagctgagagggcttgcaaagacccgaaccccatcatcgacggccgcaaggccaacgtgaacctggcatatctgggcgccaagccgcggagcctccagacgggctttgccattggggtgcagcagctgcaccccaccttgatccagcggacttacgggctgaccccgcactacatctacccaccagccatcgtgcagcccagcgtggtgatcccagccgcccctgtcccgtcgctgtcctcgccctacattgagtacacgccggccagcccggcctacgcccagtacccaccggccacctatgaccagtacccatacgccgcctcgcctgccacggctgccagcttcgtgggctacagctaccctgccgccgtgccccaggccctctcagccgcagcacccgcgggcaccactttcgtgcagtaccaggcgccgcagctgcagcctgacaggatgcagtgaggggcgttcctgccccgaggactgtggcattgtcaccttcacagcagacagagctgccaggccatgatgggctggcgacagcccggctgagcttcagtgaggtgccaccagcacccgtgcctccgaagaccgctcgggcattccgcctgcgccctgggacagcggagagacggcttctctttaatctaggtcccattgtgtcttgagggaggactttaagaatgactgagaactatttaaagacgcaatcccaggttccttgcacaccatggcagcctctccttgcaccttctcctgcctctccacactccaggttccctcaggcttgtgtccccactgctgcatcgtggcggggtgtcacagaccctctgcagcccctggctgccctggactgtgcagagatgcctgactccagggaaacctgaaagcaagaagttaatggactgtttattgtaacttgatcctcccgagctgtgagcgcagtctgaggtgtgaggacacggcctcctgttggagtcccattttctccatcagggcacgtgggcggcttcctcaagcccggaggagctcccaggcgcacaggggccgccggtaacaggggccgccggccaaaggcccctttccagtcatagcactgaagttgcaacttttttcttgtaattgttttgctactaagataatttcagaagttcagtctattttttcagcggatactgccgccaccaagaatccaaaacctatttttgacttggagagacttgcttttgttggttccgcccgtggagacgacgatagtgtttctgtataataaagtgtctgccggctcgcgggccaggatcctctcggtgggatgggcaccacagacaggaggcccctcaggcccgtgcgggccactgtctgctgccgcctgccggggtggcagagtgagttgtctcaggaccccgtcactgcgacgttgacactcctctcccttcccttcctccccaactccccaaacactgtggaaggggagaaggaagtgatccacagcattcaggccacttggggtctagaccatggtggtgccagcctggggggggcagtggccctcagctctgcccgctggagcggttgagtgcagaagggtgcgcctcttccctctacccccgcaccacctgctgtgtgccagcctgagacggttcctgcctgtcttgggggttggtggagggtggaggcagttctgccagccgtggcagggctgctatggggcatccagggctgtgggggtctggaggaggggacatgaggtgagaggtatcctggccgagggcggggggcagcggggggtctccctccggacctacctcagggagctgagcgtgcaggcgctccagggcaggcctgggacagagtcaaggctcagagaataaaggtagctaatctcatcataatatttttattagaatgttctgatgataaaaataaaacttgttttctttaaagaaaaa

SEQ ID NO: 177720 - DNA, 760 bp, Homo sapiens
  Payload ID: 14875
  Gene Symbol: RBM38
  Gene Name: RNA binding motif protein 38
  ENST ID: ENST00000371219
  CDS Start-End: 270-746
ataaacatcagcttaagtaaaaacgtcttgaagacactttcctgcttaccttccaagcatagcgtcgcaaactccttctcagaggaaagtctcggccctcactggtgggcaagtccaggcggccccccaagctcccttcggggttcatttttgccctatccccgcaggggattatttttgtccttgaaggccacatttcccaggccttgaactttgacgggaggagctggaatccaggaggcatctttgtgggagagccccaggtgaccatggccgaccgggcggcagctgagagggcttgcaaagacccgaaccccatcatcgacggccgcaaggccaacgtgaacctggcatatctgggcgccaagccgcggagcctccagacgggctttgccattggggtgcagcagctgcaccccaccttgatccagcggacttacgggctgaccccgcactacatctacccaccagccatcgtgcagcccagcgtggtgatcccagccgcccctgtcccgtcgctgtcctcgccctacattgagtacacgccggccagcccggcctacgcccagtacccaccggccacctatgaccagtacccatacgccgcctcgcctgccacggctgccagcttcgtgggctacagctaccctgccgccgtgccccaggccctctcagccgcagcacccgcgggcaccactttcgtgcagtaccaggcgccgcagctgcagcctgacaggatgcagtgaggggcgttcctgcc

SEQ ID NO: 177721 - DNA, 686 bp, Homo sapiens
  Payload ID: 14875
  Gene Symbol: RBM38
  Gene Name: RNA binding motif protein 38
  Uniprot ID: Q9H0Z9
  ENST ID: ENST00000440234
  CDS Start-End: 155-520
gcgcggcgcacgtcggcgcgcacggcgggacgggcgccggagtggtcgggcctggcggctggacgggcgcccctcgctgccccgcgcgctccccgccgccccccatgagcgcagccccgcgcggcccgggtccgtaggcggcggggcgccccccatgctgctgcagcccgcgccgtgcgccccgagcgcgggcttcccgcggcccctggccgcccccggcgccatgcacggctcgcagaaggacaccacgttcaccaagatcttcgtgggcggcctgccgtaccacactaccgacgcctcgctcaggaagtacttcgagggcttcggcgacatcgaggaggccgtggtcatcaccgaccgccagacgggcaagtcccgcggctacggcttcgtgaccatggccgaccgggcggcagctgagagggcttgcaaagacccgaaccccatcatcgacggccgcaaggccaacgtgaacctggcatatctgggcgccaagccgcggagcctccagacgggctgaccccgcactacatctacccaccagccatcgtgcagcccagcgtggtgatcccagccgcccctgtcccgtcgctgtcctcgccctacattgagtacacgccggccagcccggcctacgcccagtacccaccggccacctatgaccagtacccatacgccgcctcgcc

SEQ ID NO: 177722 - DNA, 2488 bp, Homo sapiens
  Payload ID: 14876
  Gene Symbol: RBM39
  Gene Name: RNA binding motif protein 39
  Uniprot ID: Q14498
  ENST ID: ENST00000253363
  CDS Start-End: 25-1617
ggccggaacaggcgtttagagaaaatggcagacgatattgatattgaagcaatgcttgaggctccttacaagaaggatgagaacaagttgagcagtgccaacggccatgaagaacgtagcaaaaagaggaaaaaaagcaagagcagaagtcgtagtcatgaacgaaagagaagcaaaagtaaggaacggaagcgaagtagagacagagaaaggaaaaagagcaaaagccgtgaaagaaagcgaagtagaagcaaagagaggcgacggagccgctcaagaagtcgagatcgaagatttagaggccgctacagaagtccttactccggaccaaaatttaacagtgccatccgaggaaagattgggttgcctcatagcatcaaattaagcagacgacgttcccgaagcaaaagtccattcagaaaagacaagagccctgtgagagaacctattgataatttaactcctgaggaaagagatgcaaggacagtcttctgtatgcagctggcggcaagaattcgaccaagggatttggaagagtttttctctacagtaggaaaggttcgagatgtgaggatgatttctgacagaaattcaagacgttccaaaggaattgcttatgtggagttcgtcgatgttagctcagtgcctctagcaataggattaactggccaacgagttttaggcgtgccaatcatagtacaggcatcacaggcagaaaaaaacagagctgcagcaatggcaaacaatttacaaaagggaagtgctggacctatgaggctttatgtgggctcattacacttcaacataactgaagatatgcttcgtgggatctttgagccttttggaagaattgaaagtatccagctgatgatggacagtgaaactggtcgatccaagggatatggatttattacattttctgactcagaatgtgccaaaaaggctttggaacaacttaatggatttgaactagcaggaagaccaatgaaagttggtcatgttactgaacgtactgatgcttcgagtgctagttcatttttggacagtgatgaactggaaaggactggaattgatttgggaacaactggtcgtcttcagttaatggcaagacttgcagagggtacaggtttgcagattccgccagcagcacagcaagctctacagatgagtggctctttggcatttggtgctgtggcagaattctcttttgttatagatttgcaaacaagactttcccagcagactgaagcttcagctttagctgcagctgcctctgttcagccacttgcaacacaatgtttccaactctctaacatgtttaaccctcaaacagaagaagaagttggatgggataccgagattaaggatgatgtgattgaagaatgtaataaacatggaggagttattcatatttatgttgacaaaaattcagctcagggcaatgtgtatgtgaagtgcccatcaattgctgcagctattgctgctgtcaatgcattgcatggcaggtggtttgctggtaaaatgataacagcagcatatgtacctcttccaacttaccacaacctgtttcctgattctatgacagcaacacagctactggttccaagtagacgatgaaggaagatatagtcccttatgtatatagctttttttctttcttgagaattcatcttgagttatcttttatttagataaaaataaagaggcaaggatctactgtcatttgtatgcaatttcctgttaccttgaaaaaataaaaatgttaacaggaatgcagtgtgctcattctccctaaatagtaaatcccactgtatacaaaactgttctcttgttctgccttttaaaatgttcatgtagaaaattaatgaactataggaatagctctaggagaacaaatgtgctttctgtaaaaaggcagaccagggatgtaatgtttttaatgtttcagaagcctaactttttacacagtggttacatttcacatttcactaatgttgatatttggctgatggttgagcagtttctgaaatacacatttagtgtatggaaatacaagacagctaaagggctgtttggttagcatctcatcttgcattctgatcaattggcaagaaagggagatttcaaaattatatttcttgatggtatcttttcaattaatgtatctgtaaaagtttctttgtaaatactatgtgttctggtgtgtcttaaaattccaaacaaaatgatccctgcatttcctgaagatgtttaaacgtgagagtctggtaggcaaagcagtctgagaaagaaataggaaatgcagaaataggttttgtctggttgcatataatctttgctctttttaagctctgtgagctctgaaatatatttttgggttacttcagtgtgtttgacaagacagcttgatatttctatcaaacaaatgactttcatattgcaacaatctttgtaagaaccactcaaataaaagtctcttaaaaaggcc

SEQ ID NO: 177723 - DNA, 2792 bp, Homo sapiens
  Payload ID: 14876
  Gene Symbol: RBM39
  Gene Name: RNA binding motif protein 39
  ENST ID: ENST00000338163
  CDS Start-End: 295-1566
gccatttcagggagcttgtcgacgctgtcgcaggggtggatcctgagctgccgaagccgccgtcctgctctcccgcgtgggcttctctaattccattgttttttttagattctctcgggcctagccgtccttggaacccgatattcgggctgggcggttccgcggcctgggcctaggggcttaacagtagcaacagaagcggcggcggcggcagcagcagcagcagcagcagcaatctcttcccgaacacgagcaccacaggcgcccgaaggccggaacaggcgtttagagaaaatggcagacgatattgatattgaagcaatgcttgaggctccttacaagaaggatgagaacaagttgagcagtgccaacggccatgaagaacgtagcaaaaagaggaaaaaaagcaagagcagaagtcgtagtcatgaacgaaagagaagcaaaagtaaggaacggaagcgaagtagagacagagaaaggaaaaagagcaaaagccgtgaaagaaagcgaagtagaagcaaagagaggcgacggagccgctcaagaagtcgagatcgaagatttagaggccgctacagaagtccttactccggaccaaaatttaacagtgccatccgaggaaagattgggttgcctcatagcatcaaattaagcagacgacgttcccgaagcaaaagtccattcagaaaagacaagagccctgtgagagaacctattgataatttaactcctgaggaaagagatgcaaggacagtcttctgtatgcagctggcggcaagaattcgaccaagggatttggaagagtttttctctacagtaggaaaggttcgagatgtgaggatgatttctgacagaaattcaagacgttccaaaggaattgcttatgtggagttcgtcgatgttagctcagtgcctctagcaataggattaactggccaacgagttttaggcgtgccaatcatagtacaggcatcacaggcagaaaaaaacagagctgcagcaatggcaaacaatttacaaaagggaagtgctggacctatgaggctttatgtgggctcattacacttcaacataactgaagatatgcttcgtgggatctttgagccttttggaagaattgaaagtatccagctgatgatggacagtgaaactggtcgatccaagggatatggatttattacattttctgactcagaatgtgccaaaaaggctttggaacaacttaatggatttgaactagcaggaagaccaatgaaagttggtcatgttactgaacgtactgatgcttcgagtgctagttcatttttggacagtgatgaactggaaaggactggaattgatttgggaacaactggtcgtcttcagttaatggcaagacttgcagagggtacaggtttgcagattccgccagcagcacagcaagctctacagatgagtggctctttggcatttggtgctgtggcagatttgcaaacaagactttcccagcagactgaagctttgtttgttattatgttttggaatgaaatttggtcagataatatgattacgcttcagctttagctgcagctgcctctgttcagccacttgcaacacaatgtttccaactctctaacatgtttaaccctcaaacagaagaagaagttggatgggataccgagattaaggatgatgtgattgaagaatgtaataaacatggaggagttattcatatttatgttgacaaaaattcagctcagggcaatgtgtatgtgaagtgcccatcaattgctgcagctattgctgctgtcaatgcattgcatggcaggtggtttgctggtaaaatgataacagcagcatatgtacctcttccaacttaccacaacctgtttcctgattctatgacagcaacacagctactggttccaagtagacgatgaaggaagatatagtcccttatgtatatagctttttttctttcttgagaattcatcttgagttatcttttatttagataaaaataaagaggcaaggatctactgtcatttgtatgcaatttcctgttaccttgaaaaaataaaaatgttaacaggaatgcagtgtgctcattctccctaaatagtaaatcccactgtatacaaaactgttctcttgttctgccttttaaaatgttcatgtagaaaattaatgaactataggaatagctctaggagaacaaatgtgctttctgtaaaaaggcagaccagggatgtaatgtttttaatgtttcagaagcctaactttttacacagtggttacatttcacatttcactaatgttgatatttggctgatggttgagcagtttctgaaatacacatttagtgtatggaaatacaagacagctaaagggctgtttggttagcatctcatcttgcattctgatcaattggcaagaaagggagatttcaaaattatatttcttgatggtatcttttcaattaatgtatctgtaaaagtttctttgtaaatactatgtgttctggtgtgtcttaaaattccaaacaaaatgatccctgcatttcctgaagatgtttaaacgtgagagtctggtaggcaaagcagtctgagaaagaaataggaaatgcagaaataggttttgtctggttgcatataatctttgctctttttaagctctgtgagctctgaaatatatttttgggttacttcagtgtgtttgacaagacagcttgatatttctatcaaacaaatgactttcatattgcaacaatctttgtaagaaccactcaaataaaagtctcttaaaaaggc

SEQ ID NO: 177724 - DNA, 2831 bp, Homo sapiens
  Payload ID: 14876
  Gene Symbol: RBM39
  Gene Name: RNA binding motif protein 39
  Uniprot ID: Q14498
  ENST ID: ENST00000361162
  CDS Start-End: 386-1960
gcgagagcccgtgctgagggctctgtgaggccccgtgtgtttgtgtgtgtgtatgtgtgctggtgaatgtgagtacagggaagcagcggccgccatttcagggagcttgtcgacgctgtcgcaggggtggatcctgagctgccgaagccgccgtcctgctctcccgcgtgggcttctctaattccattgttttttttagattctctcgggcctagccgtccttggaacccgatattcgggctgggcggttccgcggcctgggcctaggggcttaacagtagcaacagaagcggcggcggcggcagcagcagcagcagcagcagcaatctcttcccgaacacgagcaccacaggcgcccgaaggccggaacaggcgtttagagaaaatggcagacgatattgatattgaagcaatgcttgaggctccttacaagaaggatgagaacaagttgagcagtgccaacggccatgaagaacgtagcaaaaagaggaaaaaaagcaagagcagaagtcgtagtcatgaacgaaagagaagcaaaagtaaggaacggaagcgaagtagagacagagaaaggaaaaagagcaaaagccgtgaaagaaagcgaagtagaagcaaagagaggcgacggagccgctcaagaagtcgagatcgaagatttagaggccgctacagaagtccttactccggaccaaaatttaacagtgccatccgaggaaagattgggttgcctcatagcatcaaattaagcagacgacgttcccgaagcaaaagtccattcagaaaagacaagagccctgtgagagaacctattgataatttaactcctgaggaaagagatgcaaggacagtcttctgtatgcagctggcggcaagaattcgaccaagggatttggaagagtttttctctacagtaggaaaggttcgagatgtgaggatgatttctgacagaaattcaagacgttccaaaggaattgcttatgtggagttcgtcgatgttagctcagtgcctctagcaataggattaactggccaacgagttttaggcgtgccaatcatagtacaggcatcacaggcagaaaaaaacagagctgcagcaatggcaaacaatttacaaaagggaagtgctggacctatgaggctttatgtgggctcattacacttcaacataactgaagatatgcttcgtgggatctttgagccttttggaagaattgaaagtatccagctgatgatggacagtgaaactggtcgatccaagggatatggatttattacattttctgactcagaatgtgccaaaaaggctttggaacaacttaatggatttgaactagcaggaagaccaatgaaagttggtcatgttactgaacgtactgatgcttcgagtgctagttcatttttggacagtgatgaactggaaaggactggaattgatttgggaacaactggtcgtcttcagttaatggcaagacttgcagagggtacaggtttgcagattccgccagcagcacagcaagctctacagatgagtggctctttggcatttggtgctgtggcagatttgcaaacaagactttcccagcagactgaagcttcagctttagctgcagctgcctctgttcagccacttgcaacacaatgtttccaactctctaacatgtttaaccctcaaacagaagaagaagttggatgggataccgagattaaggatgatgtgattgaagaatgtaataaacatggaggagttattcatatttatgttgacaaaaattcagctcagggcaatgtgtatgtgaagtgcccatcaattgctgcagctattgctgctgtcaatgcattgcatggcaggtggtttgctggtaaaatgataacagcagcatatgtacctcttccaacttaccacaacctgtttcctgattctatgacagcaacacagctactggttccaagtagacgatgaaggaagatatagtcccttatgtatatagctttttttctttcttgagaattcatcttgagttatcttttatttagataaaaataaagaggcaaggatctactgtcatttgtatgcaatttcctgttaccttgaaaaaataaaaatgttaacaggaatgcagtgtgctcattctccctaaatagtaaatcccactgtatacaaaactgttctcttgttctgccttttaaaatgttcatgtagaaaattaatgaactataggaatagctctaggagaacaaatgtgctttctgtaaaaaggcagaccagggatgtaatgtttttaatgtttcagaagcctaactttttacacagtggttacatttcacatttcactaatgttgatatttggctgatggttgagcagtttctgaaatacacatttagtgtatggaaatacaagacagctaaagggctgtttggttagcatctcatcttgcattctgatcaattggcaagaaagggagatttcaaaattatatttcttgatggtatcttttcaattaatgtatctgtaaaagtttctttgtaaatactatgtgttctggtgtgtcttaaaattccaaacaaaatgatccctgcatttcctgaagatgtttaaacgtgagagtctggtaggcaaagcagtctgagaaagaaataggaaatgcagaaataggttttgtctggttgcatataatctttgctctttttaagctctgtgagctctgaaatatatttttgggttacttcagtgtgtttgacaagacagcttgatatttctatcaaacaaatgactttcatattgcaacaatctttgtaagaaccactcaaataaaagtctcttaaaaaggcc

SEQ ID NO: 177725 - DNA, 1026 bp, Homo sapiens
  Payload ID: 14876
  Gene Symbol: RBM39
  Gene Name: RNA binding motif protein 39
  ENST ID: ENST00000374038
  CDS Start-End: 332-1026
gtgtgctggtgaatgtgagtacagggaagcagcggccgccatttcagggagcttgtcgacgctgtcgcaggggtggatcctgagctgccgaagccgccgtcctgctctcccgcgtgggcttctctaattccattgttttttttagattctctcgggcctagccgtccttggaacccgatattcgggctgggcggttccgcggcctgggcctaggggcttaacagtagcaacagaagcggcggcggcggcagcagcagcagcagcagcagcaatctcttcccgaacacgagcaccacaggcgcccgaaggccggaacaggcgtttagagaaaatggcagacgatattgatattgaagcaatgcttgaggctccttacaagaaggatgagaacaagttgagcagtgccaacggccatgaagaacgtagcaaaaagaggaaaaaaagcaagagcagaagtcgtagtcatgaacgaaagagaagcaaaagtaaggaacggaagcgaagtagagacagagaaaggaaaaagagcaaaagccgtgaaagaaagcgaagtagaagcaaagagaggcgacggagccgctcaagaagtcgagatcgaagatttagaggccgctacagaagtccttactccggaccaaaatttaacagtgccatccgaggaaagattgggttgcctcatagcatcaaattaagacgacgttcccgaagcaaaagtccattcagaaaagacaagagccctgtgagagaacctattgataatttaactcctgaggaaagagatgcaaggacagtcttctgtatgcagctggcggcaagaattcgaccaagggatttggaagagtttttctctacagtaggaaaggttcgagatgtgaggatgatttctgacagaaattcaagacgttccaaaggaattgcttatgtggagttcgtcgatgttagctcagtgcctctagcaataggattaactggccaacgagttttaggcgtgccaatcatagtacaggcatcacaggcagaaaaaaa

SEQ ID NO: 177726 - DNA, 612 bp, Homo sapiens
  Payload ID: 14876
  Gene Symbol: RBM39
  Gene Name: RNA binding motif protein 39
  ENST ID: ENST00000397370
  CDS Start-End: 306-593
aagcagcggccgccatttcagggagcttgtcgacgctgtcgcaggggtggatcctgagctgccgaagccgccgtcctgctctcccgcgtgggcttctctaattccattgttttttttagattctctcgggcctagccgtccttggaacccgatattcgggctgggcggttccgcggcctgggcctaggggcttaacagtagcaacagaagcggcggcggcggcagcagcagcagcagcagcagcaatctcttcccgaacacgagcaccacaggcgcccgaaggccggaacaggcgtttagagaaaatggcagacgatattgatattgaagcaatgcttgaggctccttacaagaaggatgagaacaagttgagcagtgccaacggccatgaagaacgtagcaaaaaaatactttgcattaaaaatttagatcttcttacatggaagaggtcaaatccagttatagcaaaacacctttactgcagaggccatataaccaaaaagtccaaaggcccagcccagtggaccatttacttcagtgatgttcagtacaaaatttcactgccattaaagactttggaaagtcccttttaagttgtaacaggatttgact

SEQ ID NO: 177727 - DNA, 2883 bp, Homo sapiens
  Payload ID: 14876
  Gene Symbol: RBM39
  Gene Name: RNA binding motif protein 39
  ENST ID: ENST00000403542
  CDS Start-End: 348-470
gtttgtgtgtgtgtatgtgtgctggtgaatgtgagtacagggaagcagcggccgccatttcagggagcttgtcgacgctgtcgcaggggtggatcctgagctgccgaagccgccgtcctgctctcccgcgtgggcttctctaattccattgttttttttagattctctcgggcctagccgtccttggaacccgatattcgggctgggcggttccgcggcctgggcctaggggcttaacagtagcaacagaagcggcggcggcggcagcagcagcagcagcagcagcaatctcttcccgaacacgagcaccacaggcgcccgaaggccggaacaggcgtttagagaaaatggcagacgatattgatattgaagcaatgcttgaggctccttacaagaagacttgcctaacgatatctcacctctactcccatgaattcacctttgattccagtgtgaactgtcaatcataaggatgagaacaagttgagcagtgccaacggccatgaagaacgtagcaaaaagaggaaaaaaagcaagagcagaagtcgtagtcatgaacgaaagagaagcaaaagtaaggaacggaagcgaagtagagacagagaaaggaaaaagagcaaaagccgtgaaagaaagcgaagtagaagcaaagagaggcgacggagccgctcaagaagtcgagatcgaagatttagaggccgctacagaagtccttactccggaccaaaatttaacagtgccatccgaggaaagattgggttgcctcatagcatcaaattaagcagacgacgttcccgaagcaaaagtccattcagaaaagacaagagccctgtgagagaacctattgataatttaactcctgaggaaagagatgcaaggacagtcttctgtatgcagctggcggcaagaattcgaccaagggatttggaagagtttttctctacagtaggaaaggttcgagatgtgaggatgatttctgacagaaattcaagacgttccaaaggaattgcttatgtggagttcgtcgatgttagctcagtgcctctagcaataggattaactggccaacgagttttaggcgtgccaatcatagtacaggcatcacaggcagaaaaaaacagagctgcagcaatggcaaacaatttacaaaagggaagtgctggacctatgaggctttatgtgggctcattacacttcaacataactgaagatatgcttcgtgggatctttgagccttttggaagaattgaaagtatccagctgatgatggacagtgaaactggtcgatccaagggatatggatttattacattttctgactcagaatgtgccaaaaaggctttggaacaacttaatggatttgaactagcaggaagaccaatgaaagttggtcatgttactgaacgtactgatgcttcgagtgctagttcatttttggacagtgatgaactggaaaggactggaattgatttgggaacaactggtcgtcttcagttaatggcaagacttgcagagggtacaggtttgcagattccgccagcagcacagcaagctctacagatgagtggctctttggcatttggtgctgtggcagaattctcttttgttatagatttgcaaacaagactttcccagcagactgaagcttcagctttagctgcagctgcctctgttcagccacttgcaacacaatgtttccaactctctaacatgtttaaccctcaaacagaagaagaagttggatgggataccgagattaaggatgatgtgattgaagaatgtaataaacatggaggagttattcatatttatgttgacaaaaattcagctcagggcaatgtgtatgtgaagtgcccatcaattgctgcagctattgctgctgtcaatgcattgcatggcaggtggtttgctggtaaaatgataacagcagcatatgtacctcttccaacttaccacaacctgtttcctgattctatgacagcaacacagctactggttccaagtagacgatgaaggaagatatagtcccttatgtatatagctttttttctttcttgagaattcatcttgagttatcttttatttagataaaaataaagaggcaaggatctactgtcatttgtatgcaatttcctgttaccttgaaaaaataaaaatgttaacaggaatgcagtgtgctcattctccctaaatagtaaatcccactgtatacaaaactgttctcttgttctgccttttaaaatgttcatgtagaaaattaatgaactataggaatagctctaggagaacaaatgtgctttctgtaaaaaggcagaccagggatgtaatgtttttaatgtttcagaagcctaactttttacacagtggttacatttcacatttcactaatgttgatatttggctgatggttgagcagtttctgaaatacacatttagtgtatggaaatacaagacagctaaagggctgtttggttagcatctcatcttgcattctgatcaattggcaagaaagggagatttcaaaattatatttcttgatggtatcttttcaattaatgtatctgtaaaagtttctttgtaaatactatgtgttctggtgtgtcttaaaattccaaacaaaatgatccctgcatttcctgaagatgtttaaacgtgagagtctggtaggcaaagcagtctgagaaagaaataggaaatgcagaaataggttttgtctggttgcatataatctttgctctttttaagctctgtgagctctgaaatatatttttgggttacttcagtgtgtttgacaagacagcttgatatttctatcaaacaaatgactttcatattgcaacaatctttgtaagaaccactcaaataaaagtctcttaaaaaggc

SEQ ID NO: 177728 - DNA, 526 bp, Homo sapiens
  Payload ID: 14876
  Gene Symbol: RBM39
  Gene Name: RNA binding motif protein 39
  ENST ID: ENST00000425184
  CDS Start-End: 1-72
acttgcctaacgatatctcacctctactcccatgaattcacctttgattccagtgtgaactgtcaatcataaggatgagaacaagttgagcagtgccaacggccatgaagaacgtagcaaaaagaggaaaaaaagcaagagcagaagtcgtagtcatgaacgaaagagaagcaaaagtaaggaacggaagcgaagtagagacagagaaaggaaaaagagcaaaagccgtgaaagaaagcgaagtagaagcaaagagaggcgacggagccgctcaagaagtcgagatcgaagatttagaggccgctacagaagtccttactccggaccaaaatttaacagtgccatccgaggaaagattgggttgcctcatagcatcaaattaagacgacgttcccgaagcaaaagtccattcagaaaagacaagagccctgtgagagaacctattgataatttaactcctgaggaaagagatgcaaggacagtcttctgtatgcagctggcggcaagaattcgaccaagggatttg

SEQ ID NO: 177729 - DNA, 432 bp, Homo sapiens
  Payload ID: 14876
  Gene Symbol: RBM39
  Gene Name: RNA binding motif protein 39
  ENST ID: ENST00000449489
  CDS Start-End: 14-136
gcgtttagagaaaatggcagacgatattgatattgaagcaatgcttgaggctccttacaagaagacttgcctaacgatatctcacctctactcccatgaattcacctttgattccagtgtgaactgtcaatcataaggatgagaacaagttgagcagtgccaacggccatgaagaacgtagcaaaaaatccctaaatgcttcatagtaagtatgtcagtctttctcactacaactgtgttaggaggaaaaaaagcaagagcagaagtcgtagtcatgaacgaaagagaagcaaaagtaaggaacggaagcgaagtagagacagagaaaggaaaaagagcaaaagccgtgaaagaaagcgaagtagaagcaaagagaggcgacggagccgctcaagaagtcgagatcgaagatttagaggccgctacagaagt

SEQ ID NO: 177730 - DNA, 716 bp, Homo sapiens
  Payload ID: 14876
  Gene Symbol: RBM39
  Gene Name: RNA binding motif protein 39
  ENST ID: ENST00000434927
  CDS Start-End: 136-716
ggcagcgcgggtttttgcccggaaagaggcgctctcgttcgggtctcccagtttctgtttttggagttgacagcagagttttaaatattggatattgaagtcttcattttcgtgtgtttcgtgcgtttagagaaaatggcagacgatattgatattgaagcaatgcttgaggctccttacaagaaggatgagaacaagttgagcagtgccaacggccatgaagaacgtagcaaaaagaggaaaaaaagcaagagcagaagtcgtagtcatgaacgaaagagaagcaaaagtaaggaacggaagcgaagtagagacagagaaaggaaaaagagcaaaagccgtgaaagaaagcgaagtagaagcaaagagaggcgacggagccgctcaagaagtcgagatcgaagatttagaggccgctacagaagtccttactccggaccaaaatttaacagtgccatccgaggaaagattgggttgcctcatagcatcaaattaagcagacgacgttcccgaagcaaaagtccattcagaaaagacaagagccctgtgagagaacctattgataatttaactcctgaggaaagagatgcaaggacagtcttctgtatgcagctggcggcaagaattcgaccaagggatttggaagagtttttctctacagtaggaaaggttcgagatgtgaggatgatttctgacagaaattcaagacgttccaa

SEQ ID NO: 177731 - DNA, 2124 bp, Homo sapiens
  Payload ID: 14876
  Gene Symbol: RBM39
  Gene Name: RNA binding motif protein 39
  ENST ID: ENST00000444878
  CDS Start-End: 322-444
gaatgtgagtacagggaagcagcggccgccatttcagggagcttgtcgacgctgtcgcaggggtggatcctgagctgccgaagccgccgtcctgctctcccgcgtgggcttctctaattccattgttttttttagattctctcgggcctagccgtccttggaacccgatattcgggctgggcggttccgcggcctgggcctaggggcttaacagtagcaacagaagcggcggcggcggcagcagcagcagcagcagcagcaatctcttcccgaacacgagcaccacaggcgcccgaaggccggaacaggcgtttagagaaaatggcagacgatattgatattgaagcaatgcttgaggctccttacaagaagacttgcctaacgatatctcacctctactcccatgaattcacctttgattccagtgtgaactgtcaatcataaggatgagaacaagttgagcagtgccaacggccatgaagaacgtagcaaaaagaggaaaaaaagcaagagcagaagtcgtagtcatgaacgaaagagaagcaaaagtaaggaacggaagcgaagtagagacagagaaaggaaaaagagcaaaagccgtgaaagaaagcgaagtagaagcaaagagaggcgacggagccgctcaagaagtcgagatcgaagatttagaggccgctacagaagtccttactccggaccaaaatttaacagtgccatccgaggaaagattgggttgcctcatagcatcaaattaagcagacgacgttcccgaagcaaaagtccattcagaaaagacaagagccctgtgagagaacctattgataatttaactcctgaggaaagagatgcaaggacagtcttctgtatgcagctggcggcaagaattcgaccaagggatttggaagagtttttctctacagtaggaaaggttcgagatgtgaggatgatttctgacagaaattcaagacgttccaaaggaattgcttatgtggagttcgtcgatgttagctcagtgcctctagcaataggattaactggccaacgagttttaggcgtgccaatcatagtacaggcatcacaggcagaaaaaaacagagctgcagcaatggcaaacaatttacaaaagggaagtgctggacctatgaggctttatgtgggctcattacacttcaacataactgaagatatgcttcgtgggatctttgagccttttggaagaattgaaagtatccagctgatgatggacagtgaaactggtcgatccaagggatatggatttattacattttctgactcagaatgtgccaaaaaggctttggaacaacttaatggatttgaactagcaggaagaccaatgaaagttggtcatgttactgaacgtactgatgcttcgagtgctagttcatttttggacagtgatgaactggaaaggactggaattgatttgggaacaactggtcgtcttcagttaatggcaagacttgcagagggtacaggtttgcagattccgccagcagcacagcaagctctacagatgagtggctctttggcatttggtgctgtggcagatttgcaaacaagactttcccagcagactgaagcttcagctttagctgcagctgcctctgttcagccacttgcaacacaatgtttccaactctctaacatgtttaaccctcaaacagaagaagaagttggatgggataccgagattaaggatgatgtgattgaagaatgtaataaacatggaggagttattcatatttatgttgacaaaaattcagctcagggcaatgtgtatgtgaagtgcccatcaattgctgcagctattgctgctgtcaatgcattgcatggcaggtggtttgctggtaaaatgataacagcagcatatgtacctcttccaacttaccacaacctgtttcctgattctatgacagcaacacagctactggttccaagtagacgatgaaggaagatatagtcccttatgtatatagctttttttctttcttgagaattcatcttgagttatcttttatttagataaaaataaagaggcaaggatctactgtcatttgtatgcaatttcctgttaccttgaaaaaataaaaatgttaacaggaa

SEQ ID NO: 177732 - DNA, 1008 bp, Homo sapiens
  Payload ID: 14876
  Gene Symbol: RBM39
  Gene Name: RNA binding motif protein 39
  ENST ID: ENST00000448303
  CDS Start-End: 1-1008
aagtccattcagaaaagacaagagccctgtgagagaacctattgataatttaactcctgaggaaagagatgcaaggacagtcttctgtatgcagctggcggcaagaattcgaccaagggatttggaagagtttttctctacagtaggaaaggttcgagatgtgaggatgatttctgacagaaattcaagacgttccaaaggaattgcttatgtggagttcgtcgatgttagctcagtgcctctagcaataggattaactggccaacgagttttaggcgtgccaatcatagtacaggcatcacaggcagaaaaaaacagagctgcagcaatggcaaacaatttacaaaagggaagtgctggacctatgaggctttatgtgggctcattacacttcaacataactgaagatatgcttcgtgggatctttgagccttttggaagattttctgactcagaatgtgccaaaaaggctttggaacaacttaatggatttgaactagcaggaagaccaatgaaagttggtcatgttactgaacgtactgatgcttcgagtgctagttcatttttggacagtgatgaactggaaaggactggaattgatttgggaacaactggtcgtcttcagttaatggcaagacttgcagagggtacaggtttgcagattccgccagcagcacagcaagctctacagatgagtggctctttggcatttggtgctgtggcagaattctcttttgttatagatttgcaaacaagactttcccagcagactgaagcttcagctttagctgcagctgcctctgttcagccacttgcaacacaatgtttccaactctctaacatgtttaaccctcaaacagaagaagaagttggatgggataccgagattaaggatgatgtgattgaagaatgtaataaacatggaggagttattcatatttatgttgacaaaaattcagctcagggcaatgtgtatgtgaagtgcccatcaattgctgcagctattgc

SEQ ID NO: 177733 - DNA, 2149 bp, Homo sapiens
  Payload ID: 14876
  Gene Symbol: RBM39
  Gene Name: RNA binding motif protein 39
  ENST ID: ENST00000429968
  CDS Start-End: 330-473
gtgctggtgaatgtgagtacagggaagcagcggccgccatttcagggagcttgtcgacgctgtcgcaggggtggatcctgagctgccgaagccgccgtcctgctctcccgcgtgggcttctctaattccattgttttttttagattctctcgggcctagccgtccttggaacccgatattcgggctgggcggttccgcggcctgggcctaggggcttaacagtagcaacagaagcggcggcggcggcagcagcagcagcagcagcagcaatctcttcccgaacacgagcaccacaggcgcccgaaggccggaacaggcgtttagagaaaatggcagacgatattgatattgaagcaatgcttgaggctccttacaagaaggatgagaacaagttgagcagtgccaacggccatgaagaacgtagcaaaaaacaaactttctgcctccttggaaagctctacatctccttgtgattggagtgtgggtttcaagattccagaaggaggaaaaaaagcaagagcagaagtcgtagtcatgaacgaaagagaagcaaaagtaaggaacggaagcgaagtagagacagagaaaggaaaaagagcaaaagccgtgaaagaaagcgaagtagaagcaaagagaggcgacggagccgctcaagaagtcgagatcgaagatttagaggccgctacagaagtccttactccggaccaaaatttaacagtgccatccgaggaaagattgggttgcctcatagcatcaaattaagcagacgacgttcccgaagcaaaagtccattcagaaaagacaagagccctgtgagagaacctattgataatttaactcctgaggaaagagatgcaaggacagtcttctgtatgcagctggcggcaagaattcgaccaagggatttggaagagtttttctctacagtaggaaaggttcgagatgtgaggatgatttctgacagaaattcaagacgttccaaaggaattgcttatgtggagttcgtcgatgttagctcagtgcctctagcaataggattaactggccaacgagttttaggcgtgccaatcatagtacaggcatcacaggcagaaaaaaacagagctgcagcaatggcaaacaatttacaaaagggaagtgctggacctatgaggctttatgtgggctcattacacttcaacataactgaagatatgcttcgtgggatctttgagccttttggaagaattgaaagtatccagctgatgatggacagtgaaactggtcgatccaagggatatggatttattacattttctgactcagaatgtgccaaaaaggctttggaacaacttaatggatttgaactagcaggaagaccaatgaaagttggtcatgttactgaacgtactgatgcttcgagtgctagttcatttttggacagtgatgaactggaaaggactggaattgatttgggaacaactggtcgtcttcagttaatggcaagacttgcagagggtacaggtttgcagattccgccagcagcacagcaagctctacagatgagtggctctttggcatttggtgctgtggcagaattctcttttgttatagatttgcaaacaagactttcccagcagactgaagcttcagctttagctgcagctgcctctgttcagccacttgcaacacaatgtttccaactctctaacatgtttaaccctcaaacagaagaagaagttggatgggataccgagattaaggatgatgtgattgaagaatgtaataaacatggaggagttattcatatttatgttgacaaaaattcagctcagggcaatgtgtatgtgaagtgcccatcaattgctgcagctattgctgctgtcaatgcattgcatggcaggtggtttgctggtaaaatgataacagcagcatatgtacctcttccaacttaccacaacctgtttcctgattctatgacagcaacacagctactggttccaagtagacgatgaaggaagatatagtcccttatgtatatagctttttttctttcttgagaattcatcttgagttatcttttatttagataaaaataaagaggcaaggatctactgtcatttgtatgcaatttcctgttaccttgaaaaaataaaaatgttaacaggaa

SEQ ID NO: 177734 - DNA, 441 bp, Homo sapiens
  Payload ID: 14876
  Gene Symbol: RBM39
  Gene Name: RNA binding motif protein 39
  ENST ID: ENST00000455343
  CDS Start-End: 32-154
gcccgaaggccggaacaggcgtttagagaaaatggcagacgatattgatattgaagcaatgcttgaggctccttacaagaagacttgcctaacgatatctcacctctactcccatgaattcacctttgattccagtgtgaactgtcaatcataaggatgagaacaagttgagcagtgccaacggccatgaagaacgtagcaaaaagaggaaaaaaagcaagagcagaagtcgtagtcatgaacgaaagagaagcaaaagtaaggaacggaagcgaagtagagacagagaaaggaaaaagagcaaaagccgtgaaagaaagcgaagtagaagcaaagagaggcgacggagccgctcaagaagtcgagatcgaagatttagaggccgctacagaagtccttaacgacgttcccgaagcaaaagtccattcagaaaagacaaga

SEQ ID NO: 177735 - DNA, 1068 bp, Homo sapiens
  Payload ID: 14876
  Gene Symbol: RBM39
  Gene Name: RNA binding motif protein 39
  ENST ID: ENST00000453310
  CDS Start-End: 332-454
gtgtgctggtgaatgtgagtacagggaagcagcggccgccatttcagggagcttgtcgacgctgtcgcaggggtggatcctgagctgccgaagccgccgtcctgctctcccgcgtgggcttctctaattccattgttttttttagattctctcgggcctagccgtccttggaacccgatattcgggctgggcggttccgcggcctgggcctaggggcttaacagtagcaacagaagcggcggcggcggcagcagcagcagcagcagcagcaatctcttcccgaacacgagcaccacaggcgcccgaaggccggaacaggcgtttagagaaaatggcagacgatattgatattgaagcaatgcttgaggctccttacaagaagacttgcctaacgatatctcacctctactcccatgaattcacctttgattccagtgtgaactgtcaatcataaggatgagaacaagttgagcagtgccaacggccatgaagaacgtagcaaaaaaatactttgcattaaaaatttagatcttcttacatggaagaggtcaaatccagttatagcaaaacacctttactgcagaggccatataaccaaaaagtccaaaggcccagcccagtggaccatttacttcagtgatgttcagtacaaaatttcactgccattaaagactttggaaagtcccttttaagttgtaacaggatttgactattagtgtggatttcgataacccttctttagttaatgtaataaatgctctttgaagctggaaatatactggtttcttgcacccttgtagttttctctgggcttttatgcaaaagattgtattttctgaatgtcttagtatgttgctgtctttttacctgcctggggttgccttcagatgtgggtgaggacttgtttacaaaaagtcctagaagaccttaagttaaaattagctctccaattttcaagtgttttcttttggcagaataagttttgggtcctatgagaggtaaataggttggttgcctctcttgctatagcccatctagagcagaacaaaaactttgtttttgaggggg

SEQ ID NO: 177736 - DNA, 1018 bp, Homo sapiens
  Payload ID: 14876
  Gene Symbol: RBM39
  Gene Name: RNA binding motif protein 39
  ENST ID: ENST00000412738
  CDS Start-End: 187-309
attctctcgggcctagccgtccttggaacccgatattcgggctgggcggttccgcggcctgggcctaggggcttaacagtagcaacagaagcggcggcggcggcagcagcagcagcagcagcagcaatctcttcccgaacacgagcaccacaggcgcccgaaggccggaacaggcgtttagagaaaatggcagacgatattgatattgaagcaatgcttgaggctccttacaagaagacttgcctaacgatatctcacctctactcccatgaattcacctttgattccagtgtgaactgtcaatcataaggatgagaacaagttgagcagtgccaacggccatgaagaacgtagcaaaaaacaaactttctgcctccttggaaagctctacatctccttgtgattggagtgtgggtttcaagattccagaaggaggaaaaaaagcaagagcagaagtcgtagtcatgaacgaaagagaagcaaaagtaaggaacggaagcgaagtagagacagagaaaggaaaaagagcaaaagccgtgaaagaaagcgaagtagaagcaaagagaggcgacggagccgctcaagaagtcgagatcgaagatttagaggccgctacagaagtccttactccggaccaaaatttaacagtgccatccgaggaaagattgggttgcctcatagcatcaaattaagcagacgacgttcccgaagcaaaagtccattcagaaaagacaagagccctgtgagagaacctattgataatttaactcctgaggaaagagatgcaaggacagtcttctgtatgcagctggcggcaagaattcgaccaagggatttggaagagtttttctctacagtaggaaaggttcgagatgtgaggatgatttctgacagaaattcaagacgttccaaaggaattgcttatgtggagttcgtcgatgttagctcagtgcctctagcaataggattaactggccaacgagttttaggcgtgccaatcatagtacaggcatcacag

SEQ ID NO: 177737 - DNA, 840 bp, Homo sapiens
  Payload ID: 14876
  Gene Symbol: RBM39
  Gene Name: RNA binding motif protein 39
  ENST ID: ENST00000426951
  CDS Start-End: 1-260
ctccttacaagaaggatgagaacaagttgagcagtgccaacggccatgaagaacgtagcaaaaagaggaaaaaaagcaagagcagaagtcgtagtcatgaacgaaagagaagcaaaagtaaggaacggaagcgaagtagagacagagaaaggaaaaagagcaaaagccgtgaaagaaagcgaagtagaagcaaagagaggcgacggagccgctcaagaagtcgagatcgaagatttagaggccgctacagaagtccttagtatgtaactatagttatgattttggtttgagggttattctctgggtattcagatggcagtttaacttgagtgatttgaattgtgaatttttatttttttaatgattggttaaaaagtattgaattaaggatattggcattgaatactagtaaagtgaaaatacagtgcatagacaaataagtaaaaatttgcttttactaggcatactgactattttctgttaaactatcagagtttctaaattgtatgccagtcaacgcaaactggatgaaagcactagagtgcttgaaaaagatgacattgtagtgcccaaatacctaagaaagcttaacaagtgtctgggctgttacagtatttgctaaatacatatttacttaaaattgtaaagttctgatgaatactaagttacacatgtataattagttaacagtaaataaaaagtctgtcaccgtggctgttttcagctgaaatgtcaggccagttgtgaatttgttgtgtatgctcattgataaagatccttttttgggctcatctgtatttaaggtttgttaataataataaaaggtattccaaactaaaa

SEQ ID NO: 177738 - DNA, 577 bp, Homo sapiens
  Payload ID: 14876
  Gene Symbol: RBM39
  Gene Name: RNA binding motif protein 39
  ENST ID: ENST00000416108
  CDS Start-End: 153-275
ctctttgcccctaaaatggcagcgcgggtttttgcccggaaagaggcgctctcgttcgggtctcccagtttctgtttttggagttgacagcagagttttaaatattggatattgaagtcttcattttcgtgtgtttcgtgcgtttagagaaaatggcagacgatattgatattgaagcaatgcttgaggctccttacaagaagacttgcctaacgatatctcacctctactcccatgaattcacctttgattccagtgtgaactgtcaatcataaggatgagaacaagttgagcagtgccaacggccatgaagaacgtagcaaaaagaggaaaaaaagcaagagcagaagtcgtagtcatgaacgaaagagaagcaaaagtaaggaacggaagcgaagtagagacagagaaaggaaaaagagcaaaagccgtgaaagaaagcgaagtagaagcaaagagaggcgacggagccgctcaagaagtcgagatcgaagatttagaggccgctacagaagtccttactccggaccaaaatttaacagtgccatccgaggaaagattgggttgcctcatagca

SEQ ID NO: 177739 - DNA, 594 bp, Homo sapiens
  Payload ID: 14876
  Gene Symbol: RBM39
  Gene Name: RNA binding motif protein 39
  ENST ID: ENST00000416529
  CDS Start-End: 53-241
ccgaacacgagcaccacaggcgcccgaaggccggaacaggcgtttagagaaaatggcagacgatattgatattgaagcaatgcttgaggctccttacaagaagggcgagatgtgtgacagaggtggcatcaagctcttacagtcccaaccctccaacggaaatgggcgaagatctcaggaatggcatcggtcacaggaaatcgatagtggctggctgctagcatggccacttggggcttaggcagaaatagagccatggatgagaacaagttgagcagtgccaacggccatgaagaacgtagcaaaaaaatactttgcattaaaaatttagatcttcttacatggaagaggtcaaatccagttatagcaaaacacctttactgcagaggccatataaccaaaaagtccaaaggcccagcccagtggaccatttacttcagtgatgttcagtacaaaatttcactgccattaaagactttggaaagtcccttttaagttgtaacaggatttgactattagtgtggatttcgataacccttctttagttaatgtaataaatgctctttgaagctggaaatatactggtttcttgca

SEQ ID NO: 177740 - DNA, 611 bp, Homo sapiens
  Payload ID: 14876
  Gene Symbol: RBM39
  Gene Name: RNA binding motif protein 39
  ENST ID: ENST00000433027
  CDS Start-End: 293-412
catttcagggagcttgtcgacgctgtcgcaggggtggatcctgagctgccgaagccgccgtcctgctctcccgcgtgggcttctctaattccattgttttttttagattctctcgggcctagccgtccttggaacccgatattcgggctgggcggttccgcggcctgggcctaggggcttaacagtagcaacagaagcggcggcggcggcagcagcagcagcagcagcagcaatctcttcccgaacacgagcaccacaggcgcccgaaggccggaacaggcgtttagagaaaatggcagacgatattgatattgaagcaatgcttgaggctccttacaagaaggatgagaacaagttgagcagtgccaacggccatgaagaacgtagcaaaaaatccctaaatgcttcatagtaagtatgtcagtctttctcactacaactgtgttagacaaactttctgcctccttggaaagctctacatctccttgtgattggagtgtgggtttcaagattccagaaggaggaaaaaaagcaagagcagaagtcgtagtcatgaacgaaagagaagcaaaagtaaggaacggaagcgaagtagagacagagaaaggaaa

SEQ ID NO: 177741 - DNA, 2421 bp, Homo sapiens
  Payload ID: 14876
  Gene Symbol: RBM39
  Gene Name: RNA binding motif protein 39
  Uniprot ID: Q14498
  ENST ID: ENST00000528062
  CDS Start-End: 312-1838
acagggaagcagcggccgccatttcagggagcttgtcgacgctgtcgcaggggtggatcctgagctgccgaagccgccgtcctgctctcccgcgtgggcttctctaattccattgttttttttagattctctcgggcctagccgtccttggaacccgatattcgggctgggcggttccgcggcctgggcctaggggcttaacagtagcaacagaagcggcggcggcggcagcagcagcagcagcagcagcaatctcttcccgaacacgagcaccacaggcgcccgaaggccggaacaggcgtttagagaaaatggcagacgatattgatattgaagcaatgcttgaggctccttacaagaaggatgagaacaagttgagcagtgccaacggccatgaagaacgtagcaaaaagaggaaaaaaagcaagagcagaagtcgtagtcatgaacgaaagagaagcaaaagtaaggaacggaagcgaagtagagacagagaaaggaaaaagagcaaaagccgtgaaagaaagcgaagtagaagcaaagagaggcgacggagccgctcaagaagtcgagatcgaagatttagaggccgctacagaagtccttacagacgacgttcccgaagcaaaagtccattcagaaaagacaagagccctgtgagagaacctattgataatttaactcctgaggaaagagatgcaaggacagtcttctgtatgcagctggcggcaagaattcgaccaagggatttggaagagtttttctctacagtaggaaaggttcgagatgtgaggatgatttctgacagaaattcaagacgttccaaaggaattgcttatgtggagttcgtcgatgttagctcagtgcctctagcaataggattaactggccaacgagttttaggcgtgccaatcatagtacaggcatcacaggcagaaaaaaacagagctgcagcaatggcaaacaatttacaaaagggaagtgctggacctatgaggctttatgtgggctcattacacttcaacataactgaagatatgcttcgtgggatctttgagccttttggaagaattgaaagtatccagctgatgatggacagtgaaactggtcgatccaagggatatggatttattacattttctgactcagaatgtgccaaaaaggctttggaacaacttaatggatttgaactagcaggaagaccaatgaaagttggtcatgttactgaacgtactgatgcttcgagtgctagttcatttttggacagtgatgaactggaaaggactggaattgatttgggaacaactggtcgtcttcagttaatggcaagacttgcagagggtacaggtttgcagattccgccagcagcacagcaagctctacagatgagtggctctttggcatttggtgctgtggcagaattctcttttgttatagatttgcaaacaagactttcccagcagactgaagcttcagctttagctgcagctgcctctgttcagccacttgcaacacaatgtttccaactctctaacatgtttaaccctcaaacagaagaagaagttggatgggataccgagattaaggatgatgtgattgaagaatgtaataaacatggaggagttattcatatttatgttgacaaaaattcagctcagggcaatgtgtatgtgaagtgcccatcaattgctgcagctattgctgctgtcaatgcattgcatggcaggtggtttgctggtaaaatgataacagcagcatatgtacctcttccaacttaccacaacctgtttcctgattctatgacagcaacacagctactggttccaagtagacgatgaaggaagatatagtcccttatgtatatagctttttttctttcttgagaattcatcttgagttatcttttatttagataaaaataaagaggcaaggatctactgtcatttgtatgcaatttcctgttaccttgaaaaaataaaaatgttaacaggaatgcagtgtgctcattctccctaaatagtaaatcccactgtatacaaaactgttctcttgttctgccttttaaaatgttcatgtagaaaattaatgaactataggaatagctctaggagaacaaatgtgctttctgtaaaaaggcagaccagggatgtaatgtttttaatgtttcagaagcctaactttttacacagtggttacatttcacatttcactaatgttgatatttggctgatggttgagcagtttctgaaatacacatttagtgtatggaaatacaagacagctaaagggctgtttggttagcatctcatcttgcattctgatcaattggcaagaaagggagatttcaaaattatatttcttgatggtatcttttcaattaatgtatctgtaaaagtttctttgtaaatactatgtgttctg

SEQ ID NO: 177742 - DNA, 754 bp, Homo sapiens
  Payload ID: 14876
  Gene Symbol: RBM39
  Gene Name: RNA binding motif protein 39
  ENST ID: ENST00000476806
  CDS Start-End: 1-180
ctggaaaggactggaattgatttgggaacaactggtcgtcttcagttaatggcaagacttgcagagggtacaggtttgcagattccgccagcagcacagcaagctctacagatgagtggctctttggcatttggtgctgtggcagttgaggctcttcattgttcctgcactgagctgtagaattctcttttgttatagatttgcaaacaagactttcccagcagactgaagcttcagctttagctgcagctgcctctgttcagccacttgcaacacaatgtttccaactctctaacatgtttaaccctcaaacagaagaagaagttggatgggataccgagattaaggatgatgtgattgaagaatgtaataaacatggaggagttattcatatttatgttgacaaaaattcagctcagggcaatgtgtatgtgaagtgcccatcaattgctgcagctattgctgctgtcaatgcattgcatggcaggtggtttgctggtaaaatgataacagcagcatatgtacctcttccaacttaccacaacctgtttcctgattctatgacagcaacacagctactggttccaagtagacgatgaaggaagatatagtcccttatgtatatagctttttttctttcttgagaattcatcttgagttatcttttatttagataaaaataaagaggcaaggatctactgtcatttgtatgcaatttcctgttaccttgaaaaaataaaaatgttaacaggaa

SEQ ID NO: 177743 - DNA, 871 bp, Homo sapiens
  Payload ID: 14876
  Gene Symbol: RBM39
  Gene Name: RNA binding motif protein 39
  ENST ID: ENST00000490484
  CDS Start-End: 1-738
acagtcttctgtatgcagctggcggcaagaattcgaccaagggatttggaagagtttttctctacagtaggaaaggttcgagatgtgaggatgatttctgacagaaattcaagacgttccaaaggaattgcttatgtggagttcgtcgatgttagctcagtgcctctagcaataggattaactggccaacgagttttaggcgtgccaatcatagtacaggcatcacaggcagaaaaaaacagagctgcagcaatggcaaacaatttacaaaagggaagtgctggacctatgaggctttatgtgggctcattacacttcaacataactgaagatatgcttcgtgggatctttgagccttttggaagaattgaaagtatccagctgatgatggacagtgaaactggtcgatccaagggatatggatttattacattttctgactcagaatgtgccaaaaaggctttggaacaacttaatggatttgaactagcaggaagaccaatgaaagttggtcatgttactgaacgtactgatgcttcgagtgctagttcatttttggacagtgatgaactggaaaggactggaattgatttgggaacaactggtcgtcttcagttaatggcaagacttgcagaggggtctggctctgttgcccaatttggagtgcagttgtgcgatcctggctcaccgcaacctctgcctctttggctgaagccatcctcccaccctaatctctaaatagctgggactaacagttgcaaacaaccaccaccacgcctggctaatttctgtggtacaggtttgcagattccgccagcagcacagcaagctctacagatgagtggctctttggcatttggtgctgtggcag

SEQ ID NO: 177744 - DNA, 686 bp, Homo sapiens
  Payload ID: 14876
  Gene Symbol: RBM39
  Gene Name: RNA binding motif protein 39
  ENST ID: ENST00000615771
  CDS Start-End: 1-490
acaaaagggaagtgctggacctatgaggctttatgtgggctcattacacttcaacataactgaagatatgcttcgtgggatctttgagccttttggaagaattgaaagtatccagctgatgatggacagtgaaactggtcgatccaagggatatggatttattacattttctgactcagaatgtgccaaaaaggctttggaacaacttaatggatttgaactagcaggaagaccaatgaaagttggtcatgttactgaacgtactgatgcttcgagtgctagttcatttttggacagtgatgaactggaaaggactggaattgatttgggaacaactggtcgtcttcagttaatggcaagacttgcagagggtacaggtttgcagattccgccagcagcacagcaagctctacagatgagtggctctttggcatttggtgctgtggcaggaaaaaaaagacaaattctgttattatttaaagtttattgacactgttcacatggtcctatcttcaagttccttcagtatacaccagttacatttcttcagctccctgagatgccaattttgagcacctaggacccagatttgcaaacaagactttcccagcagactgaagcttcagctttagctgcagctgcctctgttcagccacttgcaacacaatgtttccaactctctaaca

SEQ ID NO: 177745 - DNA, 1694 bp, Homo sapiens
  Payload ID: 14877
  Gene Symbol: RBM4
  Gene Name: RNA binding motif protein 4
  Uniprot ID: Q9BWF3
  ENST ID: ENST00000310092
  CDS Start-End: 149-1243
actttcttgagtggccaatccggttgtaggctcacctcccccttctactcagagcactgctgcggccgccgccattttagcgttttgtcagaagcgtccgcgccgcgaggaggaggccctgctggtttctgtgcgggctcttgtcaggatggtgaagctgttcatcggaaacctgccccgggaggctacagagcaggagattcgctcactcttcgagcagtatgggaaggtgctggaatgtgacatcattaagaattacggctttgtgcacatagaagacaagacggcagctgaggatgccatacgcaacctgcaccattacaagcttcatggggtgaacatcaacgtggaagccagcaagaataagagcaaaacctcaacaaagttgcatgtgggcaacatcagtcccacctgcaccaataaggagcttcgagccaagtttgaggagtatggtccggtcatcgaatgtgacatcgtgaaagattatgccttcgtacacatggagcgggcagaggatgcagtggaggccatcaggggccttgataacacagagtttcaaggcaaacgaatgcacgtgcagttgtccaccagccggcttaggactgcgcccgggatgggagaccagagcggctgctatcggtgcgggaaagaggggcactggtccaaagagtgtccgatagatcgttcaggccgcgtggcagacttgaccgagcaatataatgagcaatacggagcagtgcgtacgccttacaccatgagctatggggattcattgtattacaacaacgcgtacggagcgctcgatgcctactacaagcgctgccgtgctgcccggtcctatgaggcagtggcagctgcagctgcctccgtgtataattacgcagagcagaccctgtcccagctgccacaagtccagaatacagccatggccagtcacctcacctccacctctctcgatccctacgatagacacctgttgccgacctcaggagctgctgccacagctgctgctgcagcagcagccgctgctgctgttactgcagcttccacttcatattacgggcgggatcggagccccctgcgtcgcgctacagccccagtccccactgttggagagggctacggttacgggcatgagagtgagttgtcccaagcttcagcagccgcgcggaattctctgtacgacatggcccggtatgagcgggagcagtatgccgatcgggcgcggtactcagccttttaaagcttgaggtgggatgtgtgtgggctgaaattccgagctgcggttgtgcatgagaatacacccttcgtggtaccccatctccgggacgttctcggctctgtgcgttcagtccctcaggaaccgtggaccttaatttaccttgctaagttcagaccttctcttcctttcctttcctttcctctcctgcccattttcctgttcttctgtccttcaatacttctgtagcttcccattcatgttctcttctcccagcaggcctcattgtgtgcagaaactgtggtgggggctgtgctgtctcctccctgcctcctgcctcctgcggctgttggatttgggaatgaccttggtgagagtctcactgctccagggtctctttttggtccaaaggctagacctatagagttggatcactttttttctttccggtgaaataaatggtttttcaacttag

SEQ ID NO: 177746 - DNA, 921 bp, Homo sapiens
  Payload ID: 14877
  Gene Symbol: RBM4
  Gene Name: RNA binding motif protein 4
  Uniprot ID: Q9BWF3
  ENST ID: ENST00000398692
  CDS Start-End: 68-499
gttttgtcagaagcgtccgcgccgcgaggaggaggccctgctggtttctgtgcgggctcttgtcaggatggtgaagctgttcatcggaaacctgccccgggaggctacagagcaggagattcgctcactcttcgagcagtatgggaaggtgctggaatgtgacatcattaagaattacggctttgtgcacatagaagacaagacggcagctgaggatgccatacgcaacctgcaccattacaagcttcatggggtgaacatcaacgtggaagccagcaagaataagagcaaaacctcaacaaagttgcatgtgggcaacatcagtcccacctgcaccaataaggagcttcgagccaagtttgaggagtatggtccggtcatcgaatgtgacatcgtgaaagattatgccttcgtacacatggagcgggcagaggatgcagtggaggccatcaggggccttgataacacagagtttcaaggtgggatgtgtgtgggctgaaattccgagctgcggttgtgcatgagaatacacccttcgtggtaccccatctccgggacgttctcggctctgtgcgttcagtccctcaggaaccgtggaccttaatttaccttgctaagttcagaccttctcttcctttcctttcctttcctctcctgcccattttcctgttcttctgtccttcaatacttctgtagcttcccattcatgttctcttctcccagcaggcctcattgtgtgcagaaactgtggtgggggctgtgctgtctcctccctgcctcctgcctcctgcggctgttggatttgggaatgaccttggtgagagtctcactgctccagggtctctttttggtccaaaggctagacctatagagttggatcactttttttctttccggtgaaataaatggtttttcaactta

SEQ ID NO: 177747 - DNA, 1763 bp, Homo sapiens
  Payload ID: 14877
  Gene Symbol: RBM4
  Gene Name: RNA binding motif protein 4
  Uniprot ID: Q9BWF3
  ENST ID: ENST00000408993
  CDS Start-End: 235-1329
actgctgcggccgccgccattttagcgttttgtcagaagcgtccgcgccgcgaggaggaggccctgctggtttctgtgcgggtgagactccgagcctttccactgcctttcttgtactgtgttaaatcttctctcactcccttgggcttcgggggtgtcctggtaggtccgcagtctccacacccgtcactgagagccgacctcggtcctcggcattgcgcggctcttgtcaggatggtgaagctgttcatcggaaacctgccccgggaggctacagagcaggagattcgctcactcttcgagcagtatgggaaggtgctggaatgtgacatcattaagaattacggctttgtgcacatagaagacaagacggcagctgaggatgccatacgcaacctgcaccattacaagcttcatggggtgaacatcaacgtggaagccagcaagaataagagcaaaacctcaacaaagttgcatgtgggcaacatcagtcccacctgcaccaataaggagcttcgagccaagtttgaggagtatggtccggtcatcgaatgtgacatcgtgaaagattatgccttcgtacacatggagcgggcagaggatgcagtggaggccatcaggggccttgataacacagagtttcaaggcaaacgaatgcacgtgcagttgtccaccagccggcttaggactgcgcccgggatgggagaccagagcggctgctatcggtgcgggaaagaggggcactggtccaaagagtgtccgatagatcgttcaggccgcgtggcagacttgaccgagcaatataatgagcaatacggagcagtgcgtacgccttacaccatgagctatggggattcattgtattacaacaacgcgtacggagcgctcgatgcctactacaagcgctgccgtgctgcccggtcctatgaggcagtggcagctgcagctgcctccgtgtataattacgcagagcagaccctgtcccagctgccacaagtccagaatacagccatggccagtcacctcacctccacctctctcgatccctacgatagacacctgttgccgacctcaggagctgctgccacagctgctgctgcagcagcagccgctgctgctgttactgcagcttccacttcatattacgggcgggatcggagccccctgcgtcgcgctacagccccagtccccactgttggagagggctacggttacgggcatgagagtgagttgtcccaagcttcagcagccgcgcggaattctctgtacgacatggcccggtatgagcgggagcagtatgccgatcgggcgcggtactcagccttttaaagcttgaggtgggatgtgtgtgggctgaaattccgagctgcggttgtgcatgagaatacacccttcgtggtaccccatctccgggacgttctcggctctgtgcgttcagtccctcaggaaccgtggaccttaatttaccttgctaagttcagaccttctcttcctttcctttcctttcctctcctgcccattttcctgttcttctgtccttcaatacttctgtagcttcccattcatgttctcttctcccagcaggcctcattgtgtgcagaaactgtggtgggggctgtgctgtctcctccctgcctcctgcctcctgcggctgttggatttgggaatgaccttggtgagagtctcactgctccagggtctctttttggtccaaaggctagacctatagagttggatcactttttttctttccggtgaaataa

SEQ ID NO: 177748 - DNA, 2321 bp, Homo sapiens
  Payload ID: 14877
  Gene Symbol: RBM4
  Gene Name: RNA binding motif protein 4
  Uniprot ID: Q9BWF3
  ENST ID: ENST00000409406
  CDS Start-End: 778-1872
accttgctttttttcgcccaccctgtcccgcgcccgacatggctgctcttggagcctcgagatttccactgggataaccccctttcccttatatctgacagttacattctcgtttcgggaatttctcgggccgtgagacatcgtctggttaatgaatctgaagctcttttccgcggccgcgcatttcagtgttcggcaggagctaggacggtgccccgagagaggcgttcaccactccagtatttcctttatctcccactcctcgctgtctgatccgagtcgcgcgttcattacttccaaaggaaactcaaatgtagctattacaaggcccattttcccggaaatgatggctgctttggttcctacgtgaggaaaagcctgttgataatttcaggcaggcagtcagcaagcctagtagacttttgttttctgttgtcctcctagtggatagaaaagcctagtacccccatttcttcatatgctgtctttcatgcccatttctgttggaaggtatcggttcttaccaaaccctttgtctactaaggacctccctattgcagacgtcttcttattcttacaggttcatggcggctactatagcaggccttagttcactcccacttccatttgattattgtgtggaggtgtgtgtgcaggcgtgtgagagagaaaactggaaatatacattagagtgaaagtcgttgtcttttgtgaacggatgtgggcctgaggtcttttgtcagatgtcttgtttttctctcccaggctcttgtcaggatggtgaagctgttcatcggaaacctgccccgggaggctacagagcaggagattcgctcactcttcgagcagtatgggaaggtgctggaatgtgacatcattaagaattacggctttgtgcacatagaagacaagacggcagctgaggatgccatacgcaacctgcaccattacaagcttcatggggtgaacatcaacgtggaagccagcaagaataagagcaaaacctcaacaaagttgcatgtgggcaacatcagtcccacctgcaccaataaggagcttcgagccaagtttgaggagtatggtccggtcatcgaatgtgacatcgtgaaagattatgccttcgtacacatggagcgggcagaggatgcagtggaggccatcaggggccttgataacacagagtttcaaggcaaacgaatgcacgtgcagttgtccaccagccggcttaggactgcgcccgggatgggagaccagagcggctgctatcggtgcgggaaagaggggcactggtccaaagagtgtccgatagatcgttcaggccgcgtggcagacttgaccgagcaatataatgagcaatacggagcagtgcgtacgccttacaccatgagctatggggattcattgtattacaacaacgcgtacggagcgctcgatgcctactacaagcgctgccgtgctgcccggtcctatgaggcagtggcagctgcagctgcctccgtgtataattacgcagagcagaccctgtcccagctgccacaagtccagaatacagccatggccagtcacctcacctccacctctctcgatccctacgatagacacctgttgccgacctcaggagctgctgccacagctgctgctgcagcagcagccgctgctgctgttactgcagcttccacttcatattacgggcgggatcggagccccctgcgtcgcgctacagccccagtccccactgttggagagggctacggttacgggcatgagagtgagttgtcccaagcttcagcagccgcgcggaattctctgtacgacatggcccggtatgagcgggagcagtatgccgatcgggcgcggtactcagccttttaaagcttgaggtgggatgtgtgtgggctgaaattccgagctgcggttgtgcatgagaatacacccttcgtggtaccccatctccgggacgttctcggctctgtgcgttcagtccctcaggaaccgtggaccttaatttaccttgctaagttcagaccttctcttcctttcctttcctttcctctcctgcccattttcctgttcttctgtccttcaatacttctgtagcttcccattcatgttctcttctcccagcaggcctcattgtgtgcagaaactgtggtgggggctgtgctgtctcctccctgcctcctgcctcctgcggctgttggatttgggaatgaccttggtgagagtctcactgctccagggtctctttttggtccaaaggctagacctatagagttggatcactttttttctttccggtgaaataaatggtttttcaactt

SEQ ID NO: 177749 - DNA, 1337 bp, Homo sapiens
  Payload ID: 14877
  Gene Symbol: RBM4
  Gene Name: RNA binding motif protein 4
  Uniprot ID: Q9BWF3
  ENST ID: ENST00000396053
  CDS Start-End: 99-620
agagcactgctgcggccgccgccattttagcgttttgtcagaagcgtccgcgccgcgaggaggaggccctgctggtttctgtgcgggctcttgtcaggatggtgaagctgttcatcggaaacctgccccgggaggctacagagcaggagattcgctcactcttcgagcagtatgggaaggtgctggaatgtgacatcattaagaattacggctttgtgcacatagaagacaagacggcagctgaggatgccatacgcaacctgcaccattacaagcttcatggggtgaacatcaacgtggaagccagcaagaataagagcaaaacctcaacaaagttgcatgtgggcaacatcagtcccacctgcaccaataaggagcttcgagccaagtttgaggagtatggtccggtcatcgaatgtgacatcgtgaaagattatgccttcgtacacatggagcgggcagaggatgcagtggaggccatcaggggccttgataacacagagtttcaaggcaagataacccctgtgacagaaggctactgttgctgtaacaaagggcatacatacattttcaagaactgcaatttaattttggagtccaggaaaagcagaagatgctgagatgtcatatatggcgaattgcactattctaaatgtgttttgttttaatctttcacagtaaacaagctttcagaaatgatggtcacaaggggtaggatatcaaggagcagccagtcattcacccaattccaacacacctacatgtcacactgtcacagagtgagagccacagttccagtagttcccctaattgaccaaatctcccttgccaaatcaaaagaaatcattcctagaattctctaatccttctattgatgatgggaactccagacaccaatggctgggggaaaaaaaaagttaactcacaccaagttcctctacttattacagacaaagggccaaatcttggtcttgatctgtgccaatcgacttcaaaagttgtgacgttcttggatcagttctgctagggtgagacccgaatttggatccccaacagttctggagtatttcatcctggcagcctcattaacatcaggctcctgggactgcaaccaactcagggttattcagtccatttgaggttcacacctggaaggtaagtttctttaaaagtcatcgctaaaaagaggttagttgaacaaccactgcttgcagtcaaaattcattttaaaatgtcctagcaataccttttgaagaccacaatatatgaatttaatatttaactttgaaacataagagacaggttatctgatagatttataccagcttacttcggaa

SEQ ID NO: 177750 - DNA, 782 bp, Homo sapiens
  Payload ID: 14877
  Gene Symbol: RBM4
  Gene Name: RNA binding motif protein 4
  ENST ID: ENST00000510173
  CDS Start-End: 61-782
cagaagcgtccgcgccgcgaggaggaggccctgctggtttctgtgcgggctcttgtcaggatggtgaagctgttcatcggaaacctgccccgggaggctacagagcaggagattcgctcactcttcgagcagtatgggaaggtgctggaatgtgacatcattaagaattacggctttgtgcacatagaagacaagacggcagctgaggatgccatacgcaacctgcaccattacaagcttcatggggtgaacatcaacgtggaagccagcaagaataagagcaaaacctcaacaaagttgcatgtgggcaacatcagtcccacctgcaccaataaggagcttcgagccaagtttgaggagtatggtccggtcatcgaatgtgacatcgtgaaagattatgccttcgtacacatggagcgggcagaggatgcagtggaggccatcaggggccttgataacacagagtttcaaggcaaacgaatgcacgtgcagttgtccaccagccggcttaggactgcgcccgggatgggagaccagagcggctgctatcgacacctgttgccgacctcaggagctgctgccacagctgctgctgcagcagcagccgctgctgctgttactgcagcttccacttcatattacgggcgggatcggagccccctgcgtcgcgctacagccccagtccccactgttggagagggctacggttacgggcatgagagtgagttgtcccaagcttcagcagccgcgcggaattctctgtacgacatggcccggtatga

SEQ ID NO: 177751 - DNA, 654 bp, Homo sapiens
  Payload ID: 14877
  Gene Symbol: RBM4
  Gene Name: RNA binding motif protein 4
  ENST ID: ENST00000506523
  CDS Start-End: 48-500
gccgcgaggaggaggccctgctggtttctgtgcgggctcttgtcaggatggtgaagctgttcatcggaaacctgccccgggaggctacagagcaggagattcgctcactcttcgagcagtatgggaaggtgctggaatgtgacatcattaagaattacggctttgtgcacatagaagacaagacggcagctgaggatgccatacgcaacctgcaccattacaagcttcatggggtgaacatcaacgtggaagccagcaagaataagagcaaaacctcaacaaagttgcatgtgggcaacatcagtcccacctgcaccaataaggagcttcgagccaagtttgaggagtatggtccggtcatcgaatgtgacatcgtgaaagattatgccttcgtacacatggagcgggcagaggatgcagtggaggccatcaggggccttgataacacagagtttcaagacatccagctctgtcacccaagctgcagtgtggtggcatgattgtagctcactgtaactttgaactcctgagctcaagggatcctcccgccttggcctcccagagtttttgcagggactatatgtgagccactgcgtctggtcaaaatgtagtttttcaagagtaatgctttaataaactgatttttttccccca

SEQ ID NO: 177752 - DNA, 757 bp, Homo sapiens
  Payload ID: 14877
  Gene Symbol: RBM4
  Gene Name: RNA binding motif protein 4
  Uniprot ID: Q9BWF3
  ENST ID: ENST00000532968
  CDS Start-End: 180-713
aggaggccctgctggtttctgtgcgggtgagactccgagcctttccactgcctttcttgtactgtgttaaatcttctctcactcccttgggcttcgggggtgtcctggtaggtccgcagtctccacacccgtcactgagagccgacctcggtcctcggcattgcgcggctcttgtcaggatggtgaagctgttcatcggaaacctgccccgggaggctacagagcaggagattcgctcactcttcgagcagtatgggaaggtgctggaatgtgacatcattaagaattacggctttgtgcacatagaagacaagacggcagctgaggatgccatacgcaacctgcaccattacaagcttcatggggtgaacatcaacgtggaagccagcaagaataagagcaaaacctcaacaaagttgcatgtgggcaacatcagtcccacctgcaccaataaggagcttcgagccaagtttgaggagtatggtccggtcatcgaatgtgacatcgtgaaagattatgccttcgtacacatggagcgggcagaggatgcagtggaggccatcaggggccttgataacacagagtttcaaggtgaaccaccctctttgggtagagggctgaacacaaggctgtgtgcagaaaatggttggataagtaaaaggagaggtttggtaaagataacagctgttggctggctggtgatgaagaaataagtgtgggtgatggacttcttatgatgtagaatgcatgggactta

SEQ ID NO: 177753 - DNA, 1011 bp, Homo sapiens
  Payload ID: 14877
  Gene Symbol: RBM4
  Gene Name: RNA binding motif protein 4
  Uniprot ID: Q9BWF3
  ENST ID: ENST00000530235
  CDS Start-End: 187-618
cgcgaggaggaggccctgctggtttctgtgcgggtgagactccgagcctttccactgcctttcttgtactgtgttaaatcttctctcactcccttgggcttcgggggtgtcctggtaggtccgcagtctccacacccgtcactgagagccgacctcggtcctcggcattgcgcggctcttgtcaggatggtgaagctgttcatcggaaacctgccccgggaggctacagagcaggagattcgctcactcttcgagcagtatgggaaggtgctggaatgtgacatcattaagaattacggctttgtgcacatagaagacaagacggcagctgaggatgccatacgcaacctgcaccattacaagcttcatggggtgaacatcaacgtggaagccagcaagaataagagcaaaacctcaacaaagttgcatgtgggcaacatcagtcccacctgcaccaataaggagcttcgagccaagtttgaggagtatggtccggtcatcgaatgtgacatcgtgaaagattatgccttcgtacacatggagcgggcagaggatgcagtggaggccatcaggggccttgataacacagagtttcaaggtgggatgtgtgtgggctgaaattccgagctgcggttgtgcatgagaatacacccttcgtggtaccccatctccgggacgttctcggctctgtgcgttcagtccctcaggaaccgtggaccttaatttaccttgctaagttcagaccttctcttcctttcctttcctttcctctcctgcccattttcctgttcttctgtccttcaatacttctgtagcttcccattcatgttctcttctcccagcaggcctcattgtgtgcagaaactgtggtgggggctgtgctgtctcctccctgcctcctgcctcctgcggctgttggatttgggaatgaccttggtgagagtctcactgctccagggtctctttttggtccaaaggctagacctatagagttggatcactttttttctt

SEQ ID NO: 177754 - DNA, 1548 bp, Homo sapiens
  Payload ID: 14877
  Gene Symbol: RBM4
  Gene Name: RNA binding motif protein 4
  Uniprot ID: Q9BWF3
  ENST ID: ENST00000483858
  CDS Start-End: 68-601
gttttgtcagaagcgtccgcgccgcgaggaggaggccctgctggtttctgtgcgggctcttgtcaggatggtgaagctgttcatcggaaacctgccccgggaggctacagagcaggagattcgctcactcttcgagcagtatgggaaggtgctggaatgtgacatcattaagaattacggctttgtgcacatagaagacaagacggcagctgaggatgccatacgcaacctgcaccattacaagcttcatggggtgaacatcaacgtggaagccagcaagaataagagcaaaacctcaacaaagttgcatgtgggcaacatcagtcccacctgcaccaataaggagcttcgagccaagtttgaggagtatggtccggtcatcgaatgtgacatcgtgaaagattatgccttcgtacacatggagcgggcagaggatgcagtggaggccatcaggggccttgataacacagagtttcaaggtgaaccaccctctttgggtagagggctgaacacaaggctgtgtgcagaaaatggttggataagtaaaaggagaggtttggtaaagataacagctgttggctggctggtgatgaagaaataagtgtgggtgatggacttcttatgatgtagaatgcatgggacttaggggctttaccttaggcaaatgtctcctggagaaaagccactcaccttttatttggagcccctacggcttttgtgcttatcagtgcagaaacccttttctttgaaggctttctgagttactgggccttttttattttttatttttttgtagtagagcacagttcagagttcctcactctgaatttattgccctcagcacaggatcagaattctgcattttacgtgaagaacctctcaaaaacatgtcaagcgacacttataggaccagaatccttgttaagctgtcctaccttacacaaactctttaaagggttacagctcttgttgcttttatattatacctgtaccaagggattgtattttgagtttaaggccactctagaattacaaggctgattttaggacttcctggggaggaggcactggggttttaggggcggtaatgactgtcttttcattggtttggggggctggactttataagattttggtgaatagagcacttagatttgtgttatcttggagtcttaaccaaatgaatcttttgtgcctggagggcagcatgggtgatatgtggattgtcacttcatttggaagcatctcaaatccccagcattttgaatgcctacatgttgctcaaaggaaatgcttgttagagcattttggattttgaattttcagatttgggatgctaaaatggtacgtagaacgcaaatattccaaaatctgaggtctgaagcaacagtggcagttcaggggtggtgatcatggtgagttgctatctgaactcttctttcacctcctttgggttcccagtgtcaaaaagagtggtgtccttttttagcttaattaagcaggactgaacaaaaataataaaaaataaaaaaagccttattcaaatta

SEQ ID NO: 177755 - DNA, 582 bp, Homo sapiens
  Payload ID: 14877
  Gene Symbol: RBM4
  Gene Name: RNA binding motif protein 4
  ENST ID: ENST00000578778
  CDS Start-End: 75-542
ttttagcgttttgtcagaagcgtccgcgccgcgaggaggaggccctgctggtttctgtgcgggctcttgtcaggatggtgaagctgttcatcggaaacctgccccgggaggctacagagcaggagattcgctcactcttcgagcagtatgggaaggtgctggaatgtgacatcattaagaattacggctttgtgcacatagaagacaagacggcagctgaggatgccatacgcaacctgcaccattacaagcttcatggggtgaacatcaacgtggaagccagcaagaataagagcaaaacctcaacaaagttgcatgtgggcaacatcagtcccacctgcaccaataaggagcttcgagccaagtttgaggagtatggtccggtcatcgaatgtgacatcgtgaaagattatgccttcgtacacatggagcgggcagaggatgcagtggaggccatcaggggccttgataacacagagtttcaagtagagacggggtttcaccgtgttaaccaggatggtctcgatctcctgacctcttgatccgcctgccttggcctcccaaagcgctgggattacaggc

SEQ ID NO: 177756 - DNA, 1662 bp, Homo sapiens
  Payload ID: 14878
  Gene Symbol: RBM41
  Gene Name: RNA binding motif protein 41
  Uniprot ID: Q96IZ5
  ENST ID: ENST00000372479
  CDS Start-End: 32-1273
acccaagttggaggtaggggcctgtggaaacatgaagagggtaaacagctgtgtgaagagtgatgagcatgtcctggaggagctggaaacagaaggggagaggcagctgaaaagcctccttcagcatcaacttgatacttctgtctccattgaggaatgtatgtctaagaaagagagctttgctcctggtactatgtacaagccctttgggaaggaagcagctgggactatgactttgtcccaattccagacactgcatgagaaggaccaggaaactgcttctctcagggaattagggcttaatgaaacagaaatcttgatctggaagagccatgtttctggtgaaaagaagacaaaactgagggcaactcctgaagcaatacagaaccgtcttcaagatattgaagaaaggatctcggagcgtcagcgcattctttgcctgccacagagatttgcaaagagcaaacagctgacccggcgagaaatggaaatagaaaagtctttatttcagggagctgatcgtcactccttccttaaggctctttattaccaagatgaaccccaaaagaagaacaaaggtgatcccatgaacaacctggaaagtttttaccaagagatgataatgaaaaaacgtcttgaagagtttcaacttatgagaggtgaaccctttgcttcccactcactggtctcagctacatcagtgggtgatagtggcacagctgagagcccatcattactccaggacaagggaaaacaggcagcacagggtaaaggccccagtctccatgtggcaaatgttattgatttttcacctgagcagtgttggactgggcctaagaagctgacgcagccaatagaatttgtcccagaagatgaaatccagagaaatcgtttgtcagaggaagagatccgaaaaattcctatgttttcttcatataatccaggggaaccaaacaaggtattatacctgaagaaccttagccctcgggtgactgaaagagatcttgtgtcattgttcgctcggttccaggagaaaaaaggacctccaattcaattccgaatgatgactggacgaatgaggggccaggcttttatcacctttcccaataaggagatagcatggcaagcattgcatctagtaaatggatacaaactacatgggaaaatattggtgatagagtttggaaagaacaaaaagcaacggtcaaatctccaagcgacttctctcatatcatgtgctacaggtagcactacagaaattagtggtagctagaatatatataaattgtgggtcctggatggtctttcttgaattggaatcttggatctaggatttatgtatagacaccagtttgtttggagttgaagaggaaaaactaactgagggaggggaaaaaagtaatttcagcttttggagagaactggtagaaaacattttctattatataattgaagactatataggacagatgatatgctgagtatgaagggtaaagtgcaaagagtattattttctcaggatgaattacaacggattattcctaaggatttttaaaaatctttataatttttctggggtcctcaatatttgtctctagagataacattctttcttagactgcttcgtatacacagaaataaaaaactaattaaatgttgaaa

SEQ ID NO: 177757 - DNA, 2579 bp, Homo sapiens
  Payload ID: 14878
  Gene Symbol: RBM41
  Gene Name: RNA binding motif protein 41
  Uniprot ID: Q96IZ5
  ENST ID: ENST00000372487
  CDS Start-End: 28-1245
aagttggaggtaggggcctgtggaaacatgaagagggtaaacagctgtgtgaagagtgatgagcatgtcctggaggagctggaaacagaaggggagaggcagctgaaaagcctccttcagcatcaacttgatacttctgtctccattgaggaatgtatgtctaagaaagagagctttgctcctggtactatgtacaagccctttgggaaggaagcagctgggactatgactttgtcccaattccagacactgcatgagaaggaccaggaaactgcttctctcagggaattagggcttaatgaaacagaaatcttgatctggaagagccatgtttctggtgaaaagaagacaaaactgagggcaactcctgaagcaatacagaaccgtcttcaagatattgaagaaaggatctcggagcgtcagcgcattctttgcctgccacagagatttgcaaagagcaaacagctgacccggcgagaaatggaaatagaaaagtctttatttcagggagctgatcgtcactccttccttaaggctctttattaccaagatgaaccccaaaagaagaacaaaggtgatcccatgaacaacctggaaagtttttaccaagagatgataatgaaaaaacgtcttgaagagtttcaacttatgagaggtgaaccctttgcttcccactcactggtctcagctacatcagtgggtgatagtggcacagctgagagcccatcattactccaggacaagggaaaacaggcagcacagggtaaaggccccagtctccatgtggcaaatgttattgatttttcacctgagcagtgttggactgggcctaagaagctgacgcagccaatagaatttgtcccagaagatgaaatccagagaaatcgtttgtcagaggaagagatccgaaaaattcctatgttttcttcatataatccaggggaaccaaacaaggtattatacctgaagaaccttagccctcgggtgactgaaagagatcttgtgtcattgttcgctcggttccaggagaaaaaaggacctccaattcaattccgaatgatgactggacgaatgaggggccaggcttttatcacctttcccaataaggagatagcatggcaagcattgcatctagtaaatggatacaaactacatgggaaaatattggtgatagagtttggaaagaacaaaaagcaacggtcaaatctccaagcgacttctctcatatcatgtgctacaggttgaagaagctgagtggaagcaaaactgtcttgtactaaagaactgactccagatggtaagacaaatccacaggaacaaatggagagaacgtgaaataggaaataagtttaatataaaaaaactataaacatatacttactcttctctcagcttcttttaaagatgtaaaattatattaagtaattataataatgtgtgttgggtttgtaatgtataggaataacatatataacaataataccacaaagcgggggatgggtttatataggaatagggttgttacattggaattaagttagtgtttatctgaagcctattctgtttagttaagatgtgtatggtaagccctagagcaaccactgaggaaataacttttaaaaaatcaaaaatattattaaatgtaaatatcacattatgaaataatgcaaaagaaggaatggagaagcaaaaagcttgaggcatatcaaaaacaataaaatggcagtcataagtcttcctatatcaaaataacaatgtgcatggattaagcaatactataaaaggcagagatgtcagaaacaagtctgattccacttcatgccatctatttgagacacactttagaagatagaaagagattaaaggtaaaaggatggaaaacaaatatatcacacagacaacagccataagaaagctggagtggctattctaataccagacaaaatagacttaaaaaaatgttactggagataaagagtaaaatgttacaatgataaaagggtcaatacatcaggaagatgtaacaactataaatatatatgcatctaacagtagagcccaaaatacatgaagcaaaaactgaaaggaaaggagaaacagataagtccataaaaagagttggaatattcaatacccctttttcaataatagagcacctagacagaagataaaccaggaaatagaagacttgaacaacattataaggcaaattgacctaaaagacatctatagaactttccacccaacatcagaatacatattcttctcgagtgcatatgaaacatctccaaaataggtcataagttaaagcataaaacaagccttaataaatataagtagactgaaatcatgcaaagcatgccctctgaccacatgggatgaagttagaaaacaatgaaaagttgggaaactcacaaatatgtggaaatcagacacacttgtaagtgactggctgggtgcagtagctcacgcctgaaatctcagcactttggtaggccgaagtgggaggattccttggatcccttgagaccaggaattcaagaccagcctgggcaacacagcaagaccctgtcattacc

SEQ ID NO: 177758 - DNA, 680 bp, Homo sapiens
  Payload ID: 14878
  Gene Symbol: RBM41
  Gene Name: RNA binding motif protein 41
  ENST ID: ENST00000434854
  CDS Start-End: 1-610
ggtaaacagctgtgtgaagagtgatgagcatgtcctggaggagctggaaacagaaggggagaggcagctgaaaagcctccttcagcatcaacttgatacttctgtctccattgaggaatgtatgtctaagaaagagagctttgctcctggtactatgtacaagccctttgggaaggaagcagctgggactatgactttgtcccaattccagacactgcatgagaaggaccaggaaactgcttctctcagggaattagggcttaatgaaacagaaatcttgatctggaagagccatgtttctggtgaaaagaagacaaaactgagggcaactcctgaagcaatacagaaccgtcttcaagatattgaagaaaggatctcggagcgtcagcgcattctttgcctgccacagagatttgcaaagagcaaacagctgacccggcgagaaatggaaatagaaaagtctttatttcagggagctgatcgtcactccttccttaaggctctttattaccaagcataccacaaaaagacaagtgcagacaagtacatgacctcaatgaagaggaagataaaattaggcacaaaaggtattatacctgaagaaccttagccctcgggtgactgaaagagatcttgtgtcattgttcgctcggttccaggagaaaaaaggacctccaatt

SEQ ID NO: 177759 - DNA, 3315 bp, Homo sapiens
  Payload ID: 14878
  Gene Symbol: RBM41
  Gene Name: RNA binding motif protein 41
  Uniprot ID: Q96IZ5
  ENST ID: ENST00000495517
  CDS Start-End: 51-986
tgaggtccgcggcctatttacccaagttggaggtaggggcctgtggaaacatgaagagggtaaacagctgtgtgaagagtgatgagcatgtcctggaggagctggaaacagaaggggagaggcagctgaaaagcctccttcagcatcaacttgatacttctgtctccattgaggaatgtatgtctaagaaagagagctttgctcctggtactatgtacaagccctttgggaaggaagcagctgggactatgactttgtcccaattccagacactgcatgagaaggaccaggaaactgcttctctcagggaattagggcttaatgaaacagaaatcttgatctggaagagccatgtttctggtgaaaagaagacaaaactgagggcaactcctgaagcaatacagaaccgtcttcaagatattgaagaaaggatctcggagcgtcagcgcattctttgcctgccacagagatttgcaaagagcaaacagctgacccggcgagaaatggaaatagaaaagtctttatttcagggagctgatcgtcactccttccttaaggctctttattaccaagcataccacaaaaagacaagtgcagacaagtacatgacctcaatgaagaggaagataaaattaggcacaaaagatgaaccccaaaagaagaacaaaggtgatcccatgaacaacctggaaagtttttaccaagagatgataatgaaaaaacgtcttgaagagtttcaacttatgagaggacttaccagttttcccagagaagacttccaaaatctttcttacgagggtactaccagcgttctaggagccaaatggcagaaaaggactgggaggacctcaacatttagtattctcttagtttccttgctttcagaaacagtgttcacatcttcagccatgtatggcattccccatcttctgacaatgagcctcaagttttctaccaggattggcaagttatcttttaccccatagcatattgtgagggagggtatttaaaaatcatattggcttttagacagccttcaactgatttgccttattttaaccccatcccttcacatttatttctgaaggtaagtgaaattatcagttcctgaactatttaaggattcttaagtggtgacaggtgtgttcttggctctctccactaccagtttaaaattcagctttcttcagtgtgctgagttggttcctgctcatccaattatttttcatcttccagattattattgctgttgtctccttttcttgttcctcctgaccttgttgatttgtgtttttttttttttttttttaagtgcctatagttttagagagttttctggatggaatgaaattaaatgaatgtgttcaatccaccatttttatgtgaaactaattctaatcataatgaaagagttttcttacggctgagcatggtgtctcacgcctgtaatcccagcattttgggaggccaaggcgggtggatcacctgagtttgggagttcaagaccagcctggacaacatggtgaaaccccacgtctactaaaaatacaaaaattagccaggtgtggtggcacatgactgtaatcccagctactcgggaggctgaggcatgagaatcacttgagcctgggaggccaaggttgcagtgagcagagattgcgccactgcactccagcctgggtgacagagtgagactttgtctcaaaaagaaaaaaacaaagagtgccttacctcctttatatgatattttggttgatcctcaatttgttttaggtattatacctgaagaaccttagccctcgggtgactgaaagagatcttgtgtcattgttcgctcggttccaggagaaaaaaggacctccaattcaattccgaatgatgactggacgaatgaggggccaggcttttatcacctttcccaataaggagatagcatggcaagcattgcatctagtaaatggatacaaactacatgggaaaatattggtgatagagtttggaaagaacaaaaagcaacggtcaaatctccaagcgacttctctcatatcatgtgctacaggtagcactacagaaattagtggtagctagaatatatataaattgtgggtcctggatggtctttcttgaattggaatcttggatctaggatttatgtatagacaccagtttgtttggagttgaagaggaaaaactaactgagggaggggaaaaaagtaatttcagcttttggagagaactggtagaaaacattttctattatataattgaagactatataggacagatgatatgctgagtatgaagggtaaagtgcaaagagtattattttctcaggatgaattacaacggattattcctaaggatttttaaaaatctttataatttttctggggtcctcaatatttgtctctagagataacattctttcttagactgcttcgtatacacagaaataaaaaactaattaaatgttgaaatatttctttactagagcccatttgccatatttcatccacctagtaaataaaagagtaggacccccaggcctaagcatcaacaaatgctattaagtcagaactatcagcagtaatagtaggtagtttcataagtcagttgacttatttaatgaatgcttcctccacaagttatcagtcttcaaaaagctatatatttttctagtgaaatattttagatcaaaatgttggtgttctcacagccatttaagctagcaaccattgagtatcattgaattcatagcaataaacattgattaagtgtctaatatatgttaaatattaggcatatgaattttagaagaggaacatacaagcaaagaatgccaaacggaaatggaaataaagcgttctctagaaaagaggatgccagtcacaaatcccccagttgtttgtttatggttgctggaaaataaaaaaacaatatacagagaggaagtagtacaaactggagtcagacctgtacagccacacttaacattctatgaccttggcaagtcacttaatctgagcctcacatttttcatctataaagtgaggataataatgctacttacctcactgggttgtgaagatgaactgagatattatccaggctgaagaacagaaaggaaaacaatgaataaaattgaacaagagtatagaacctgtgtgacaccattaagcattcctacatatttctaatgggagtacaggaaaaaaggaaaagaaatgaaggagcagaaaaatattctaagaaataatggctataaatacccccgatttgatgagagacattaacctatacatcccagaagaaaaa

SEQ ID NO: 177760 - DNA, 1680 bp, Homo sapiens
  Payload ID: 14879
  Gene Symbol: RBM42
  Gene Name: RNA binding motif protein 42
  Uniprot ID: Q9BTD8
  ENST ID: ENST00000262633
  CDS Start-End: 106-1548
gtcatcctcgggagcccacccggacgaagggggagagtagacagcagaaccagcggcggcggctaagcagagactgtagtagcggcgacagcgacgacggcagcgatggctggggcggggccagccccgggactcccgggtgcaggaggacccgtggtcccgggtcctggcgctggcatcccgggcaaaagcggcgaggaacgcttgaaggaaatggaggcggagatggccctgtttgagcaggaagttctgggggctccagtacctggaatcccaactgctgtgcctgcggtgcccactgtccccacggtccccacagtagaagcgatgcaggtcccagcggctcctgtgatccgcccaattatcgcgaccaacacataccagcaggtccagcagactctggaggcccgagcagctgctgcagccacagtagttcctcccatggtgggtggccctccttttgtaggccctgttggctttggccctggtgatcggagtcacctggacagcccagaggctcgagaagccatgttcctgcggcgggcagctgtggccccccagagggcccctatcctgcgtccagccttcgtcccccacgtgctacagagagcagattccgctctctcctctgcagcagccggcccccgccctatggccctacggccccctcaccaggccctcgtgggcccccctctgcctgggccccctggaccacccatgatgctgccaccaatggctcgggctccagggcccccgctgggctccatggctgcactgaggccccctctggaagagccagcagcaccccgagagctgggcctaggcctggggttgggcctgaaagagaaggaagaggcagtggtggcggcggcggctgggctggaggaggctagcgcggctgtggccgtgggggcaggaggtgccccagctggccctgcagtcattgggcccagcctgccgctggccctggccatgccattgcccgagcctgagcccctgcccctcccgttggaggtcgtccgcggcctcctgcccccgctgcgcattcctgaactcctgtccctgcgtcctcggccccggccccctcggccagagccacccccaggcctcatggctcttgaggtcccagagcccctgggtgaagacaagaagaaggggaagccagagaaattgaaacggtgcattcgcacagcggcagggagcagctgggaggaccccagcctgctggagtgggatgcagatgacttccggatcttctgtggggatctgggcaatgaggtgaacgatgacatcttggcacgcgccttcagccgcttcccatccttccttaaggccaaggtgatccgtgacaagcgcacaggcaagaccaagggctacggcttcgtcagcttcaaggaccccagcgactacgtgcgcgccatgcgtgagatgaatgggaagtatgtgggctcgcgccccatcaagcttcgcaagagcatgtggaaggaccggaatctggacgtggtccgcaagaagcagaaggaaaagaagaagctgggcctgagatagggtctgtggccaggcacccgctcccacctggccgggcgctggctcctccctcagttctctttggaaaacccccagctgtccacccatcccctgccccaaaaccagtttcaataaatttacgttcatttccac

SEQ ID NO: 177761 - DNA, 1609 bp, Homo sapiens
  Payload ID: 14879
  Gene Symbol: RBM42
  Gene Name: RNA binding motif protein 42
  Uniprot ID: Q9BTD8
  ENST ID: ENST00000588161
  CDS Start-End: 125-1477
cccgtcgcttttgctggacgtcatcctcgggagcccacccggacgaagggggagagtagacagcagaaccagcggcggcggctaagcagagactgtagtagcggcgacagcgacgacggcagcgatggctggggcggggccagccccgggactcccgggtgcaggaggacccgtggtcccgggtcctggcgctggcatcccgggcaaaagcggcgaggaacgcttgaaggaaatggaggcggagatggccctgtttgagcaggaagttctgggggctccagtacctggaatcccaactgctgtgcctgcggtgcccactgtccccacggtccccacagtagaagcgatgcaggtcccagcggctcctgtgatccgcccaattatcgcgaccaacacataccagcaggtccagcagactctggaggcccgagcagctgctgcagccacagtagttcctcccatggtgggtggccctccttttgtaggccctgttggctttggccctggtgatcggagtcacctggacagcccagaggctcgagaagccatgttcctgcggcgggcagccggcccccgccctatggccctacggccccctcaccaggccctcgtgggcccccctctgcctgggccccctggaccacccatgatgctgccaccaatggctcgggctccagggcccccgctgggctccatggctgcactgaggccccctctggaagagccagcagcaccccgagagctgggcctaggcctggggttgggcctgaaagagaaggaagaggcagtggtggcggcggcggctgggctggaggaggctagcgcggctgtggccgtgggggcaggaggtgccccagctggccctgcagtcattgggcccagcctgccgctggccctggccatgccattgcccgagcctgagcccctgcccctcccgttggaggtcgtccgcggcctcctgcccccgctgcgcattcctgaactcctgtccctgcgtcctcggccccggccccctcggccagagccacccccaggcctcatggctcttgaggtcccagagcccctgggtgaagacaagaagaaggggaagccagagaaattgaaacggtgcattcgcacagcggcagggagcagctgggaggaccccagcctgctggagtgggatgcagatgacttccggatcttctgtggggatctgggcaatgaggtgaacgatgacatcttggcacgcgccttcagccgcttcccatccttccttaaggccaaggtgatccgtgacaagcgcacaggcaagaccaagggctacggcttcgtcagcttcaaggaccccagcgactacgtgcgcgccatgcgtgagatgaatgggaagtatgtgggctcgcgccccatcaagcttcgcaagagcatgtggaaggaccggaatctggacgtggtccgcaagaagcagaaggaaaagaagaagctgggcctgagatagggtctgtggccaggcacccgctcccacctggccgggcgctggctcctccctcagttctctttggaaaacccccagctgtccacccatcccctgccccaaaaccagtttcaataaatttacgttcatttccac

SEQ ID NO: 177762 - DNA, 771 bp, Homo sapiens
  Payload ID: 14879
  Gene Symbol: RBM42
  Gene Name: RNA binding motif protein 42
  ENST ID: ENST00000586618
  CDS Start-End: 87-641
ccggacgaagggggagagtagacagcagaaccagcggcggcggctaagcagagactgtagtagcggcgacagcgacgacggcagcgatggctggggcggggccagccccgggactcccgggtgcaggaggacccgtggtcccgggtcctggcgctggcatcccgggcaaaagcggcgaggaacgcttgaaggaaatggaggcggagatggccctgtttgagcaggaagttctgggggctccagtacctggaatcccaactgctgtgcctgcggtgcccactgtccccacggtccccacagtagaagcgatgcaggtcccagcggctcctgtgatccgcccaattatcgcgaccaacacataccagcaggtccagcagactctggaggcccgagcagctgctgcagccacagtagttcctcccatggccaaggtgatccgtgacaagcgcacaggcaagaccaagggctacggcttcgtcagcttcaaggaccccagcgactacgtgcgcgccatgcgtgagatgaatgggaagtatgtgggctcgcgccccatcaagcttcgcaagagcatgtggaaggaccggaatctggacgtggtccgcaagaagcagaaggaaaagaagaagctgggcctgagatagggtctgtggccaggcacccgctcccacctggccgggcgctggctcctccctcagttctctttggaaaacccccagctgtccacccatcccctgccccaaaaccagtttcaataaatttacgttcatttcc

SEQ ID NO: 177763 - DNA, 1487 bp, Homo sapiens
  Payload ID: 14879
  Gene Symbol: RBM42
  Gene Name: RNA binding motif protein 42
  ENST ID: ENST00000589871
  CDS Start-End: 24-1400
cggcgacagcgacgacggcagcgatggctggggcggggccagccccgggactcccgggtgcaggaggacccgtggtcccgggtcctggcgctggcatcccgggcaaaagcggcgaggaacgcttgaaggaaatggaggcggagatggccctgtttgagcaggaagttctgggggctccagtacctggaatcccaactgctgtgcctgcggtgcccactgtccccacggtccccacagtagaagcgatgcaggtcccagcggctcctgtgatccgcccaattatcgcgaccaacacataccagcaggtccagcagactctggaggcccgagcagctgctgcagccacagtagttcctcccatggtgggtggccctccttttgtaggccctgttggctttggccctggtgatcggagtcacctggacagcccagaggctcgagaagccatgttcctgcggcgggcagattccgctctctcctctgcagcagccggcccccgccctatggccctacggccccctcaccaggccctcgtgggcccccctctgcctgggccccctggaccacccatgatgctgccaccaatggctcgggctccagggcccccgctgggctccatggctgcactgaggccccctctggaagagccagcagcaccccgagagctgggcctaggcctggggttgggcctgaaagagaaggaagaggcagtggtggcggcggcggctgggctggaggaggctagcgcggctgtggccgtgggggcaggaggtgccccagctggccctgcagtcattgggcccagcctgccgctggccctggccatgccattgcccgagcctgagcccctgcccctcccgttggaggtcgtccgcggcctcctgcccccgctgcgcattcctgaactcctgtccctgcgtcctcggccccggccccctcggccagagccacccccaggcctcatggctcttgaggtcccagagcccctgggtgaagacaagaagaaggggaagccagagaaattgaaacggtgcattcgcacagcggcagggagcagctgggaggaccccagcctgctggagtgggatgcagatgacttccggatcttctgtggggatctgggcaatgaggtgaacgatgacatcttggcacgcgccttcagccgcttcccatccttccttaaggccaaggtgatccgtgacaagcgcacaggcaagaccaagggctacggcttcgtcagcttcaaggaccccagcgactacgtgcgcgccatgcgtgagatgaatgggaagtatgtgggctcgcgccccatcaagcttcgcaagagcatgtggaaggaccggaatctggacgtggtccgcaagaagcagaaggaaaagaagaagctgggcctgagatagggtctgtggccaggcacccgctcccacctggccgggcgctggctcctccctcagttctctttggaaaacccccagctgtccacccat

SEQ ID NO: 177764 - DNA, 1469 bp, Homo sapiens
  Payload ID: 14879
  Gene Symbol: RBM42
  Gene Name: RNA binding motif protein 42
  ENST ID: ENST00000592202
  CDS Start-End: 88-1368
cccggacgaagggggagagtagacagcagaaccagcggcggcggctaagcagagactgtagtagcggcgacagcgacgacggcagcgatggctggggcggggccagccccgggactcccgggtgcaggaggacccgtggtcccgggtcctggcgctggcatcccgggcaaaagcggcgaggaacgcttgaaggaaatggaggcggagatggccctgtttgagcaggaagttctgggggctccagtacctggaatcccaactgctgtgcctgcggtgcccactgtccccacggtccccacagtagaagcgatgcaggtcccagcggctcctgtgatccgcccaattatcgcgaccaacacataccagcaggtccagcagactctggaggcccgagcagctgctgcagccacagtagttcctcccatggtgggtggccctccttttgtaggccctgcagccggcccccgccctatggccctacggccccctcaccaggccctcgtgggcccccctctgcctgggccccctggaccacccatgatgctgccaccaatggctcgggctccagggcccccgctgggctccatggctgcactgaggccccctctggaagagccagcagcaccccgagagctgggcctaggcctggggttgggcctgaaagagaaggaagaggcagtggtggcggcggcggctgggctggaggaggctagcgcggctgtggccgtgggggcaggaggtgccccagctggccctgcagtcattgggcccagcctgccgctggccctggccatgccattgcccgagcctgagcccctgcccctcccgttggaggtcgtccgcggcctcctgcccccgctgcgcattcctgaactcctgtccctgcgtcctcggccccggccccctcggccagagccacccccaggcctcatggctcttgaggtcccagagcccctgggtgaagacaagaagaaggggaagccagagaaattgaaacggtgcattcgcacagcggcagggagcagctgggaggaccccagcctgctggagtgggatgcagatgacttccggatcttctgtggggatctgggcaatgaggtgaacgatgacatcttggcacgcgccttcagccgcttcccatccttccttaaggccaaggtgatccgtgacaagcgcacaggcaagaccaagggctacggcttcgtcagcttcaaggaccccagcgactacgtgcgcgccatgcgtgagatgaatgggaagtatgtgggctcgcgccccatcaagcttcgcaagagcatgtggaaggaccggaatctggacgtggtccgcaagaagcagaaggaaaagaagaagctgggcctgagatagggtctgtggccaggcacccgctcccacctggccgggcgctggctcctccctcagttctctttggaaaacccccagctgtccacccatcccctgccccaaaa

SEQ ID NO: 177765 - DNA, 1328 bp, Homo sapiens
  Payload ID: 14879
  Gene Symbol: RBM42
  Gene Name: RNA binding motif protein 42
  ENST ID: ENST00000589559
  CDS Start-End: 78-1238
gggggagagtagacagcagaaccagcggcggcggctaagcagagactgtagtagcggcgacagcgacgacggcagcgatggctggggcggggccagccccgggactcccgggtgcaggaggacccgtggtcccgggtcctggcgctggcatcccgggcaaaagcggcgaggaacgcttgaaggaaatggaggcggagatggccctgtttgagcaggaagttctgggggctccagtacctggaatcccaactgctgtgcctgcggtgcccactgtccccacggtccccacagtagaagcgatgcaggtcccagcggctcctgtgatccgcccaattatcgcgaccaacacataccagcaggtccagcagactctggaggcccgagcagctgctgcagccacagtagttcctcccatggtgggtggccctccttttgtaggccctgttggctttggccctggtgatcggagtcacctggacagcccagaggctcgagaagccatgttcctgcggcgggcagcagccggcccccgccctatggccctacggccccctcaccaggccctcgtgggcccccctctgcctgggccccctggaccacccatgatgctgccaccaatggctcgggctccagggcccccgctgggctccatggctgcactgaggccccctctggaagagccagcagcaccccgagagctgggcctaggcctggggttgggcctgaaagagaaggaagaggcagtggtggcggcggcggctgggctggaggaggctagcgcggctgtggccgtgggggcaggaggtgccccagctggccctgcagtcattgggcccagcctgccgctggccctggccatgccattgcccgagcctgagcccctgcccctcccgttggaggtcgtccgcggcctcctgcccccgctgcgcattcctgaactcctgtccctgcgtcctcggccccggccccctcggccagagccacccccaggcctcatggctcttgaggtcccagagcccctgggtgaagacaagaagaaggggaagccagagaaattgaaacggtgcattcgcacagcggcagggagcagctgggaggaccccagcctgctggagtgggatgcagggaagtatgtgggctcgcgccccatcaagcttcgcaagagcatgtggaaggaccggaatctggacgtggtccgcaagaagcagaaggaaaagaagaagctgggcctgagatagggtctgtggccaggcacccgctcccacctggccgggcgctggctcctccctcagttctctttggaaaacccccagctgtccacccatccc

SEQ ID NO: 177766 - DNA, 4192 bp, Homo sapiens
  Payload ID: 14880
  Gene Symbol: RBM43
  Gene Name: RNA binding motif protein 43
  Uniprot ID: Q6ZSC3
  ENST ID: ENST00000331426
  CDS Start-End: 153-1226
cgggtggaaggaccgcccttttcttcgtagcctccaagggagctggaacaaaaaacgaaaccaaaacctgcctgctcgctcctctccccatcgcctgcgttccgctggttgtgggctttctgcggccgctgagggcgcgtctcccctccgccatggcatcagttttgaatgtcaaggaatccaaagctcctgaaagaacggttgtagttgctggtcttccagttgacctttttagtgatcaattattggccgtattagtgaagagccacttccaagacattaagaatgagggcggagatgttgaagatgtgatatatccgacaagaaccaagggagttgcatatgtaatattcaaagaaaaaaaagttgcagagaatgtcatcagacaaaagaaacactggctagcaaggaagactagacatgctgaactcacagtctctctcagagtctctcattttggtgacaagatcttcagctctgtaaatgccatccttgatctttctgtttttggaaaagaagttactctagaaactctggtaaaagacctgaaaaaaaaaatcccgagtttaagcttcagtcctttgaaacccaatggaagaatctccgtggaaggatcatttctggctgtcaagaggctcagagaatctttgctagcaagagcatgttctctcttagaaaaagacagaaattttaccagtgaggagagaaagtggaatagacaaaatccccagaggaatctacagagaagtaataactctttggcatcagtcaggaccttagtacctgagactgctagaagtggagaaatgcttgtgcttgacacagatgtttttctttacctgaaacacaagtgtggatcttatgaaagcacactgaaaaaattccacattctgagtcaggagaaagtggatggtgaaatcaccacaatttgtctaaaaagcattcaagttggttctcagccaaacaatgcaaaacatgtaaaagagctcattgaggaatggtcacatgctctttacttaaagcttagaaaagagacatttattttggaaggaaaggaaaatagagagaaaagaatgatcaaaagggcatgtgaacaattaagttcgagataccttgaagtcctgattaacctttataggacacacattgacattataggatcttcttctgacacttacctgtttaaaaaaggggtcatgaaattaatagggcaaaaggttagttaataaaatctcagcaatatagtcataagggctgctttctcttgctgagcagtgaccattgccatgaatgaggctagctttacacaccgtatctcatgaatccttatagtcatccttctttgtcagtgttgactatcctcatgttacagcggaagaaactaggatttggagaagttaaaacacttttctgaagttatccagttgacaaagaatgaggctgtggcttagcccagtctatctgattacacagataatatctaaggaataaaactttgaaaaaaactcaccaaacttttttttttttttttttgagatggagtctcgctctgttgtccaggctggagtgcagtggcgtgatctcggctcactgcaacgtccacctcctgggttcacaccattctcctgcctcaacctctggagtagctgggactacaggtgcccaccaccacgcccggctaatctttttgtatttttttagtagagatggggtttcaccgtgttagtcaggatggtctccatctcctgaccttgtgatccacccgcctcggcctcccaaagtgctgggattacaggcgtgagccactgcgcccagcaaactcaccaaactttgaaggaatcttactttctctgtaactccaaattattagagaataataattattaagaagtagccttaacatatgagaaatttgaaaggtgattattatgccatgggcaatttcttaacatttacagtttgtgtttactccgtgtagaattagaatactggcaaaaatcactggggaaactacttagatggaaagcatatcttatgcaggtaatcattatttgactaaattctattgtttcaaggctgctggccacataggatgtttttactatttttttagcctaagtgcttacataaaatggtgattcttttataattgtgcaagttgataatattaattgagtcattcttgtcacatccaactaaaacagactcaagaagctagggggaaaaagtacttgggacacataatattgctccaagaatgtaattctctgtgagcctggctactgaaactgcttgctgtaacctgagaccagttttgtctatagctgctgagataacttgctgtaactctaggactaattttacctatggccattgcccaccagttggagcttgccagctccccagggctttactaataccaatgaactttctcttaagatcacaagttggccgggcgtggtgactcatacctgtaatcccagcactttgggaggccgaggcgggtggatcacaaggtcaggagattgagaccatcctggctaacatggtaaaaccccatctctactaaaaatacaaaaattagccgggcatggtggtgggcgcctgtagtcccacctactcgggaggctagaggctgaggcaggagaatggcgtgaacccgggaggtggagcttgcagtgagccaagactgcactactgcactccagcctgggtgacagagcgagactccgtctcaaaaaaaaaaaaaaaaaaaaaagaaagaccacaagtaacattcttagttttaaataaaaccctcaaccttctctttgtttgttggacatactaaagatcacctagaattgaaattctttcttctcaaaacattaaatttagttttgtgtctacattttcattttgactttgacatgcatggtgtcagaagtgggatacaaagctgactcacctcatggagaatcattggcctttggagttatggcatgaggtacccatgttggggccctttgaaccccctacacccccaccactttcacaggtaatcctttctccctccagtaagtatctcttggacagaactctcagatatggttcgagttctgttttatttgggatatgattagggagaggtctttccccctcttgtttggtagatctgttgggtagaattattttccccctgttgacctcagctgcgaggtttggaccttgaggcttggatgagggaatttttccctttctttggagaaggcttatcattcttactggtaagcatgtattttattttctgtcctgtcttgtatttatttggcctttgtgtattcagtgcttgcatttacttggcttttgcatagttgacattaaatcagagcacccacgaaatgagctctcaaagttcaaaggcatgccagaatattttctggaactccagctagtaacatattcaaacattacagggatcatttagtctgtttttcttaaaactgaactaaaagatggaggctataaaatcatacactccaaataagatatgcatatttcattgatatcttgaggctaaaaaaaaataaaaacaaaaacaaaacacattcaggatacaaatattgccttgttaaaaaatactgtctcaaaggtggctgaaactttcttttctagacctttcccctccccttcttacagtatcccctctttatccttctctaaacagctattctaacatactacttaaataaaaacacttgaaaaccagcagatataaaacaaagtcattttgaccttcctactgttttttttttaaagcaaagattaaattcccatgtaaaaccttcctccctatacaaaaaagaatagcagcatttttatcttcaatgacaaagaattgagtccaagaaaatactgtataaaccttgttaaaaatcactcttgtcttttggtcctactcacataattcagcacactttcacagttaactattttttgttcaatttagtgcactggtgagtgactcaaactgctttatcccaaatttgatttacagcctttataagattgcctattaaaaaagcttaaagcttatccttagcccattttgtcagaaaaataatttgcatctaatcatttttataaactggtgaatttacgtgttttactatatcatgactaaaattctaaaataaaagttttaatatcttta

SEQ ID NO: 177767 - DNA, 579 bp, Homo sapiens
  Payload ID: 14880
  Gene Symbol: RBM43
  Gene Name: RNA binding motif protein 43
  ENST ID: ENST00000409092
  CDS Start-End: 52-258
ccgctggttgtgggctttctgcggccgctgagggcgcgtctcccctccgccatggtggcggcattgcgcgctcctgaaattcacgtacggcggtgcagtataggcccgctccagaggctcaggactaggctgtcacctcccacacccactgcccaggcgacggggacgccgccgttcgtcgaggagctgcttcgcaggctgttagggcttaactgttgtcctcccacgcctcggggggaacaaaagtggcctgattagccagaaatggaggtcacagctgccttttgaaaagggctaataagaacgattcgagccaaggacgcaagtcaggaagacatcctcatgtcttatgtctgccttggtgcgaattcttgtcttagcaaattcaaaatttatccttctgtgttttgttttgtttccatcaatcgcttaaaagccttggcaaggcctttaattcctgctctgaaatgctagagtcccggaaatgcaaaagcaagtacgtttttgttgacctggtggcggtagaggcgtcgtcattgaaaataaacaactgattttgagaaaatcaatataaacaaa

SEQ ID NO: 177768 - DNA, 4282 bp, Homo sapiens
  Payload ID: 14881
  Gene Symbol: RBM44
  Gene Name: RNA binding motif protein 44
  ENST ID: ENST00000316997
  CDS Start-End: 133-3291
gttacccaacaggcgccgcggctgctccggtggcgccactgactcggaggcggctgcggagagcggggcgctggcccgtggaggcggcagcggcggcggctttctagcggatccgagattatatatctttgaatgatgcaggccactgcagtggtggagacagcatctggtaaaggctaccacagtaatggaggcaacctccaaaaagataaaccttcaaatccaaagaaagaaaatttgttattatcctccaatggttgtgatgaagtcaaattgacttttcctgatgatgactggaattcttcgacactagagcaaagagctaataataaagaaatcagcaatattgacaaaatggatttattagagccatttttttcagtgagtcaagatactaacacagagagtactcagtttcagtcaagtgaacttgaagacagtactgactatgctttcttgaataaaacatattctataccttattcagagtcaaaactaaagaaggaaagtcttactcctttaagttcagaattagatcctgaagtgcagaaaaaagaggaggttttttttaatattttggaacatcaagataagactgttggcttggaaagaatctacaatatttcagatgctaattatagagaaagtgctgaagatacacaaaagcatgatacagatgaagactcacagcaggaatatcacagtgcagaagaacaagaatacataagtaaccatttatcttttgaccaaacaaaagcattagatatatctaatccagaagttgttgaattaggaaattcgggttatgaagttaaatgtgctagcaatgtagaagataatcgtgttaactcgggaagtggttctatcatctctttcgattcacttgatgtttatggacaagaagagtcacttcatgtctccaaatttcagaattctgttatgttaagagaatatcatgacctaaagcatgaaaagtataaggaacaagagactaattcaatgtaccacactgtatttgatggcagtgtactaagaagcaattctccaggaaaccaggaatctcaatctaagagtggttccttgagccctcaaaaagtattaaaaatgaaaatttatactgaaaacatgaaatctcaaataaatgaaggtaaagatttttgtggaaataaaattgttgagaacaaaatattactgcaccttgaaaatcctagcacattaccacaggataaagctttagagacattactccaaccctgtaaagattgtcaaacttcctggacctctgtttttgatgattcgataatttctgcctgtggatattatgaaagcctacaaaacactgctgactcagccttagatttttctgctatgctaccaaagatcgcagtcagagataatcaggcaatagaagataatacgtccctaaaagttgctcatagcagtaccacaaagaaaacatgctttcacaatataggagaaatgtgtactaaatcattgacagatgcagcaagttgtacagtcacaattaatcagacagtggacgttagcactgattttagggcttgtttcacaaccagcagggcaacaagtgcaagaccttctgtagtatctacatcaagcaacacagagataacaatgatgaataaaaaacgacctgatgaatggcaaaatgagaaacaaaaaagtgtggcttgtagtacagattggtcatacagtgaagattgtatagatacacagatggctataacaaaaggatcaggaaaatctctctccgttgacagtttaaaacctaatggaaattttctaaataaggatttcctggaattaagaaaagcatgtggtatcacagacctaaagaaacatcctgagagggaatttcaactttttaaagatacagagaaggatttgccatcaatgtgctgtcagaagataatgcagagagccataaaagcagagctgcaccttttaaatgttcactatcagatgtgtcgtcgccattgttgtgatatttacaaacttgtcatggaaaatagggaaggattaaatatgaatttatcaagtaattctgctaagaaggaattgggatcagcactactgtctcttttgggggacttaaaagttagatatgtgactttgaaagaaaaaatacacaaaggcataccactggaagagctgcccccactgtcactagaatcaaaattattatctaccttctctacttttgcttccaggctaatgaaaaaagaaacacatgtcttttcagaagcagatgctgaacaagataatcagagggctcatgatgttgatgtttcttcaaacctaaaaaagacactctctcaaatgtctttatcatctgacaatagtcatgctacacaaaacatatcacccaagaaagatgactttaaaaatggtgatataaatgcagactttagtcaactgaaacttggtgataaagactgcagacattaccaagagacaagcgaagactggtctgatgctaaagagagcctgacaggagttgacgtctcagggacacagggaaatcaagtagaacaagacacatggaatttggatcttacaggagaaatgaagaatgttgaaccctcacaaagagataaaggttatttgatacatgttggtggcctctgcccttcagtatctgaggccgatttaaggtctcatttccaaaaataccaagtttctgaaatttcaatttatgattctactaattacagatatgcatctcttgcttttacaaaaaacagcgatgcaaagatagctgtgaaagaaatgaatgggatagaaataaatggaaagtcagtaaatgtgtggcctgttaaaattcttggagaatatacatcaccactttcctccaaaaatgggaatagaattagttcgaataatttagagaaaagcaccaacaaacaaatccactcagaattctccatttctagattgcccagaactaggccacggcagctgggttctgagcaagacagtgaggttttcccttccgaccagggtgtcaagaagaattgtaagcagattgaatctgctaaattattacctgatacacccgttcaattcatacctccaaatacattgaaccttcgtagctttaccaagatcataaagagactggctgaactgcatccagaagtcagcagagaccatattataaatgcacttcaggaagtgagaataagacataaaggttttctgaatggcttatctattactactattgtggagatgacttcatctcttctgaaaaactctgcttccagttaggaattcaaaaaacaataaagagaacttccttggaaagtgtgtttcctccttcagagaatgttctacagcacttaggaaaaagtagtaataacaagatgatgtaattaaataggctctataaatgggctaagctgttaaaatattctactttatatccctcctttaaaatctagcaacagttgtctatacaatattaagatcttctctatatatttaaagttaaaatataatttttaataagtttttaaatttttttatttcaattttgttacttagaacattaagatgcatatttgtgatctaaagaaattgtcttgtccattttaaaaacctttattaagtcacttttaaaatgtattgaccaagaaggaggtttgttgttacatcaatgtttgtgaaatgatttccatacataaaaaatgtaatttacctgaactttgtcttaagactcttacattggattataggataacagataaataaactgtatagatacattcagtatcatacaacattttggaatgtgtatgctttcaggcttccaagataattaaattactgtcatgatacatttcatgcattttttatgacttcagtataaaacattcaggtgtgttagccttccctgggaagggtaaacttgtatgtgctttggtaaagtacttaaattccaatgttccctatagtgcttgcattcattttgtgaaaagttttgttgtattgttagaacaattttcaaaggctgattttatgccttatctgatagaaatatagaatagatagttctttaattgcttactttttaaaagtaatataatatttaagttgcatttttattaatagtaagattaacatttaagtctgcattttctttaaatgttttaaatgtttatagcattcaatgtgtagttggatttacttgactaaaaattagccctttaacgtttatatttgttgtatttatatttaataaaggcatctaatctttagt

SEQ ID NO: 177769 - DNA, 3449 bp, Homo sapiens
  Payload ID: 14881
  Gene Symbol: RBM44
  Gene Name: RNA binding motif protein 44
  ENST ID: ENST00000409864
  CDS Start-End: 255-3413
gaaattcgcacatatgcttcttcttgccgtggagactgatggagcctctgctgcggggcggggactctagcgagagggggacgtgaagttcgttccgtactcaggcgtgtgtgcccctgaccgacgcgtaggacgccctggaggacggcgccagctcctgacctagtgtgaggtgcccggacggtttccctaagaagcgcgtatttaagatgagatctgaagttgagcgtgaactcaagattatatatctttgaatgatgcaggccactgcagtggtggagacagcatctggtaaaggctaccacagtaatggaggcaacctccaaaaagataaaccttcaaatccaaagaaagaaaatttgttattatcctccaatggttgtgatgaagtcaaattgacttttcctgatgatgactggaattcttcgacactagagcaaagagctaataataaagaaatcagcaatattgacaaaatggatttattagagccatttttttcagtgagtcaagatactaacacagagagtactcagtttcagtcaagtgaacttgaagacagtactgactatgctttcttgaataaaacatattctataccttattcagagtcaaaactaaagaaggaaagtcttactcctttaagttcagaattagatcctgaagtgcagaaaaaagaggaggttttttttaatattttggaacatcaagataagactgttggcttggaaagaatctacaatatttcagatgctaattatagagaaagtgctgaagatacacaaaagcatgatacagatgaagactcacagcaggaatatcacagtgcagaagaacaagaatacataagtaaccatttatcttttgaccaaacaaaagcattagatatatctaatccagaagttgttgaattaggaaattcgggttatgaagttaaatgtgctagcaatgtagaagataatcgtgttaactcgggaagtggttctatcatctctttcgattcacttgatgtttatggacaagaagagtcacttcatgtctccaaatttcagaattctgttatgttaagagaatatcatgacctaaagcatgaaaagtataaggaacaagagactaattcaatgtaccacactgtatttgatggcagtgtactaagaagcaattctccaggaaaccaggaatctcaatctaagagtggttccttgagccctcaaaaagtattaaaaatgaaaatttatactgaaaacatgaaatctcaaataaatgaaggtaaagatttttgtggaaataaaattgttgagaacaaaatattactgcaccttgaaaatcctagcacattaccacaggataaagctttagagacattactccaaccctgtaaagattgtcaaacttcctggacctctgtttttgatgattcgataatttctgcctgtggatattatgaaagcctacaaaacactgctgactcagccttagatttttctgctatgctaccaaagatcgcagtcagagataatcaggcaatagaagataatacgtccctaaaagttgctcatagcagtaccacaaagaaaacatgctttcacaatataggagaaatgtgtactaaatcattgacagatgcagcaagttgtacagtcacaattaatcagacagtggacgttagcactgattttagggcttgtttcacaaccagcagggcaacaagtgcaagaccttctgtagtatctacatcaagcaacacagagataacaatgatgaataaaaaacgacctgatgaatggcaaaatgagaaacaaaaaagtgtggcttgtagtacagattggtcatacagtgaagattgtatagatacacagatggctataacaaaaggatcaggaaaatctctctccgttgacagtttaaaacctaatggaaattttctaaataaggatttcctggaattaagaaaagcatgtggtatcacagacctaaagaaacatcctgagagggaatttcaactttttaaagatacagagaaggatttgccatcaatgtgctgtcagaagataatgcagagagccataaaagcagagctgcaccttttaaatgttcactatcagatgtgtcgtcgccattgttgtgatatttacaaacttgtcatggaaaatagggaaggattaaatatgaatttatcaagtaattctgctaagaaggaattgggatcagcactactgtctcttttgggggacttaaaagttagatatgtgactttgaaagaaaaaatacacaaaggcataccactggaagagctgcccccactgtcactagaatcaaaattattatctaccttctctacttttgcttccaggctaatgaaaaaagaaacacatgtcttttcagaagcagatgctgaacaagataatcagagggctcatgatgttgatgtttcttcaaacctaaaaaagacactctctcaaatgtctttatcatctgacaatagtcatgctacacaaaacatatcacccaagaaagatgactttaaaaatggtgatataaatgcagactttagtcaactgaaacttggtgataaagactgcagacattaccaagagacaagcgaagactggtctgatgctaaagagagcctgacaggagttgacgtctcagggacacagggaaatcaagtagaacaagacacatggaatttggatcttacaggagaaatgaagaatgttgaaccctcacaaagagataaaggttatttgatacatgttggtggcctctgcccttcagtatctgaggccgatttaaggtctcatttccaaaaataccaagtttctgaaatttcaatttatgattctactaattacagatatgcatctcttgcttttacaaaaaacagcgatgcaaagatagctgtgaaagaaatgaatgggatagaaataaatggaaagtcagtaaatgtgtggcctgttaaaattcttggagaatatacatcaccactttcctccaaaaatgggaatagaattagttcgaataatttagagaaaagcaccaacaaacaaatccactcagaattctccatttctagattgcccagaactaggccacggcagctgggttctgagcaagacagtgaggttttcccttccgaccagggtgtcaagaagaattgtaagcagattgaatctgctaaattattacctgatacacccgttcaattcatacctccaaatacattgaaccttcgtagctttaccaagatcataaagagactggctgaactgcatccagaagtcagcagagaccatattataaatgcacttcaggaagtgagaataagacataaaggttttctgaatggcttatctattactactattgtggagatgacttcatctcttctgaaaaactctgcttccagttaggaattcaaaaaacaataaagaggtaaagtaatcata

SEQ ID NO: 177770 - DNA, 1427 bp, Homo sapiens
  Payload ID: 14881
  Gene Symbol: RBM44
  Gene Name: RNA binding motif protein 44
  Uniprot ID: Q6ZP01
  ENST ID: ENST00000611254
  CDS Start-End: 118-1374
ggaggcaacctccaaaaagggaatttcaactttttaaagatacagagaaggatttgccatcaatgtgctgtcagaagataatgcagagagccataaaagcagagctgcaccttttaaatgttcactatcaggaatttatcaagtaattctgctaagaaggaattgggatcagcactactgtctcttttgggggacttaaaagttagatatgtgactttgaaagaaaaaatacacaaaggcataccactggaagagctgcccccactgtcactagaatcaaaattattatctaccttctctacttttgcttccaggctaatgaaaaaagaaacacatgtcttttcagaagcagatgctgaacaagataatcagagggctcatgatgttgatgtttcttcaaacctaaaaaagacactctctcaaatgtctttatcatctgacaatagtcatgctacacaaaacatatcacccaagaaagatgactttaaaaatggtgatataaatgcagactttagtcaactgaaacttggtgataaagactgcagacattaccaagagacaagcgaagactggtctgatgctaaagagagcctgacaggagttgacgtctcagggacacagggaaatcaagtagaacaagacacatggaatttggatcttacaggagaaatgaagaatgttgaaccctcacaaagagataaaggttatttgatacatgttggtggcctctgcccttcagtatctgaggccgatttaaggtctcatttccaaaaataccaagtttctgaaatttcaatttatgattctactaattacagatatgcatctcttgcttttacaaaaaacagcgatgcaaagatagctgtgaaagaaatgaatgggatagaaataaatggaaagtcagtaaatgtgtggcctgttaaaattcttggagaatatacatcaccactttcctccaaaaatgggaatagaattagttcgaataatttagagaaaagcaccaacaaacaaatccactcagaattctccatttctagattgcccagaactaggccacggcagctgggttctgagcaagacagtgaggttttcccttccgaccagggtgtcaagaagaattgtaagcagattgaatctgctaaattattacctgatacacccgttcaattcatacctccaaatacattgaaccttcgtagctttaccaagatcataaagagactggctgaactgcatccagaagtcagcagagaccatattataaatgcacttcaggaagtgagaataagacataaaggttttctgaatggcttatctattactactattgtggagatgacttcatctcttctgaaaaactctgcttccagttaggaattcaaaaaacaataaagagaacttccttggaaagtgtgtttcctccttca

SEQ ID NO: 177771 - DNA, 1785 bp, Homo sapiens
  Payload ID: 14882
  Gene Symbol: RBM45
  Gene Name: RNA binding motif protein 45
  Uniprot ID: Q8IUH3
  ENST ID: ENST00000286070
  CDS Start-End: 93-1517
cgagccggcaaaggcttgggtgtgagacagcagcggtggcagacaccgcagaagcaaagagcagtgaggctcctgcattcgggtggagcaccatggacgaagctggcagctctgcgagcggcgggggcttccgcccgggcgtggacagcctggacgaaccgcccaacagccgcatcttccttgtgatcagcaagtacacacctgagtcggtgctgagggagcgcttctcgccttttggcgacatccaggacatctgggtggtgcgggacaagcacaccaaggagtccaagggcattgctttcgtcaagttcgcccgcagctcacaggcctgcagggccatggaggagatgcatggccagtgcctcggccccaacgacaccaagcccatcaaggttttcattgctcagtcccgatcatctggaagtcaccgagatgttgaagatgaagaacttacaagaatctttgttatgataccaaagtcctacacagaagaagatctgcgggaaaaatttaaggtgtatggagatatcgagtattgcagcattattaagaataaagtgactggagaaagtaaaggtttgggctacgtacgatacttaaaaccatcacaagctgcccaagcaatagaaaactgtgatcgaagttttagagcaatcttggctgaacctaaaaataaagcatctgaatcctctgaacaagattattatagtaatatgaggcaagaagctttgggacatgaacctagagtaaatatgtttccatttgaacaacaatctgaattttcaagttttgacaagaatgatagccgaggccaggaagcaatctccaaacgcttgtcagttgtatcaagagttcctttcactgaagaacagcttttcagcatttttgatatagtaccaggattggaatattgtgaagttcaacgagatccttattcaaattatggtcatggagtggttcagtattttaatgtagcatcagctatttatgcaaaatacaaattacatggatttcagtaccctcctgggaaccgaataggtgtttccttcattgatgatggaagtaatgcaacagatctccttagaaaaatggcaacacagatggtagctgcacagcttgcatcaatggtgtggaataacccaagtcagcaacaatttatgcaatttggaggaagctctggatcacagttgcctcaaatccagacagatgttgtacttccatcatgcaaaaaaaaagctcctgctgaaactcctgtgaaagaaagactttttattgtgtttaatcctcatcctttacctttagacgtattagaagatatattctgtcgttttggtaacctgatcgaagtttaccttgtgtcaggaaaaaatgtggggtatgccaagtatgccgatagaataagtgctaatgatgccattgccactctacatggaaagattctgaatggggtgagacttaaagttatgctggcagattcgccaagagaagaatctaacaaacggcaaagaacttactgattcttgagaacaaagactaaataatgacataatcctcagctgactgactgaaaatgtgactggacgcattccctgtggacagttgacagctttttttttttccatatacctgatagtctgtgtacagcattgttttgtctgggaagcagggattgctgacatgtatttttgaatccatacattaatgctaaaacgaatatagtagttgttccttagagcaatatgttgttacgtgtagcagaaataaagttttctttgcttaactaaa

SEQ ID NO: 177772 - DNA, 488 bp, Homo sapiens
  Payload ID: 14882
  Gene Symbol: RBM45
  Gene Name: RNA binding motif protein 45
  ENST ID: ENST00000424099
  CDS Start-End: 1-220
atggattgaagagggacaagctcagggtcgttttggtaacctgatcgaagtttaccttgtgtcaggaaaaaatgtggggtatgccaagtatgccgatagaataagtgctaatgatgccattgccactctacatggaaagattctgaatggggtgagacttaaagttatgctggcagattcgccaagagaagaatctaacaaacggcaaagaacttactgattcttgagaacaaagactaaataatgacataatcctcagctgactgactgaaaatgtgactggacgcattccctgtggacagttgacagctttttttttttccatatacctgatagtctgtgtacagcattgttttgtctgggaagcagggattgctgacatgtatttttgaatccatacattaatgctaaaacgaatatagtagttgttccttagagcaatatgttgttacgtgtagcagaaataaagttttctttgcttaactaaa

SEQ ID NO: 177773 - DNA, 2964 bp, Homo sapiens
  Payload ID: 14882
  Gene Symbol: RBM45
  Gene Name: RNA binding motif protein 45
  ENST ID: ENST00000455903
  CDS Start-End: 1-407
cacagcttgcatcaatggtgtggaataacccaagtcagcaacaatttatgcaatttggaggaagctctggatcacagttgcctcaaatccagacagatgttgtacttccatcatgcaaaaaaaaagctcctgctgaaactcctgtgaaagaaagactttttattgtgtttaatcctcatcctttacctttagacgtattagaagatatattctgtcgttttggtaacctgatcgaagtttaccttgtgtcaggaaaaaatgtggggtatgccaagtatgccgatagaataagtgctaatgatgccattgccactctacatggaaagattctgaatggggtgagacttaaagttatgctggcagattcgccaagagaagaatctaacaaacggcaaagaacttactgattcttgagtggccctgaagctgcactatgttggaggtttccttgactaagagaaccacatgcggcattcagctcagtaggggagtcataaaagatctcgcctctgaccagaagagtatgaatgacaaaggtgacataaccagcacagaaagatgtcttagcctctgcacatcagctgatttagaatacttatgtagatagcggttggggtcgggggggtgcggaatgttcttttcagcttctttgccctgagaactttgatcttattgcaaggaagtcccttaccctcttctaccctagatctgatggacctcctgggatttcctggggaaatgaaatgagtctaacacctttgaccacctgctggatattatatcagcacttacttaagtaagctgtggaagagctgaaagcagtattcagagtctgacagttctctgcaattggcctagataaactcattgtgaaataagtaactaaatgggcaaaagatttgaacaagcacttcacaaaagaagaccaagaagagggcagggttttttgtttggggagttttatttagttttgttttggggttgttttgttttggcaggggacaggagtagtggatagattcattttgtaaagaaatattaaaatattctttttaatttgatagttaatataagcttaagaatcttttaaaactcagaatgttcagccgtattagtcatcaatgaactgctcattaaaactacaataagctaccctaacagtggtatgaacagcaagaattaaaatgttgacaataccaagtactggtgacagtgtgaagcaacaagaactgctgatgcaaattggctcaaccgcttgggaaaatgtttgacagtatctactaaagttgaacatatgtataccctcgactcagcaattccacttctaagcatatatccaacaaagatgtgtacatatatgtaccaaaagacacatacaaaaacattcttggtattattcatagtagccccaaagtggaaacaaccccaatgtccatgaacagaatgcatatgacactctatagcaaggaaatgagctaacttgctacacttataatgatttgaaggaatctcacaaacataatgttgaacaaaagcaaccagccaacaaaagatgtgctgtaggattcccagttacagagttcaaaaacaagcaaaacatatctttgagcagaatggaatgggggagttcacaaagggagttatggtgtgctggtggtcttgtttttcttgaccaggatggggataactgatcgtttttgagctgtactctatggagtatgcattttttatttatcttatacttcaattaaagtttttctttcttagtgaataaagcaaaaatcagcatgaggctggtgaaacagacagttctgcagaatgagagaagaacaatgtcctgaagcatttagaaagaaggactttgttcttccagtgcttatagaacaaaaaatattagaaaatatctgcttttgctccccctatggtgcagcagggtattatgatggcaagagggcaggaaaataagagtgagaaaagaaagggagaagctaaattaatatttgagtcagaaatagtaaatagtcatagcactaaagaaaattgaatccatgatgaacagtgaatactgaactacttttcagaatcctgtgggttctcatgagtccacaaagcgaagatggagggaagttcccccactttttgttcattatccagatcagaactgctttcatcaatgttatatattgtgctttaaaagctttcttttaaaggattctctgcagcttaaataagttaggatgaacaaaaagcaccagagcaaaagataaaaagcaccctccgacaaatatagtaagagaaaaggtgcagatcaaaaaggctgattacagagatttatcctttgactaatagatgttcccaataaacaataactcgttttaatagaagaaacatggttgatctaaaaaattttaaaagtcacaagactgaagatcctcttctacacattttaaatgccatctggaatggagcaatgtctgtagttttgtagcccaagattcctctactcatccaaattgtaaaggtaacaggcattctgtgatatacaatgtactgctcatttgccctttctggaaaaaaattaatcaccacactcccaaaatgaatcaaaattaagaataaaagaagaaggaaagaaaggccagtcggtgagtattgaaatcatcactgaaactattagaataatgaaggtaattgtaaatttcattttttaaaaaaagttttattatatgacttatctattccgaaatttttcagtgggatttataaccctaggttaagttaatgaaggccaagaaggaatggcagtttattttttgggggggatggaggtgggtgaggggtaaaatccttctcttttgtaaagaaatattaaaattcattctttttttactttgataattaaatgtaagattaagaatcttttgaagtctgttaaggtgcttaataataaaattaataacagaa

SEQ ID NO: 177774 - DNA, 1788 bp, Homo sapiens
  Payload ID: 14882
  Gene Symbol: RBM45
  Gene Name: RNA binding motif protein 45
  Uniprot ID: Q8IUH3
  ENST ID: ENST00000616198
  CDS Start-End: 93-1523
cgagccggcaaaggcttgggtgtgagacagcagcggtggcagacaccgcagaagcaaagagcagtgaggctcctgcattcgggtggagcaccatggacgaagctggcagctctgcgagcggcgggggcttccgcccgggcgtggacagcctggacgaaccgcccaacagccgcatcttccttgtgatcagcaagtacacacctgagtcggtgctgagggagcgcttctcgccttttggcgacatccaggacatctgggtggtgcgggacaagcacaccaaggagtccaagggcattgctttcgtcaagttcgcccgcagctcacaggcctgcagggccatggaggagatgcatggccagtgcctcggccccaacgacaccaagcccatcaaggttttcattgctcagtcccgatcatctggaagtcaccgagatgttgaagatgaagaacttacaagaatctttgttatgataccaaagtcctacacagaagaagatctgcgggaaaaatttaaggtgtatggagatatcgagtattgcagcattattaagaataaagtgactggagaaagtaaaggtttgggctacgtacgatacttaaaaccatcacaagctgcccaagcaatagaaaactgtgatcgaagttttagagcaatcttggctgaacctaaaaataaagcatctgaatcctctgaacaagattattatagtaatatgaggcaagaagctttgggacatgaacctagagtaaatatgtttccatttgtcggagaacaacaatctgaattttcaagttttgacaagaatgatagccgaggccaggaagcaatctccaaacgcttgtcagttgtatcaagagttcctttcactgaagaacagcttttcagcatttttgatatagtaccaggattggaatattgtgaagttcaacgagatccttattcaaattatggtcatggagtggttcagtattttaatgtagcatcagctatttatgcaaaatacaaattacatggatttcagtaccctcctgggaaccgaataggtgtttccttcattgatgatggaagtaatgcaacagatctccttagaaaaatggcaacacagatggtagctgcacagcttgcatcaatggtgtggaataacccaagtcagcaacaatttatgcaatttggaggaagctctggatcacagttgcctcaaatccagacagatgttgtacttccatcatgcaaaaaaaaagctcctgctgaaactcctgtgaaagaaagactttttattgtgtttaatcctcatcctttacctttagacgtattagaagatatattctgtcgttttggtaacctgatcgaagtttaccttgtgtcaggaaaaaatgtggggtatgccaagtatgccgatagaataagtgctaatgatgccattgccactctacatggaaagattctgaatggggtgagacttaaagttatgctggcagattcgccaagagaagaatctaacaaacggcaaagaacttactgattcttgagaacaaagactaaataatgacataatcctcagctgactgactgaaaatgtgactggacgcattccctgtggacagttgacagctttttttttttccatatacctgatagtctgtgtacagcattgttttgtctgggaagcagggattgctgacatgtatttttgaatccatacattaatgctaaaacgaatatagtagttgttccttagagcaatatgttgttacgtgtagcagaaataaagttttctttgcttaact

SEQ ID NO: 177775 - DNA, 2583 bp, Homo sapiens
  Payload ID: 14883
  Gene Symbol: RBM46
  Gene Name: RNA binding motif protein 46
  Uniprot ID: Q8TBY0
  ENST ID: ENST00000281722
  CDS Start-End: 236-1837
gattggatgaggcaccactcctcgtggggctgcttaggccaccgcgcgcgctgcgcgctgggaaacgagtggagacacgaggaccagcgcgagcggtcccggtgggctaccctccccctgcgacgaccccccctcgctctgaccgactggtcccctaaacggtggcggcggtttttggtcgttgggccccgggatttaggaccaacatttgaagacccgaaggggaactgcaaccatgaatgaagaaaatatagatggaacaaatggatgcagtaaagttcgaactggtattcagaatgaagcagcattacttgctttgatggaaaagactggttacaacatggttcaggaaaatggacaaaggaaatttggcggtcctcctccaggttgggaaggtccacctccacctagaggctgtgaagtttttgtaggaaaaatacctcgtgatatgtatgaagatgagttagttcctgtatttgaaagagctgggaagatatatgaatttcgacttatgatggaatttagtggtgaaaatcgaggttatgcttttgtgatgtacactacaaaagaagaagcccaattagccatcagaattcttaataattatgaaattcgaccagggaagtttattggtgtgtgtgtaagcctggataattgtagattatttattggagctattcccaaggaaaagaagaaagaagaaattttagatgaaatgaagaaagttacagaaggagttgtagatgtcattgtttatccaagtgcaactgataagaccaaaaatcgtggttttgcatttgtggaatatgaatctcacagagctgctgctatggcaaggaggaaactaattccaggaacattccaactatggggccacaccattcaggtagattgggctgacccagagaaagaggtggatgaggaaaccatgcagagagttaaagttctttatgtaagaaatttaatgatctcaactacagaggaaacaattaaagcagaattcaataaatttaagcctggtgcagttgaacgggtaaagaaacttagagattatgcttttgttcactttttcaaccgagaagatgcagtggctgccatgtctgttatgaatggaaaatgcattgatggagcaagtattgaggtaacactagctaaaccagtaaataaagaaaacacttggagacagcatcttaatggtcagattagtccaaattctgaaaatctgattgtgtttgctaacaaagaagagagccacccaaaaactctaggcaagctgccaactcttcctgctcgtctcaatggtcagcatagcccaagtccgcctgaagttgaaagatgcacttaccctttttatcctggaacaaagcttactccaattagtatgtattctttaaaatccaatcattttaattctgcagtaatgcatttggattattactgcaacaaaaataactgggcaccaccagaatattatttatattcaacaacaagtcaagatgggaaagtactcttggtgtataagatagttattcctgctattgcaaatggatcccagagttacttcatgccagacaaactctgtactacgttagaagatgcaaaggaactggcagcccagtttacattacttcatttggactacaatttccatcgcagctcaataaatagtctttcccctgttagtgctaccctctcttctgggactcccagcgtgcttccttatacttcaaggccttattcttatccaggctatcctttgtcaccaacaatatcacttgctaatggcagccatgttggacagcggctatgtatctccaatcaggcctccttcttctgaagaaaatactaacattagtatgaaaatttgtgtaaatttgtagtatgaaaacttgcaaattaaaatattgttttattttagaatcgggtttgcatatttggttttaaaaaggtatttattccaaagtactaaacatcagctataattcagaataacatggagttgtagaatttataaaaatgcaaagtttaaaaagttattcagtggtttctcttgataaaggtacagcaaactactattctttttaaacttctaggattttcttctactttctgagtgggcaatagaacctagtcatttatgtttttttttttttttgcataattttactaaatagtatttcacaaatattaaagcacttgaagacaatggttatagtagatttgattaccaaggatcactatctgtactggagattagaacaattatatgaccagaagcatctaaccattatgtaaaaagaaatgatgagacaaaaagattaagatacaaattttgtgcagtactaaagaaaaagcagtctaccattgtggtccttgaaaataactatagatatttttgttatttgttagacacaaattataattttgttgttaatgtatttaagcattttatagttatgctttgtgtttttgatattctttgtattgttaataacaagtgttatgggtttttaatgttgaaatcatgtgttaatttttgtacttgaattcaaattttttgacattaaatatgtgatgcttcta

SEQ ID NO: 177776 - DNA, 3626 bp, Homo sapiens
  Payload ID: 14883
  Gene Symbol: RBM46
  Gene Name: RNA binding motif protein 46
  Uniprot ID: Q8TBY0
  ENST ID: ENST00000510397
  CDS Start-End: 180-1592
actctcacgccgaatacacagtgggggctggcggcggtggctgcggggttcaccctcgtccttccccagccccgtcgagcagtgggagggcaagtgtccgagacgctgcttcctgccccggcagcatccggccagaaggcgccctcgccgtcacccaggcgctgcatggaactgcaaccatgaatgaagaaaatatagatggaacaaatggatgcagtaaagttcgaactggtattcagaatgaagcagcattacttgctttgatggaaaagactggttacaacatggttcaggaaaatggacaaaggaaatttggcggtcctcctccaggttgggaaggtccacctccacctagaggctgtgaagtttttgtaggaaaaatacctcgtgatatgtatgaagatgagttagttcctgtatttgaaagagctgggaagatatatgaatttcgacttatgatggaatttagtggtgaaaatcgaggttatgcttttgtgatgtacactacaaaagaagaagcccaattagccatcagaattcttaataattatgaaattcgaccagggaagtttattggtgtgtgtgtaagcctggataattgtagattatttattggagctattcccaaggaaaagaagaaagaagaaattttagatgaaatgaagaaagttacagaaggagttgtagatgtcattgtttatccaagtgcaactgataagaccaaaaatcgtggttttgcatttgtggaatatgaatctcacagagctgctgctatggcaaggaggaaactaattccaggaacattccaactatggggccacaccattcaggtagattgggctgacccagagaaagaggtggatgaggaaaccatgcagagagttaaagttctttatgtaagaaatttaatgatctcaactacagaggaaacaattaaagcagaattcaataaatttaagcctggtgcagttgaacgggtaaagaaacttagagattatgcttttgttcactttttcaaccgagaagatgcagtggctgccatgtctgttatgaatggaaaatgcattgatggagcaagtattgaggtaacactagctaaaccagtaaataaagaaaacacttggagacagcatcttaatggtcagattagtccaaattctgaaaatctgattgtgtttgctaacaaagaagagagccacccaaaaactctaggcaagctgccaactcttcctgctcgtctcaatggtcagcatagcccaagtccgcctgaagttgaaagatgcacttaccctttttatcctggaacaaagcttactccaattagtatgtattctttaaaatccaatcattttaattctgcagtaatgcatttggattattactgcaacaaaaataactgggcaccaccagaatattatttatattcaacaacaagtcaagatgggaaagtactcttggtgtataagatagttattcctgctattgcaaatggatcccagagttacttcatgccagacaaactctgtactacgttagaagatgcaaaggaactggcagcccagtttacattacttcatttgggtcctttctgatgttgcttgagcttactctcctgcagttgatctcattcctgttggctaaacattaagtcccatgacaacattaagttaatgcacctatggtgtaggcatcatttatagtaccaggacagtattatagaaaaaaaccttacctgtacattagatgacctaatttcttttcttccattcctagaaacaccataatgtttctaaataatgattttatagtcattgtcacacccttggcttattttacactaaagaacatagttgagtttttggaaggtacaggatttaaaaatttggtctgtaatatacacacacacatataaatgttgcagttaatgaaacaggaaattattgatgcataagatgaatgtttattgtgaaacagtatttcaaatgttattttttaataatttggtttaattggatatttttctgtactataagttgataatggttttttgaagtaactataagttgataatggttttttgaagtttatttaataaaggtgattcattatactgttttatcataccagtaggacttttaatgttaaatcagtatgttgagttagataagtgtttatattagtatttaaataatgaaatattggccagctagtttataccaaatgtttttgcagtccaggggtgaatgtttctgctggtttgatgcctaatacagcttcaaagaaaaaaaaaaagcaaatatgaattcactgttttttatcttttcttcatggactaccccttagaaccaaatttaaaagaagcttctttgtagagcaagagaaatgagacgttctctttttctataatcaaaactccaagaaatagtagatatccaagaattcattctggtaagatctctgaaacattgcgtgagtaaaggaaaggtaatactgacaaaactctcaggatttgcagtgcagtgaatgctgaaataatctttaaccagcaatatagtatcatcaagatttccagtgttagaacattatgttaaaatgtgattattgtttaatgctttgtctctttaaattaaatttgtgtccataaagatgtacagcataattgttcatgtatttatttacagactacaatttccatcgcagctcaataaatagtctttcccctgttagtgctaccctctcttctgggactcccagcgtgcttccttatacttcaaggccttattcttatccaggctatcctttgtcaccaacaatatcacttgctaatggcagccatgttggacagcggctatgtatctccaatcaggcctccttcttctgaagaaaatactaacattagtatgaaaatttgtgtaaatttgtagtatgaaaacttgcaaattaaaatattgttttattttagaatcgggtttgcatatttggttttaaaaaggtatttattccaaagtactaaacatcagctataattcagaataacatggagttgtagaatttataaaaatgcaaagtttaaaaagttattcagtggtttctcttgataaaggtacagcaaactactattctttttaaacttctaggattttcttctactttctgagtgggcaatagaacctagtcatttatgtttttttttttttttgcataattttactaaatagtatttcacaaatattaaagcacttgaagacaatggttatagtagatttgattaccaaggatcactatctgtactggagattagaacaattatatgaccagaagcatctaaccattatgtaaaaagaaatgatgagacaaaaagattaagatacaaattttgtgcagtactaaagaaaaagcagtctaccattgtggtccttgaaaataactatagatatttttgttatttgttagacacaaattataattttgttgttaatgtatttaagcattttatagttatgctttgtgtttttgatattctttgtattgttaataacaagtgttatgggtttttaatgttgaaatcatgtgttaatttttgtacttgaattcaaattttttgacattaaatatgtgatgcttct

SEQ ID NO: 177777 - DNA, 2315 bp, Homo sapiens
  Payload ID: 14883
  Gene Symbol: RBM46
  Gene Name: RNA binding motif protein 46
  Uniprot ID: Q8TBY0
  ENST ID: ENST00000514866
  CDS Start-End: 236-1693
gattggatgaggcaccactcctcgtggggctgcttaggccaccgcgcgcgctgcgcgctgggaaacgagtggagacacgaggaccagcgcgagcggtcccggtgggctaccctccccctgcgacgaccccccctcgctctgaccgactggtcccctaaacggtggcggcggtttttggtcgttgggccccgggatttaggaccaacatttgaagacccgaaggggaactgcaaccatgaatgaagaaaatatagatggaacaaatggatgcagtaaagttcgaactggtattcagaatgaagcagcattacttgctttgatggaaaagactggttacaacatggttcaggaaaatggacaaaggaaatttggcggtcctcctccaggttgggaaggtccacctccacctagaggctgtgaagtttttgtaggaaaaatacctcgtgatatgtatgaagatgagttagttcctgtatttgaaagagctgggaagatatatgaatttcgacttatgatggaatttagtggtgaaaatcgaggttatgcttttgtgatgtacactacaaaagaagaagcccaattagccatcagaattcttaataattatgaaattcgaccagggaagtttattggtgtgtgtgtaagcctggataattgtagattatttattggagctattcccaaggaaaagaagaaagaagaaattttagatgaaatgaagaaagttacagaaggagttgtagatgtcattgtttatccaagtgcaactgataagaccaaaaatcgtggttttgcatttgtggaatatgaatctcacagagctgctgctatggcaaggaggaaactaattccaggaacattccaactatggggccacaccattcaggtagattgggctgacccagagaaagaggtggatgaggaaaccatgcagagagttaaagttctttatgtaagaaatttaatgatctcaactacagaggaaacaattaaagcagaattcaataaatttaagcctggtgcagttgaacgggtaaagaaacttagagattatgcttttgttcactttttcaaccgagaagatgcagtggctgccatgtctgttatgaatggaaaatgcattgatggagcaagtattgaggtaacactagctaaaccagtaaataaagaaaacacttggagacagcatcttaatggtcagattagtccaaattctgaaaatctgattgtgtttgctaacaaagaagagagccacccaaaaactctaggcaagctgccaactcttcctgctcgtctcaatggtcagcatagcccaagtccgcctgaagttgaaagatgcacttaccctttttatcctggaacaaagcttactccaattagtatgtattctttaaaatccaatcattttaattctgcagtaatgcatttggattattactgcaacaaaaataactgggcaccaccagaatattatttatattcaacaacaagtcaagatgggaaagtactcttggtgtataagatagttattcctgctattgcaaatggatcccagagttacttcatgccagacaaactctgtactacgttagaagatgcaaaggaactggcagcccagtttacattacttcatttggacagggaacacaatctcttcagcctggacctgtgtagaagaatttggagaaaataaacaggtcctttctgatgttgcttgagcttactctcctgcagttgatctcattcctgttggctaaacattaagtcccatgacaacattaagttaatgcacctatggtgtaggcatcatttatagtaccaggacagtattatagaaaaaaaccttacctgtacattagatgacctaatttcttttcttccattcctagaaacaccataatgtttctaaataatgattttatagtcattgtcacacccttggcttattttacactaaagaacatagttgagtttttggaaggtacaggatttaaaaatttggtctgtaatatacacacacacatataaatgttgcagttaatgaaacaggaaattattgatgcataagatgaatgtttattgtgaaacagtatttcaaatgttattttttaataatttggtttaattggatatttttctgtactataagttgataatggttttttgaagtaactataagttgataatggttttttgaagtttatttaataaaggtgattcattatactgttttatcataccagtaggacttttaatgttaaatcagtatgttgagttagataagtgtttatattagtatttaaataatgaaatat

SEQ ID NO: 177778 - DNA, 526 bp, Homo sapiens
  Payload ID: 14883
  Gene Symbol: RBM46
  Gene Name: RNA binding motif protein 46
  ENST ID: ENST00000512640
  CDS Start-End: 128-526
acacgcttacgccgacgaccaacgaccgctgcaggcccgggccgctgcctggccgttgtagggtccgcgcgtcccctggaggctttggacgccgtctggggcgtcccgacggctgggaactgcaaccatgaatgaagaaaatatagatggaacaaatggatgcagtaaagttcgaactggtattcagaatgaagcagcattacttgctttgatggaaaagactggttacaacatggttcaggaaaatggacaaaggaaatttggcggtcctcctccaggttgggaaggtccacctccacctagaggctgtgaagtttttgtaggaaaaatacctcgtgatatgtatgaagatgagttagttcctgtatttgaaagagctgggaagatatatgaatttcgacttatgatggaatttagtggtgaaaatcgaggttatgcttttgtgatgtacactacaaaagaagaagcccaattagccatcagaattcttaataattatgaaattcgaccagggaagtttattggt

SEQ ID NO: 177779 - DNA, 4056 bp, Homo sapiens
  Payload ID: 14884
  Gene Symbol: RBM47
  Gene Name: RNA binding motif protein 47
  Uniprot ID: A0AV96
  ENST ID: ENST00000295971
  CDS Start-End: 709-2490
agactagacgctgagcgctcccgtgcgcagcgccccacgcagccgggacgcggcgccgctctgcgggtggaaccgccgcgcgctcccggcctcgggagctgagcccgagagaacttcgctgccttcgggtcgccgctcccgctttccactgtggaatgtgcagcttgggatagagagaaaccagggtttggggagcggtcctcctggagactttctctctgcaagtctccaaggttaagcaattctgacccactggaattcccagagcctgggagttaagcctaaaacgctctgttgctttaagcggcgcggtggggagtcgctggacactccttattttggttttacattaaaaagaaggcggacgagaagatgttgtaggtgacttcctagctgtgttaagttgctcctgggctgtgaatggtgttaatttctgaagtgggcggctccaaaaacttaacaaggaaagctcaggtaacggaggccttggaaagagactctgcgtcaggtcacccagcagagatcagcaatccttggctcactgaggaggtttggatttgcctcaaagggcactgcaaaaattgaacagaggaatcccaaggaagctgcctgaatttgcctgtatactctcgttctgcgacttataaaggaccagacaaatcaaattagtggttttggtttccgccagctgtggatgcctttgacattatgaccgcagaggattccaccgcagccatgagcagtgactcggccgccgggtcctccgccaaggtgcccgagggcgtggcgggcgcgcccaacgaggcagcactgctggcgctgatggagcgcacgggctacagcatggtgcaagagaacgggcagcgcaagtacggcggcccaccgcccggctgggagggcccgcacccgcagcgtggctgcgaggtcttcgtgggcaagatcccgcgcgacgtgtacgaggacgagctggtgcccgtgttcgaggccgtgggccgcatctacgagctgcgcctcatgatggactttgacggcaagaaccgcggctacgccttcgtcatgtactgccacaagcacgaggccaagcgcgcagtgcgtgagctcaacaactacgagatccgcccgggccgcctgctcggcgtgtgctgcagcgtggacaactgccgcctcttcatcggcgggatccccaagatgaagaagcgcgaggaaatcctggaggagattgccaaggtcaccgagggcgtgctggacgtgatcgtctacgccagcgcggccgacaagatgaagaaccgcggcttcgccttcgtggagtacgagagccaccgcgcggctgccatggctcgccgcaagctcatgcctggccgcatccagctgtggggccaccagatcgccgtggactgggccgaacctgagatcgacgtggacgaggacgtgatggagaccgtgaagatcctctacgtgcgcaacctcatgatcgagaccaccgaggacaccatcaagaagagcttcggccagttcaaccccggctgcgtggagcgcgtcaagaagatccgcgactacgccttcgtgcacttcaccagccgcgaggatgccgtgcatgccatgaacaacctcaacggcactgagctggagggctcgtgcctggaggtcacgctggccaagcccgtggacaaggagcagtactcgcgctaccagaaggcagccaggggcggcggcgcggctgaggcagcgcagcagcccagctacgtgtactcctgcgacccctacacactggcctactacggctacccctacaacgcgctcattgggcccaacagggactactttgtgaaagcaggcagcataagaggccgagggcgaggtgcagctggcaacagagccccagggcctaggggttcctacctcgggggatattctgctggtcgtggtatatatagccgatatcatgaagggaaaggaaagcagcaagaaaaaggatatgaactggtgccgaatttggaaatccctaccgtcaacccagttgccattaaacctggtacagtagccatccctgccattggggctcagtattccatgtttccagcagctccagcccctaaaatgattgaagatggcaaaatccacacagtggagcacatgatcagccccattgctgtgcagccagacccagccagtgctgctgccgccgcagccgcggccgcagccgccgcagccgctgtcattcccactgtgtcgacgccaccacctttccagggccgcccaataactccagtatacacggtggctccaaacgttcagagaattcctactgccgggatctacggggccagttacgtgccatttgctgctccagctacagccacgatcgccacactacagaagaacgcggcagccgcggccgccatgtatggaggatacgcaggctacatacctcaggccttccctgctgctgccattcaggtccccatccccgacgtctaccagacatactgaggctggtgaccagcacgaagacagaccacacaaacaccactgaaggaacgcttgactatttatgaagaaggaacatgttggattcacacatgcaacctgaaagtgaagaatgttagcagatttatttctgaattattttatatacatgaagttttcactagttttttaagactattttcaacttagcatgcctacgttcatacatttccaaaagacttgcaatggttcgtgccttcattccatcttttaaaaatttgtatgctgtactacatttgtatagaggtttttgttgttgtttttttaaggatatattttcagtatgaaggttattttcttaacttctgcactccagagatttctattttgtagtaccttcaataatatatcaactatatattaaaaaagcacacttgaggagctagggaactattttgaaaaatatatacaatatttaaagatacaaacagtagtgcttaaaaatactacataaagcattattttaaaggttatactggaaagtgcaattttaaaatgagtaaaacctctgtatttctgctggcattaagggttgatggtgttaccatgtatcatcatggcggtactattttttaaaagaaattaaacactggatctctccttaagccaacattgaaaagacttgccgcacttctgagtccaaacactggaaagctctcctttgccaccgttagccggggctcattctccatgtgccttagccttaaacatgcccccactcccacatctctcaccctgtcccctcctccccagattcccaatcccaccgcaatgtttggcaagcctaggactgataagtagctctgatagaggagctggtggcttttatacttcttcctgggtttttgttggggtttgttgtttcgttgttttttgtttttttttttgtttggttggggaagtattgtcttctacgtgtgctattttcagtagcagagtaagcacaaggttttaatcgagttgcataagacacctttgcatagctatttaattgcccaatgtaaaactttaatgccatttctaatgcttttattcatttttgaagtatgagtttgtagggacaaagaatgtatgttatcgtagacaagacccccagagactcttttcagcagaaagttatgcttctagttgccttaccatgtttcttgcaaaactgtccatggtcctcaagggtgttggaaacattatgtttattaaatgggcctctcttcctttgctgtgcacttgatgggtgaactggattggggtgtgcacatccaggaggaggaggagagacctgtagaagtttaaagatagtttgtaaatatcttctaatgcttgtttttagtccttttatgttggagaagttcatggtatgtagtttaatgcaaaatgaaaccattttatttcaatgttattaaaaaggtttgttttattaggaagttaatgtattgttgcagtgttttgtgcctgtttaaaggcttttgtttagcagagtgaatgtaaaatacagtaaaatgttaagattgtcatctactttttaaaaaaaaa

SEQ ID NO: 177780 - DNA, 4816 bp, Homo sapiens
  Payload ID: 14884
  Gene Symbol: RBM47
  Gene Name: RNA binding motif protein 47
  Uniprot ID: A0AV96
  ENST ID: ENST00000381793
  CDS Start-End: 398-2179
aaggggaagtgtggaaatagagcctgcttgttcattttcattattgtacattacatgatatcttttcgaccattatattgtgttccctcagtggtgtttgctctgagggtgggacacaagcctgtttagtgtctcgtaaaacatttaccaaaagcactgagccatggtttttgaagggcattccgttgccagagtgtgggaggagagagcaagcagggaaagagagcgccaggtgcttagcaggatttgcctcaaagggcactgcaaaaattgaacagaggaatcccaaggaagctgcctgaatttgcctgtatactctcgttctgcgacttataaaggaccagacaaatcaaattagtggttttggtttccgccagctgtggatgcctttgacattatgaccgcagaggattccaccgcagccatgagcagtgactcggccgccgggtcctccgccaaggtgcccgagggcgtggcgggcgcgcccaacgaggcagcactgctggcgctgatggagcgcacgggctacagcatggtgcaagagaacgggcagcgcaagtacggcggcccaccgcccggctgggagggcccgcacccgcagcgtggctgcgaggtcttcgtgggcaagatcccgcgcgacgtgtacgaggacgagctggtgcccgtgttcgaggccgtgggccgcatctacgagctgcgcctcatgatggactttgacggcaagaaccgcggctacgccttcgtcatgtactgccacaagcacgaggccaagcgcgcagtgcgtgagctcaacaactacgagatccgcccgggccgcctgctcggcgtgtgctgcagcgtggacaactgccgcctcttcatcggcgggatccccaagatgaagaagcgcgaggaaatcctggaggagattgccaaggtcaccgagggcgtgctggacgtgatcgtctacgccagcgcggccgacaagatgaagaaccgcggcttcgccttcgtggagtacgagagccaccgcgcggctgccatggctcgccgcaagctcatgcctggccgcatccagctgtggggccaccagatcgccgtggactgggccgaacctgagatcgacgtggacgaggacgtgatggagaccgtgaagatcctctacgtgcgcaacctcatgatcgagaccaccgaggacaccatcaagaagagcttcggccagttcaaccccggctgcgtggagcgcgtcaagaagatccgcgactacgccttcgtgcacttcaccagccgcgaggatgccgtgcatgccatgaacaacctcaacggcactgagctggagggctcgtgcctggaggtcacgctggccaagcccgtggacaaggagcagtactcgcgctaccagaaggcagccaggggcggcggcgcggctgaggcagcgcagcagcccagctacgtgtactcctgcgacccctacacactggcctactacggctacccctacaacgcgctcattgggcccaacagggactactttgtgaaagcaggcagcataagaggccgagggcgaggtgcagctggcaacagagccccagggcctaggggttcctacctcgggggatattctgctggtcgtggtatatatagccgatatcatgaagggaaaggaaagcagcaagaaaaaggatatgaactggtgccgaatttggaaatccctaccgtcaacccagttgccattaaacctggtacagtagccatccctgccattggggctcagtattccatgtttccagcagctccagcccctaaaatgattgaagatggcaaaatccacacagtggagcacatgatcagccccattgctgtgcagccagacccagccagtgctgctgccgccgcagccgcggccgcagccgccgcagccgctgtcattcccactgtgtcgacgccaccacctttccagggccgcccaataactccagtatacacggtggctccaaacgttcagagaattcctactgccgggatctacggggccagttacgtgccatttgctgctccagctacagccacgatcgccacactacagaagaacgcggcagccgcggccgccatgtatggaggatacgcaggctacatacctcaggccttccctgctgctgccattcaggtccccatccccgacgtctaccagacatactgaggctggtgaccagcacgaagacagaccacacaaacaccactgaaggaacgcttgactatttatgaagaaggaacatgttggattcacacatgcaacctgaaagtgaagaatgttagcagatttatttctgaattattttatatacatgaagttttcactagttttttaagactattttcaacttagcatgcctacgttcatacatttccaaaagacttgcaatggttcgtgccttcattccatcttttaaaaatttgtatgctgtactacatttgtatagaggtttttgttgttgtttttttaaggatatattttcagtatgaaggttattttcttaacttctgcactccagagatttctattttgtagtaccttcaataatatatcaactatatattaaaaaagcacacttgaggagctagggaactattttgaaaaatatatacaatatttaaagatacaaacagtagtgcttaaaaatactacataaagcattattttaaaggttatactggaaagtgcaattttaaaatgagtaaaacctctgtatttctgctggcattaagggttgatggtgttaccatgtatcatcatggcggtactattttttaaaagaaattaaacactggatctctccttaagccaacattgaaaagacttgccgcacttctgagtccaaacactggaaagctctcctttgccaccgttagccggggctcattctccatgtgccttagccttaaacatgcccccactcccacatctctcaccctgtcccctcctccccagattcccaatcccaccgcaatgtttggcaagcctaggactgataagtagctctgatagaggagctggtggcttttatacttcttcctgggtttttgttggggtttgttgtttcgttgttttttgtttttttttttgtttggttggggaagtattgtcttctacgtgtgctattttcagtagcagagtaagcacaaggttttaatcgagttgcataagacacctttgcatagctatttaattgcccaatgtaaaactttaatgccatttctaatgcttttattcatttttgaagtatgagtttgtagggacaaagaatgtatgttatcgtagacaagacccccagagactcttttcagcagaaagttatgcttctagttgccttaccatgtttcttgcaaaactgtccatggtcctcaagggtgttggaaacattatgtttattaaatgggcctctcttcctttgctgtgcacttgatgggtgaactggattggggtgtgcacatccaggaggaggaggagagacctgtagaagtttaaagatagtttgtaaatatcttctaatgcttgtttttagtccttttatgttggagaagttcatggtatgtagtttaatgcaaaatgaaaccattttatttcaatgttattaaaaaggtttgttttattaggaagttaatgtattgttgcagtgttttgtgcctgtttaaaggcttttgtttagcagagtgaatgtaaaatacagtaaaatgttaagattgtcatctactttttaaaaaaaaatatcaacttggaattgttttttaaaggctcaatcaaggaagtgaggtgtgcaataaggtagcaagtaaaacgcagttgcgtttttatgtcatgttagagatccatacaattttccactcacgggatttttgttgatggctgaattcttgtggattcataagaggatcatgcccttagcaagtacttttgttttgttttaaattaagagattcccaaatgcctttttccccctcatcttgaaatgagatgagtttttatgtgtaagcaatatttatttaactattctataaaattattgagtgcctactgaggcctttaagcaccgctaacattcctttccatcattcttttaaatgacataaaataattgtgcaatgttcctgatgatgtaccccacaagctgcattcaaactcaaatctgtgggaatgagtgactcgacaaaatgtaattcggatcagatcctcatcccctgactgtgtgaaaaaagtactctccttctagtgaaggattgtcacagagtttcactggatgaaactatgacccagtattcttactgtattttacatatgcctgtaaattatttgcaaaaaagaagaagaagaggaagaaagaaaagaaagaaaagaaagaaagaaagaaagaaagaaagaaagaaagaaagaaagaaagaaagaaagaaagaaaaagaaagaaagaataaaaaaaaatgataacatggcaaccaccaaactcccttaaaaacaaacattggtgacatggccaattaagtatcagtgagcctcctatctgggacttatctgttcctattgtttcaaaaccatttcatgtacactactgaggtaagtttataacttgaaatgtgaactttttttttttttagtgttaagaacaaactatataaatgtaaaaaaaaagttttagagttctgttttcaaacattgctagtggtttagttaactttagctgctttatatttgaaaagcttttatttagatcttgctccatttacagtacattcttaggatgtatgtagtaaataaagctttctttaaagcaatcgcaagacctta

SEQ ID NO: 177781 - DNA, 4473 bp, Homo sapiens
  Payload ID: 14884
  Gene Symbol: RBM47
  Gene Name: RNA binding motif protein 47
  Uniprot ID: A0AV96
  ENST ID: ENST00000381795
  CDS Start-End: 262-1836
agtcagacccaggaggagtgaggtcaattgccctttagtcccaggactaaccggaagcttctgcaacaggaggacattgaaaataagatggaacccatccacataaggatttgcctcaaagggcactgcaaaaattgaacagaggaatcccaaggaagctgcctgaatttgcctgtatactctcgttctgcgacttataaaggaccagacaaatcaaattagtggttttggtttccgccagctgtggatgcctttgacattatgaccgcagaggattccaccgcagccatgagcagtgactcggccgccgggtcctccgccaaggtgcccgagggcgtggcgggcgcgcccaacgaggcagcactgctggcgctgatggagcgcacgggctacagcatggtgcaagagaacgggcagcgcaagtacggcggcccaccgcccggctgggagggcccgcacccgcagcgtggctgcgaggtcttcgtgggcaagatcccgcgcgacgtgtacgaggacgagctggtgcccgtgttcgaggccgtgggccgcatctacgagctgcgcctcatgatggactttgacggcaagaaccgcggctacgccttcgtcatgtactgccacaagcacgaggccaagcgcgcagtgcgtgagctcaacaactacgagatccgcccgggccgcctgctcggcgtgtgctgcagcgtggacaactgccgcctcttcatcggcgggatccccaagatgaagaagcgcgaggaaatcctggaggagattgccaaggtcaccgagggcgtgctggacgtgatcgtctacgccagcgcggccgacaagatgaagaaccgcggcttcgccttcgtggagtacgagagccaccgcgcggctgccatggctcgccgcaagctcatgcctggccgcatccagctgtggggccaccagatcgccgtggactgggccgaacctgagatcgacgtggacgaggacgtgatggagaccgtgaagatcctctacgtgcgcaacctcatgatcgagaccaccgaggacaccatcaagaagagcttcggccagttcaaccccggctgcgtggagcgcgtcaagaagatccgcgactacgccttcgtgcacttcaccagccgcgaggatgccgtgcatgccatgaacaacctcaacggcactgagctggagggctcgtgcctggaggtcacgctggccaagcccgtggacaaggagcagtactcgcgctaccagaaggcagccaggggcggcggcgcggctgaggcagcgcagcagcccagctacgtgtactcctgcgacccctacacactggcctactacggctacccctacaacgcgctcattgggcccaacagggactactttgtgaaagtagccatccctgccattggggctcagtattccatgtttccagcagctccagcccctaaaatgattgaagatggcaaaatccacacagtggagcacatgatcagccccattgctgtgcagccagacccagccagtgctgctgccgccgcagccgcggccgcagccgccgcagccgctgtcattcccactgtgtcgacgccaccacctttccagggccgcccaataactccagtatacacggtggctccaaacgttcagagaattcctactgccgggatctacggggccagttacgtgccatttgctgctccagctacagccacgatcgccacactacagaagaacgcggcagccgcggccgccatgtatggaggatacgcaggctacatacctcaggccttccctgctgctgccattcaggtccccatccccgacgtctaccagacatactgaggctggtgaccagcacgaagacagaccacacaaacaccactgaaggaacgcttgactatttatgaagaaggaacatgttggattcacacatgcaacctgaaagtgaagaatgttagcagatttatttctgaattattttatatacatgaagttttcactagttttttaagactattttcaacttagcatgcctacgttcatacatttccaaaagacttgcaatggttcgtgccttcattccatcttttaaaaatttgtatgctgtactacatttgtatagaggtttttgttgttgtttttttaaggatatattttcagtatgaaggttattttcttaacttctgcactccagagatttctattttgtagtaccttcaataatatatcaactatatattaaaaaagcacacttgaggagctagggaactattttgaaaaatatatacaatatttaaagatacaaacagtagtgcttaaaaatactacataaagcattattttaaaggttatactggaaagtgcaattttaaaatgagtaaaacctctgtatttctgctggcattaagggttgatggtgttaccatgtatcatcatggcggtactattttttaaaagaaattaaacactggatctctccttaagccaacattgaaaagacttgccgcacttctgagtccaaacactggaaagctctcctttgccaccgttagccggggctcattctccatgtgccttagccttaaacatgcccccactcccacatctctcaccctgtcccctcctccccagattcccaatcccaccgcaatgtttggcaagcctaggactgataagtagctctgatagaggagctggtggcttttatacttcttcctgggtttttgttggggtttgttgtttcgttgttttttgtttttttttttgtttggttggggaagtattgtcttctacgtgtgctattttcagtagcagagtaagcacaaggttttaatcgagttgcataagacacctttgcatagctatttaattgcccaatgtaaaactttaatgccatttctaatgcttttattcatttttgaagtatgagtttgtagggacaaagaatgtatgttatcgtagacaagacccccagagactcttttcagcagaaagttatgcttctagttgccttaccatgtttcttgcaaaactgtccatggtcctcaagggtgttggaaacattatgtttattaaatgggcctctcttcctttgctgtgcacttgatgggtgaactggattggggtgtgcacatccaggaggaggaggagagacctgtagaagtttaaagatagtttgtaaatatcttctaatgcttgtttttagtccttttatgttggagaagttcatggtatgtagtttaatgcaaaatgaaaccattttatttcaatgttattaaaaaggtttgttttattaggaagttaatgtattgttgcagtgttttgtgcctgtttaaaggcttttgtttagcagagtgaatgtaaaatacagtaaaatgttaagattgtcatctactttttaaaaaaaaatatcaacttggaattgttttttaaaggctcaatcaaggaagtgaggtgtgcaataaggtagcaagtaaaacgcagttgcgtttttatgtcatgttagagatccatacaattttccactcacgggatttttgttgatggctgaattcttgtggattcataagaggatcatgcccttagcaagtacttttgttttgttttaaattaagagattcccaaatgcctttttccccctcatcttgaaatgagatgagtttttatgtgtaagcaatatttatttaactattctataaaattattgagtgcctactgaggcctttaagcaccgctaacattcctttccatcattcttttaaatgacataaaataattgtgcaatgttcctgatgatgtaccccacaagctgcattcaaactcaaatctgtgggaatgagtgactcgacaaaatgtaattcggatcagatcctcatcccctgactgtgtgaaaaaagtactctccttctagtgaaggattgtcacagagtttcactggatgaaactatgacccagtattcttactgtattttacatatgcctgtaaattatttgcaaaaaagaagaagaagaggaagaaagaaaagaaagaaaagaaagaaagaaagaaagaaagaaagaaagaaagaaagaaagaaagaaagaaagaaagaaaaagaaagaaagaataaaaaaaaatgataacatggcaaccaccaaactcccttaaaaacaaacattggtgacatggccaattaagtatcagtgagcctcctatctgggacttatctgttcctattgtttcaaaaccatttcatgtacactactgaggtaagtttataacttgaaatgtgaactttttttttttttagtgttaagaacaaactatataaatgtaaaaaaaaagttttagagttctgttttcaaacattgctagtggtttagttaactttagctgctttatatttgaaaagcttttatttagatcttgctccatttacagtacattcttaggatgtatgtagtaaataaagctttctttaaagcaatcgcaagacctta

SEQ ID NO: 177782 - DNA, 882 bp, Homo sapiens
  Payload ID: 14884
  Gene Symbol: RBM47
  Gene Name: RNA binding motif protein 47
  ENST ID: ENST00000513473
  CDS Start-End: 304-882
gggaaagagagcgccaggtgcttagcaggatttgcctcaaagggcactgcaaaaattgaacagaggaatcccaaggaagctgcctgaatttgcctgtatactctcgttctgcgacttataaaggaccagacaaatcaaattagtggttttgagacagggtctcactatgttgcccagactggtctggaactcctgagctcaagcaagcttctcacctcagcctcccaaagtgctgggattataggcttcagccaccacgcccaaccagccaggtttccgccagctgtggatgcctttgacattatgaccgcagaggattccaccgcagccatgagcagtgactcggccgccgggtcctccgccaaggtgcccgagggcgtggcgggcgcgcccaacgaggcagcactgctggcgctgatggagcgcacgggctacagcatggtgcaagagaacgggcagcgcaagtacggcggcccaccgcccggctgggagggcccgcacccgcagcgtggctgcgaggtcttcgtgggcaagatcccgcgcgacgtgtacgaggacgagctggtgcccgtgttcgaggccgtgggccgcatctacgagctgcgcctcatgatggactttgacggcaagaaccgcggctacgccttcgtcatgtactgccacaagcacgaggccaagcgcgcagtgcgtgagctcaacaactacgagatccgcccgggccgcctgctcggcgtgtgctgcagcgtggacaactgccgcctcttcatcggcgggatccccaagatgaagaagcgcgaggaaatcctggaggagattgccaaggtcaccgagggcgtgctggacgtgatcgtctacgccagcgcggccgacaagatgaagaac

SEQ ID NO: 177783 - DNA, 1100 bp, Homo sapiens
  Payload ID: 14884
  Gene Symbol: RBM47
  Gene Name: RNA binding motif protein 47
  ENST ID: ENST00000515053
  CDS Start-End: 449-1100
taatttctccaacgtggttctggctgggtttctcggagcagcccgaagggggccgagcgtctgactcggacagatgcccccaggtggagcaggtgccacttctgggtgtctgaaaggcatgtgacttttggggcggggagagaagtccgtctggtcaagtcccccaatctctgccatcaaggccgattttctttgaaccttcagcaaagctcaggtaacggaggccttggaaagagactctgcgtcaggtcacccagcagagatcagcaatccttggctcactgaggaggtttggatttgcctcaaagggcactgcaaaaattgaacagaggaatcccaaggaagctgcctgaatttgcctgtatactctcgttctgcgacttataaaggaccagacaaatcaaattagtggttttggtttccgccagctgtggatgcctttgacattatgaccgcagaggattccaccgcagccatgagcagtgactcggccgccgggtcctccgccaaggtgcccgagggcgtggcgggcgcgcccaacgaggcagcactgctggcgctgatggagcgcacgggctacagcatggtgcaagagaacgggcagcgcaagtacggcggcccaccgcccggctgggagggcccgcacccgcagcgtggctgcgaggtcttcgtgggcaagatcccgcgcgacgtgtacgaggacgagctggtgcccgtgttcgaggccgtgggccgcatctacgagctgcgcctcatgatggactttgacggcaagaaccgcggctacgccttcgtcatgtactgccacaagcacgaggccaagcgcgcagtgcgtgagctcaacaactacgagatccgcccgggccgcctgctcggcgtgtgctgcagcgtggacaactgccgcctcttcatcggcgggatccccaagatgaagaagcgcgaggaaatcctggaggagattgccaaggtcaccgagggcgtgctggacgtgatcgtctacgccagcgcggccgacaagatgaagaaccgcggcttcgccttcgtggagtacgagagccaccgcgcggctgccatggctcgccgcaagctcatgcctggcc

SEQ ID NO: 177784 - DNA, 4951 bp, Homo sapiens
  Payload ID: 14884
  Gene Symbol: RBM47
  Gene Name: RNA binding motif protein 47
  ENST ID: ENST00000510871
  CDS Start-End: 709-1890
agactagacgctgagcgctcccgtgcgcagcgccccacgcagccgggacgcggcgccgctctgcgggtggaaccgccgcgcgctcccggcctcgggagctgagcccgagagaacttcgctgccttcgggtcgccgctcccgctttccactgtggaatgtgcagcttgggatagagagaaaccagggtttggggagcggtcctcctggagactttctctctgcaagtctccaaggttaagcaattctgacccactggaattcccagagcctgggagttaagcctaaaacgctctgttgctttaagcggcgcggtggggagtcgctggacactccttattttggttttacattaaaaagaaggcggacgagaagatgttgtaggtgacttcctagctgtgttaagttgctcctgggctgtgaatggtgttaatttctgaagtgggcggctccaaaaacttaacaaggaaagctcaggtaacggaggccttggaaagagactctgcgtcaggtcacccagcagagatcagcaatccttggctcactgaggaggtttggatttgcctcaaagggcactgcaaaaattgaacagaggaatcccaaggaagctgcctgaatttgcctgtatactctcgttctgcgacttataaaggaccagacaaatcaaattagtggttttggtttccgccagctgtggatgcctttgacattatgaccgcagaggattccaccgcagccatgagcagtgactcggccgccgggtcctccgccaaggtgcccgagggcgtggcgggcgcgcccaacgaggcagcactgctggcgctgatggagcgcacgggctacagcatggtgcaagagaacgggcagcgcaagtacggcggcccaccgcccggctgggagggcccgcacccgcagcgtggctgcgaggtcttcgtgggcaagatcccgcgcgacgtgtacgaggacgagctggtgcccgtgttcgaggccgtgggccgcatctacgagctgcgcctcatgatggactttgacggcaagaaccgcggctacgccttcgtcatgtactgccacaagcacgaggccaagcgcgcagtgcgtgagctcaacaactacgagatccgcccgggccgcctgctcggcgtgtgctgcagcgtggacaactgccgcctcttcatcggcgggatccccaagatgaagaagcgcgaggaaatcctggaggagattgccaaggtcaccgagggcgtgctggacgtgatcgtctacgccagcgcggccgacaagatgaagaaccgcggcttcgccttcgtggagtacgagagccaccgcgcggctgccatggctcgccgcaagctcatgcctggccgcatccagctgtggggccaccagatcgccgtggactgggccgaacctgagatcgacgtggacgaggacgtgatggagaccgtgaagatcctctacgtgcgcaacctcatgatcgagaccaccgaggacaccatcaagaagagcttcggccagttcaaccccggctgcgtggagcgcgtcaagaagatccgcgactacgccttcgtgcacttcaccagccgcgaggatgccgtgcatgccatgaacaacctcaacggcactgagctggagggctcgtgcctggaggtcacgctggccaagcccgtggacaaggagcagtactcgcgctaccagaaggcagccaggggcggcggcgcggctgaggcagcgcagcagcccagctacgtgtactcctgcgacccctacacactggcctactacggctacccctacaacgcgctcattgggcccaacagggactactttgtgaaagatacaatcctagaaactcaccctgcaagtttgcctcttgtactaagaagacatgcttaggatgcaaatctaggctgaaatagaatgttggaagcatctttaccagcctattaaagagcaaaggtgtagccacctgcaattaagactggggcagttaaatgccgagaaccgagggctgaggtctgcctccagcaccgtcactgttggttgctgatcatcttttgtgttgttattacaagcaggcagcataagaggccgagggcgaggtgcagctggcaacagagccccagggcctaggggttcctacctcgggggatattctgctggtcgtggtatatatagccgatatcatgaagggaaaggaaagcagcaagaaaaaggatatgaactggtgccgaatttggaaatccctaccgtcaacccagttgccattaaacctggtacagtagccatccctgccattggggctcagtattccatgtttccagcagctccagcccctaaaatgattgaagatggcaaaatccacacagtggagcacatgatcagccccattgctgtgcagccagacccagccagtgctgctgccgccgcagccgcggccgcagccgccgcagccgctgtcattcccactgtgtcgacgccaccacctttccagggccgcccaataactccagtatacacggtggctccaaacgttcagagaattcctactgccgggatctacggggccagttacgtgccatttgctgctccagctacagccacgatcgccacactacagaagaacgcggcagccgcggccgccatgtatggaggatacgcaggctacatacctcaggccttccctgctgctgccattcaggtccccatccccgacgtctaccagacatactgaggctggtgaccagcacgaagacagaccacacaaacaccactgaaggaacgcttgactatttatgaagaaggaacatgttggattcacacatgcaacctgaaagtgaagaatgttagcagatttatttctgaattattttatatacatgaagttttcactagttttttaagactattttcaacttagcatgcctacgttcatacatttccaaaagacttgcaatggttcgtgccttcattccatcttttaaaaatttgtatgctgtactacatttgtatagaggtttttgttgttgtttttttaaggatatattttcagtatgaaggttattttcttaacttctgcactccagagatttctattttgtagtaccttcaataatatatcaactatatattaaaaaagcacacttgaggagctagggaactattttgaaaaatatatacaatatttaaagatacaaacagtagtgcttaaaaatactacataaagcattattttaaaggttatactggaaagtgcaattttaaaatgagtaaaacctctgtatttctgctggcattaagggttgatggtgttaccatgtatcatcatggcggtactattttttaaaagaaattaaacactggatctctccttaagccaacattgaaaagacttgccgcacttctgagtccaaacactggaaagctctcctttgccaccgttagccggggctcattctccatgtgccttagccttaaacatgcccccactcccacatctctcaccctgtcccctcctccccagattcccaatcccaccgcaatgtttggcaagcctaggactgataagtagctctgatagaggagctggtggcttttatacttcttcctgggtttttgttggggtttgttgtttcgttgttttttgtttttttttttgtttggttggggaagtattgtcttctacgtgtgctattttcagtagcagagtaagcacaaggttttaatcgagttgcataagacacctttgcatagctatttaattgcccaatgtaaaactttaatgccatttctaatgcttttattcatttttgaagtatgagtttgtagggacaaagaatgtatgttatcgtagacaagacccccagagactcttttcagcagaaagttatgcttctagttgccttaccatgtttcttgcaaaactgtccatggtcctcaagggtgttggaaacattatgtttattaaatgggcctctcttcctttgctgtgcacttgatgggtgaactggattggggtgtgcacatccaggaggaggaggagagacctgtagaagtttaaagatagtttgtaaatatcttctaatgcttgtttttagtccttttatgttggagaagttcatggtatgtagtttaatgcaaaatgaaaccattttatttcaatgttattaaaaaggtttgttttattaggaagttaatgtattgttgcagtgttttgtgcctgtttaaaggcttttgtttagcagagtgaatgtaaaatacagtaaaatgttaagattgtcatctactttttaaaaaaaaatatcaacttggaattgttttttaaaggctcaatcaaggaagtgaggtgtgcaataaggtagcaagtaaaacgcagttgcgtttttatgtcatgttagagatccatacaattttccactcacgggatttttgttgatggctgaattcttgtggattcataagaggatcatgcccttagcaagtacttttgttttgttttaaattaagagattcccaaatgcctttttccccctcatcttgaaatgagatgagtttttatgtgtaagcaatatttatttaactattctataaaattattgagtgcctactgaggcctttaagcaccgctaacattcctttccatcattcttttaaatgacataaaataattgtgcaatgttcctgatgatgtaccccacaagctgcattcaaactcaaatctgtgggaatgagtgactcgacaaaatgtaattcggatcagatcctcatcccctgactgtgtgaaaaaagtactctccttctagtgaaggattgtcacagagtttcactggatgaaactatgacccagtattcttactgtattttacatatgcctgtaaattatttgcaaaaaagaagaagaagaggaagaaagaaaagaaagaaaagaaagaaagaaagaaagaaagaaagaaagaaa

SEQ ID NO: 177785 - DNA, 2419 bp, Homo sapiens
  Payload ID: 14884
  Gene Symbol: RBM47
  Gene Name: RNA binding motif protein 47
  ENST ID: ENST00000514014
  CDS Start-End: 260-1927
agaaaccctccgtaactctaggtcagagcgcactaaaatgagccacttctgaacgagcagcgcccaggccccaggccctgctgcgaaggccccggcaaaggtcagggccccgtccgcgtgacgctcctgcctgcgcgcggccaagccatgctcggccccagctcaggtaacggaggccttggaaagagactctgcgtcaggtcacccagcagagatcagcaatccttggctcactgaggaggcagcactgctggcgctgatggagcgcacgggctacagcatggtgcaagagaacgggcagcgcaagtacggcggcccaccgcccggctgggagggcccgcacccgcagcgtggctgcgaggtcttcgtgggcaagatcccgcgcgacgtgtacgaggacgagctggtgcccgtgttcgaggccgtgggccgcatctacgagctgcgcctcatgatggactttgacggcaagaaccgcggctacgccttcgtcatgtactgccacaagcacgaggccaagcgcgcagtgcgtgagctcaacaactacgagatccgcccgggccgcctgctcggcgtgtgctgcagcgtggacaactgccgcctcttcatcggcgggatccccaagatgaagaagcgcgaggaaatcctggaggagattgccaaggtcaccgagggcgtgctggacgtgatcgtctacgccagcgcggccgacaagatgaagaaccgcggcttcgccttcgtggagtacgagagccaccgcgcggctgccatggctcgccgcaagctcatgcctggccgcatccagctgtggggccaccagatcgccgtggactgggccgaacctgagatcgacgtggacgaggacgtgatggagaccgtgaagatcctctacgtgcgcaacctcatgatcgagaccaccgaggacaccatcaagaagagcttcggccagttcaaccccggctgcgtggagcgcgtcaagaagatccgcgactacgccttcgtgcacttcaccagccgcgaggatgccgtgcatgccatgaacaacctcaacggcactgagctggagggctcgtgcctggaggtcacgctggccaagcccgtggacaaggagcagtactcgcgctaccagaaggcagccaggggcggcggcgcggctgaggcagcgcagcagcccagctacgtgtactcctgcgacccctacacactggcctactacggctacccctacaacgcgctcattgggcccaacagggactactttgtgaaagcaggcagcataagaggccgagggcgaggtgcagctggcaacagagccccagggcctaggggttcctacctcgggggatattctgctggtcgtggtatatatagccgatatcatgaagggaaaggaaagcagcaagaaaaaggatatgaactggtgccgaatttggaaatccctaccgtcaacccagttgccattaaacctggtacagtagccatccctgccattggggctcagtattccatgtttccagcagctccagcccctaaaatgattgaagatggcaaaatccacacagtggagcacatgatcagccccattgctgtgcagccagacccagccagtgctgctgccgccgcagccgcggccgcagccgccgcagccgctgtcattcccactgtgtcgacgccaccacctttccagggccgcccaataactccagtatacacggtggctccaaacgttcagagaattcctactgccgggatctacggggccagttacgtgccatttgctgctccagctacagccacgatcgccacactacagaagaacgcggcagccgcggccgccatgtatggaggatacgcaggctacatacctcaggccttccctgctgctgccattcaggtccccatccccgacgtctaccagacatactgaggctggtgaccagcacgaagacagaccacacaaacaccactgaaggaacgcttgactatttatgaagaaggaacatgttggattcacacatgcaacctgaaagtgaagaatgttagcagatttatttctgaattattttatatacatgaagttttcactagttttttaagactattttcaacttagcatgcctacgttcatacatttccaaaagacttgcaatggttcgtgccttcattccatcttttaaaaatttgtatgctgtactacatttgtatagaggtttttgttgttgtttttttaaggatatattttcagtatgaaggttattttcttaacttctgcactccagagatttctattttgtagtaccttcaataatatatcaactatatattaaaaaagcacacttgaggagctagggaactattttgaaaaatatatacaatatttaaagatacaaacagtagtgcttaaaaatactacataaag

SEQ ID NO: 177786 - DNA, 582 bp, Homo sapiens
  Payload ID: 14884
  Gene Symbol: RBM47
  Gene Name: RNA binding motif protein 47
  ENST ID: ENST00000507180
  CDS Start-End: 212-582
gcttaagcaaagctttcattacagttagcctgtcgcacccagatcaagattggaaaggatttgcctcaaagggcactgcaaaaattgaacagaggaatcccaaggaagctgcctgaatttgcctgtatactctcgttctgcgacttataaaggaccagacaaatcaaattagtggttttggtttccgccagctgtggatgcctttgacattatgaccgcagaggattccaccgcagccatgagcagtgactcggccgccgggtcctccgccaaggtgcccgagggcgtggcgggcgcgcccaacgaggcagcactgctggcgctgatggagcgcacgggctacagcatggtgcaagagaacgggcagcgcaagtacggcggcccaccgcccggctgggagggcccgcacccgcagcgtggctgcgaggtcttcgtgggcaagatcccgcgcgacgtgtacgaggacgagctggtgcccgtgttcgaggccgtgggccgcatctacgagctgcgcctcatgatggactttgacggcaagaaccgcggctacgccttcgtcatgtactgccacaagcacgaggc

SEQ ID NO: 177787 - DNA, 856 bp, Homo sapiens
  Payload ID: 14884
  Gene Symbol: RBM47
  Gene Name: RNA binding motif protein 47
  ENST ID: ENST00000505414
  CDS Start-End: 381-856
ccgcgcctacaaacaggcttagcgctccactgaaatgcgggaggctccttaactcttgtataaacagaaaccctccgtaactctaggtcagagcgcactaaaatgagccacttctgaacgagcagcgcccaggccccaggccctgctgcgaaggccccggcaaaggtcagggccccgtccgcgtgacgctcctgcctgcgcgcggccaagccatgctcggccccaggatttgcctcaaagggcactgcaaaaattgaacagaggaatcccaaggaagctgcctgaatttgcctgtatactctcgttctgcgacttataaaggaccagacaaatcaaattagtggttttggtttccgccagctgtggatgcctttgacattatgaccgcagaggattccaccgcagccatgagcagtgactcggccgccgggtcctccgccaaggtgcccgagggcgtggcgggcgcgcccaacgaggcagcactgctggcgctgatggagcgcacgggctacagcatggtgcaagagaacgggcagcgcaagtacggcggcccaccgcccggctgggagggcccgcacccgcagcgtggctgcgaggtcttcgtgggcaagatcccgcgcgacgtgtacgaggacgagctggtgcccgtgttcgaggccgtgggccgcatctacgagctgcgcctcatgatggactttgacggcaagaaccgcggctacgccttcgtcatgtactgccacaagcacgaggccaagcgcgcagtgcgtgagctcaacaactacgagatccgcccgggccgcctgctcggcgtgtgctgcagcgtggacaactgccgcctcttcatcggcgggatccc

SEQ ID NO: 177788 - DNA, 836 bp, Homo sapiens
  Payload ID: 14884
  Gene Symbol: RBM47
  Gene Name: RNA binding motif protein 47
  ENST ID: ENST00000511598
  CDS Start-End: 496-836
gtcacagaattcgattcctgttggcccattccgcgcctacaaacaggcttagcgctccactgaaatgcgggaggctccttaactcttgtataaacagaaaccctccgtaactctaggtcagagcgcactaaaatgagccacttctgaacgagcagcgcccaggccccaggccctgctgcgaaggccccggcaaaggtcagggccccgtccgcgtgacgctcctgcctgcgcgcggccaagccatgctcggccccagctcaggtaacggaggccttggaaagagactctgcgtcaggtcacccagcagagatcagcaatccttggctcactgaggaggtttggatttgcctcaaagggcactgcaaaaattgaacagaggaatcccaaggaagctgcctgaatttgcctgtatactctcgttctgcgacttataaaggaccagacaaatcaaattagtggttttggtttccgccagctgtggatgcctttgacattatgaccgcagaggattccaccgcagccatgagcagtgactcggccgccgggtcctccgccaaggtgcccgagggcgtggcgggcgcgcccaacgaggcagcactgctggcgctgatggagcgcacgggctacagcatggtgcaagagaacgggcagcgcaagtacggcggcccaccgcccggctgggagggcccgcacccgcagcgtggctgcgaggtcttcgtgggcaagatcccgcgcgacgtgtacgaggacgagctggtgcccgtgttcgaggccgtgggccgcatctacgagctgcgcctcatgatggactttgacggcaagaaccgcggctacgc

SEQ ID NO: 177789 - DNA, 657 bp, Homo sapiens
  Payload ID: 14884
  Gene Symbol: RBM47
  Gene Name: RNA binding motif protein 47
  ENST ID: ENST00000511902
  CDS Start-End: 479-656
ataaacaggtaaggcggagggggtggggcgcggattgcggacatctgggtttcttgggaattgggatggggtgggggttcgagccaactccccagagagcaggcaaggtgaagcgagggcttggctgctgtttctaaatgcagtgtttttttgttccctttctagaaaccctccgtaactctaggtcagagcgcactaaaatgagccacttctgaacgagcagcgcccaggccccaggccctgctgcgaaggccccggcaaaggtcagggccccgtccgcgtgacgctcctgcctgcgcgcggccaagccatgctcggccccaggatttgcctcaaagggcactgcaaaaattgaacagaggaatcccaaggaagctgcctgaatttgcctgtatactctcgttctgcgacttataaaggaccagacaaatcaaattagtggttttggtttccgccagctgtggatgcctttgacattatgaccgcagaggattccaccgcagccatgagcagtgactcggccgccgggtcctccgccaaggtgcccgagggcgtggcgggcgcgcccaacgaggcagcactgctggcgctgatggagcgcacgggctacagcatggtgcaagagaacgggcagcgcaagtacggcggcccaccgcc

SEQ ID NO: 177790 - DNA, 741 bp, Homo sapiens
  Payload ID: 14884
  Gene Symbol: RBM47
  Gene Name: RNA binding motif protein 47
  ENST ID: ENST00000505220
  CDS Start-End: 564-741
ataaacaggtaaggcggagggggtggggcgcggattgcggacatctgggtttcttgggaattgggatggggtgggggttcgagccaactccccagagagcaggcaaggtgaagcgagggcttggctgctgtttctaaatgcagtgtttttttgttccctttctagaaaccctccgtaactctaggtcagagcgcactaaaatgagccacttctgaacgagcagcgcccaggccccaggccctgctgcgaaggccccggcaaaggtcagggccccgtccgcgtgacgctcctgcctgcgcgcggccaagccatgctcggccccagctcaggtaacggaggccttggaaagagactctgcgtcaggtcacccagcagagatcagcaatccttggctcactgaggaggtttggatttgcctcaaagggcactgcaaaaattgaacagaggaatcccaaggaagctgcctgaatttgcctgtatactctcgttctgcgacttataaaggaccagacaaatcaaattagtggttttggtttccgccagctgtggatgcctttgacattatgaccgcagaggattccaccgcagccatgagcagtgactcggccgccgggtcctccgccaaggtgcccgagggcgtggcgggcgcgcccaacgaggcagcactgctggcgctgatggagcgcacgggctacagcatggtgcaagagaacgggcagcgcaagtacggcggcccaccgc

SEQ ID NO: 177791 - DNA, 797 bp, Homo sapiens
  Payload ID: 14884
  Gene Symbol: RBM47
  Gene Name: RNA binding motif protein 47
  ENST ID: ENST00000514782
  CDS Start-End: 386-797
tgaaccttcagcaaaggtatctgcgctcctaaaaaacaacaggaatgtggcactggcctttagccaggggaggctcagccagcaggataaaatttcagggcagatttacgggaagttgccggtgttgggagtaaaaatctggtttgctcaggtaacggaggccttggaaagagactctgcgtcaggtcacccagcagagatcagcaatccttggctcactgaggaggtttggatttgcctcaaagggcactgcaaaaattgaacagaggaatcccaaggaagctgcctgaatttgcctgtatactctcgttctgcgacttataaaggaccagacaaatcaaattagtggttttggtttccgccagctgtggatgcctttgacattatgaccgcagaggattccaccgcagccatgagcagtgactcggccgccgggtcctccgccaaggtgcccgagggcgtggcgggcgcgcccaacgaggcagcactgctggcgctgatggagcgcacgggctacagcatggtgcaagagaacgggcagcgcaagtacggcggcccaccgcccggctgggagggcccgcacccgcagcgtggctgcgaggtcttcgtgggcaagatcccgcgcgacgtgtacgaggacgagctggtgcccgtgttcgaggccgtgggccgcatctacgagctgcgcctcatgatggactttgacggcaagaaccgcggctacgccttcgtcatgtactgccacaagcacgaggccaagcgcgcagtgcgtgagctcaacaactacgagatccgcc

SEQ ID NO: 177792 - DNA, 1742 bp, Homo sapiens
  Payload ID: 14885
  Gene Symbol: RBM48
  Gene Name: RNA binding motif protein 48
  Uniprot ID: Q5RL73
  ENST ID: ENST00000265732
  CDS Start-End: 42-1145
gggcggatgttgtcctccctgcgaggatcaaagtaggcaagatggcgtcgagcggcggggagctagggagtttatttgatcaccacgtccagagggcggtatgcgacacacgggccaaatatcgagagggacgacggcctcgtgctgtgaaggtatatacaatcaatttggaatctcagtacttattaatacaaggagttcctgctgtgggagtcatgaaggaattagttgagcgattcgctttatatggtgcaattgaacagtacaatgctctagatgaatacccagcagaagactttactgaagtttatcttattaaatttatgaacttacaaagtgcaaggacagccaagagaaaaatggatgaacagagtttcttcggtggattgcttcatgtgtgctatgctccagaatttgaaacagttgaagaaactagaaaaaaactacaaatgcggaaggcatatgtagtaaaaactactgaaaataaagaccattacgtgacaaagaagaaattggttacagagcataaagacacagaggattttagacaagacttccactcagagatgtctggattttgtaaagctgctttgaacacttctgcagggaactcaaatccttatcttccgtattcctgtgaattgcctttatgttatttctcctcaaaatgtatgtgttcatccgggggacctgtagacagagcaccagactcctctaaggatggtagaaaccatcataaaacaatggggcattataaccacaatgactctttgcggaaaacacagataaactctttgaaaaactcagtggcctgccctggtgcacaaaaggctattacgtcttcagaggcagttgacagatttatgcctaggacaacacaactgcaggagcgcaaaagaagaagagaagatgatcgtaaacttggaacttttcttcaaacaaacccaactggtaatgagattatgattggacctctgttaccagacatctctaaagtggatatgcacgatgactcattgaatacaacggcgaatttaattcggcataaacttaaagaggtaatttcatctgtgccaaagcctccagaggacaagccagaagatgtacatacaagtcatccattaaaacaaagaagaagaatatagagtgccagcagcaacttagtattttctaaaaagaacatttattatttatttttagcctgtcattttaattcttcaagagattttactgctggtattttttaatgcactcctctttgtaatttcattcaagccatttgtctaaagtcatttctttgttttttgggagatggagtcttgctctgttgcccaggctggaatgcagtggcgtgatctcggctcactgcaacctccacctcccgggttcaagcgattctcctgcctcagcctcctgagtatctgggattacaggcgtgcaccaccatgcctggctaagttttgtgttttttttagtagagatgggttttcaccatattggtcaggctggtctcgaactcctgaccttgtgatacacctgcctcagcctcccaaagggatgagccaccgcgcctggcccatttcttctttttttgacccatacttaatgttgcagaaactattcttgtcataacattatctctcatgtacagtaattatatgtaaattaattgaagcaaatatggaaactttacaatagaaataaagataggcagccagcgtctgtttccaattataatacaa

SEQ ID NO: 177793 - DNA, 715 bp, Homo sapiens
  Payload ID: 14885
  Gene Symbol: RBM48
  Gene Name: RNA binding motif protein 48
  ENST ID: ENST00000496410
  CDS Start-End: 441-715
aggcaagatggcgtcgagcggcggggagctagggagtttatttgatcaccacgtccagagggcggtatgcgacacacgggccaaatatcgagagggacgacggcctcgtgctgtgaaggtaaagtgattttggtttcattcgctctcctcggtagctttatgtgagtgctagcgccatatgaccagcctacggaaataaaggcacgacaaggcttccgtcagatctgtctctcgttagagctggcgtgaagaaccctcggtcagttaccaaagattctcacgacgcctttggtcaagtattagaacatcaactccacgagaataggccttggttttagtcattggatcttctgtgtttacagtactacttggcacaggtatatacaatcaatttggaatctcagtacttattaatacaaggagttcctgctgtgggagtcatgaaggaattagttgagcgattcgctttatatggtgcaattgaacagtacaatgctctagatgaatacccagcagaagactttactgaagtttatcttattaaatttatgaacttacaaagtgcaaggacagccaagagaaaaatggatgaacagagtttcttcggtggattgcttcatgtgtgctatgctccagaatttgaaacagttgaagaaactagaaaaaaactacaaatgcggaaggcatatgtagtaaaaactactgaaaataaagg

SEQ ID NO: 177794 - DNA, 4093 bp, Homo sapiens
  Payload ID: 14885
  Gene Symbol: RBM48
  Gene Name: RNA binding motif protein 48
  Uniprot ID: Q5RL73
  ENST ID: ENST00000481551
  CDS Start-End: 42-1172
gggcggatgttgtcctccctgcgaggatcaaagtaggcaagatggcgtcgagcggcggggagctagggagtttatttgatcaccacgtccagagggcggtatgcgacacacgggccaaatatcgagagggacgacggcctcgtgctgtgaaggtatatacaatcaatttggaatctcagtacttattaatacaaggagttcctgctgtgggagtcatgaaggaattagttgagcgattcgctttatatggtgcaattgaacagtacaatgctctagatgaatacccagcagaagactttactgaagtttatcttattaaatttatgaacttacaaagtgcaaggacagccaagagaaaaatggatgaacagagtttcttcggtggattgcttcatgtgtgctatgctccagaatttgaaacagttgaagaaactagaaaaaaactacaaatgcggaaggcatatgtagtaaaaactactgaaaataaagaccattacgtgacaaagaagaaattggttacagagcataaagacacagaggattttagacaagacttccactcagagatgtctggattttgtaaagctgctttgaacacttctgcagggaactcaaatccttatcttccgtattcctgtgaattgcctttatgttatttctcctcaaaatgtatgtgttcatccgggggacctgtagacagagcaccagactcctctaaggatggtagaaaccatcataaaacaatggggcattataaccacaatgactctttgcggaaaacacagataaactctttgaaaaactcagtggcctgccctggtgcacaaaaggctattacgtcttcagaggcagttgacagatttatgcctaggacaacacaactgcaggagcgcaaaagaagaagagaagatgatcgtaaacttggaacttttcttcaaacaaacccaactggtaatgagattatgattggacctctgttaccagacatctctaaagtggatatgcacgatgactcattgaatacaacggcgaatttaattcggcataaacttaaagaggtaaggttatttttaaaaaactattctaagacacgatttggttataggattaaatggagaattatttgtgggaacaatagtactgtaattttttttcactttttagtgttttgatgtgtttttctacagttctctgttgaaataactgaatttggctaacattttatttgctttaaactgttaatacttgctttaaacaatgaacagacattttatatcactgtagatacaaaatattaaagcagtggtttcagccaattaaatcaatctgtgagagtggagcccaggcctgccatttttgttaaaagctccccaggtagttctaatatgagccaaagttgagaagcaaaagtattgtaaattatttctctcaaatttagagttattacagtttatatcaaattcaaaatgcttaatttgcttttgtgataaagagcaatagaaggtggtgagatttctaaaaattaggcctccaggtatgcatttcaaatgtagacttcttaaatgatcgggatcagattgtgctgcctaggtagtctgtttttttttttaatgtcatttacataatcattttccatttcctaagcacaaatgaagttaacatctgagttagcttttgaaagacacctttttgtggggtagggactactgttacaaatcataaactgagggttatgacattctcttatacttactccaagatgcagaaactgcttttcacatagttttactcatattttacaatgtgattaagggaggctaaggtagtttaatttcatatatgtacattttttacctaaaaatatctgattaaaggtattatttaataataattaaaatccgtgggcacagttttgaagccttctttagcttttcagtttaggctgggcccagtgcctcacaccaataacttcagcactttgggaggctgaggtgagcagattgcttgagcccaggagtctgagaccagcctgaccaatgtgatgaaaccccatctttaccataaatatacaaaaattagccaggcgtggtggtgaactcttgtagctacttgggaagcttaggtggaagggtacttgagtctgggaggcggaggttgcagtgagccaagatcatgccactgcactccagcctgggtgacagtgtgagaccctgtctcaaaaaaaaaggttttcagtttgtgctgccacccttacttccttccttcagttacagctgaactgaggcatagacatagatacatacctgtctcaaccagagctgattacattttcaagataaacgtgtgaagtccaaattctaggtccagaaatagaacaacaaaaaaaagatattaaatacagtttactatagtttctaataattttccatttcaaatgaagactcttactttgctttgacttattgtatactctttgtacactctttttctgatggtgtgtttgcttttcctttttctccaggaaattgaggattatactgcttcctgctcatttctccaaaggttttcatccccccaaatctatcaaacgttatcagtgtttcaagaatgcaaaaccaggatatctatctgaatccgtaatataacaagtgtctttagatctataaaggaatgttaaagtagagcatatgttcacttttcttcctccaaattttttttctttttaaatagctttagaaattttactgtcatcagtattcaaatggaagactccactctgtgcctaggtcataggctgtaccttgaacttaggcgaactctgcctcgaaagtgacatcaaggattgaactattggatgtagtcttacctcttctaatagcttatttactcctgtgctatagaaactaagttttaatggttcttttttttttttaattaggtaatttcatctgtgccaaagcctccagaggacaagccagaagatgtacatacaagtcatccattaaaacaaagaagaagaatatagagtgccagcagcaacttagtattttctaaaaagaacatttattatttatttttagcctgtcattttaattcttcaagagattttactgctggtattttttaatgcactcctctttgtaatttcattcaagccatttgtctaaagtcatttctttgttttttgggagatggagtcttgctctgttgcccaggctggaatgcagtggcgtgatctcggctcactgcaacctccacctcccgggttcaagcgattctcctgcctcagcctcctgagtatctgggattacaggcgtgcaccaccatgcctggctaagttttgtgttttttttagtagagatgggttttcaccatattggtcaggctggtctcgaactcctgaccttgtgatacacctgcctcagcctcccaaagggatgagccaccgcgcctggcccatttcttctttttttgacccatacttaatgttgcagaaactattcttgtcataacattatctctcatgtacagtaattatatgtaaattaattgaagcaaatatggaaactttacaatagaaataaagataggcagccagcgtctgtttccaattataatacaagtattgaatgaaccattgaaacactagaagtcaggatgtttccgaatgccagggtttcaaaatcaagacaattctatgaagtaaaaagtagattagctattagaacaaagctgaaattagaaccttatatgctttaaataacttttaagaatttgcttgacctgtggcaatccaaaaatacatcagtatttataaattctagacttctgttactacttctggcatatccacacttttttctgtcagtggattacataattggaaatttcagtacatctagactgtctctattttctttttctttttttatttttagtagagacagggtctcactgtgttgcccaggcaggtattgaactcctgggctcaagtgattcacccacctcggcctcccaaagtactaggattatgggtgtgacccactgtgcctggccattttctttactgataaaaataacttgagaaggtcca

SEQ ID NO: 177795 - DNA, 1236 bp, Homo sapiens
  Payload ID: 14885
  Gene Symbol: RBM48
  Gene Name: RNA binding motif protein 48
  ENST ID: ENST00000617438
  CDS Start-End: 1-1083
atggcgtcgagcggcggggagctagggagtttatttgatcaccacgtccagagggcggtatgcgacacacgggccaaatatcgagagggacgacggcctcgtgctgtgaaggtatatacaatcaatttggaatctcagtacttattaatacaaggagttcctgctgtgggagtcatgaaggaattagttgagcgattcgctttatatggtgcaattgaacagtacaatgctctagatgaatacccagcagaagactttactgaagtttatcttattaaatttatgaacttacaaagtgcaaggacagccaagagaaaaatggatgaacagagtttcttcggtggattgcttcatgtgtgctatgctccagaatttgaaacagttgaagaaactagaaaaaaactacaaatgcggaaggcatatgtagtaaaaactactgaaaataaagaccattacgtgacaaagaagaaattggttacagagcataaagacacagaggattttagacaagacttccactcagagatgtctggattttgtaaagctgctttgaacacttctgcagggaactcaaatccttatcttccgtattcctgtgaattgcctttatgttatttctcctcaaaatgtatgtgttcatccgggggacctgtagacagagcaccagactcctctaaggatggtagaaaccatcataaaacaatggggcattataaccacaatgactctttgcggaaaacacagataaactctttgaaaaactcagtggcctgccctggtgcacaaaaggctattacgtcttcagaggcagttgacagatttatgcctaggacaacacaactgcaggagcgcaaaagaagaagagaagatgatcgtaaacttggaacttttcttcaaacaaacccaactggtaatgagattatgattggacctctgttaccagacatctctaaagtggatatgcacgatgactcattgaatacaacggcgaatttaattcggcataaacttaaagaggtatttcatctgtgccaaagcctccagaggacaagccagaagatgtacatacaagtcatccattaaaacaaagaagaagaatatagagtgccagcagcaacttagtattttctaaaaagaacatttattatttatttttagcctgtcattttaattcttcaagagattttactgctggtattttttaatgcactcctctttgtaatttcattcaagcca

SEQ ID NO: 177796 - DNA, 1840 bp, Homo sapiens
  Payload ID: 14886
  Gene Symbol: RBM4B
  Gene Name: RNA binding motif protein 4B
  Uniprot ID: Q9BQ04
  ENST ID: ENST00000310046
  CDS Start-End: 171-1250
ggctcccgcgaggggaaggggagggaagcagcgcgcactcgcgcgtgcgtgagctggcgcgcgagaaagggcccggtcgcgtccaggctcgagcggccgtcgccattttgtaaggttctctctgacgtgggagccgccgtcgctgccgccacccggaggctcttgtcaggatggtgaagctgttcatcggaaaccttccccgggaggctacagagcaggagattcgctcactcttcgagcagtatgggaaggtgctggaatgtgacatcattaagaattacggctttgtgcacatagaagacaagacggcagctgaggatgccatacgcaacctgcaccattacaagcttcatggggtgaacatcaacgtggaagccagcaagaataagagcaaagcttcaaccaagttacacgtgggtaacatcagccccacttgtaccaaccaagagcttcgagccaagtttgaggagtatggtccggtcatcgaatgtgacatcgtgaaagattatgccttcgtacacatggagcgggcagaggatgcagtggaggccatcaggggccttgacaacacagagtttcaaggcaaaagaatgcatgtgcagttgtccacaagccggcttcggactgcccctggtatgggagaccagagtggctgctatcggtgtgggaaagaagggcactggtccaaagagtgcccagtagatcgtacgggtcgtgtggcagactttactgagcagtataatgaacaatatggagcagttcgaacaccttacaccatgggctacggggaatccatgtattacaacgatgcatatggagcactcgactactataagcgataccgggtccgctcttatgaggcagtagcagcggcggcagcggcttctgcatacaactacgcagagcagaccatgtcccatctgcctcaagtccaaagcacaactgtgaccagccacctcaactctacttctgttgatccctatgacagacacctattgccaaactctggcgctgctgccacttcagctgctatggctgctgctgcagccaccacttcctcctactatggaagggacaggagcccactgcgtcgtgctgcagccatgctccccacagttggagagggctacggttatgggccagagagtgaattatctcaggcttccgcagctacacggaattctctgtatgacatggcccggtatgaacgggagcagtatgtggaccgagcccggtactcagccttttaaaaactggaggtaggataattgcggactgaaccctcgggctgcggtcatatatgagaacttgctccgcgcggtcccctttgccgggatgtttccattgcttcatgtttcagtaaacaaaaggagtttgtgaccaactatgttttctttcttaattcttctaagttgacttttctttcctcctgaaactagtctctgtagcctttcactctgttccttatattctcagcctctgagcagccctaggtaaggattatgctggcatcccctttttcctgtgcagtggaacccctcttatcttgctttccctaggagttgaatccttctccctgcctacctgcagcatctcctttccctttaaaatgaccatgtagtggcaagcagccttttactcttctgttagctctggactcttaacacttaagttactcttctgaaattgctaggaccattgggggttttgttgttttgtttgttttttatgtccgacctgtgatcgtggtacagcattagctgaaatttacccttgttttactccactcctcccttttttaaaaaaattttttgacaaataaatgtttctaacacttaaa

SEQ ID NO: 177797 - DNA, 2339 bp, Homo sapiens
  Payload ID: 14886
  Gene Symbol: RBM4B
  Gene Name: RNA binding motif protein 4B
  Uniprot ID: Q9BQ04
  ENST ID: ENST00000525754
  CDS Start-End: 670-1749
gtgtgtgtgatgtggggagctcgggggcgggtcgggccgggcctccggcagactgcacggcccggatttgggtttctcattttgcagcgggaggtctgggaagacaacgggaggaggcggggccgggtctccggaaggaggcggggcaggggtcgggtcgagtctttgttggggcgaagaagctggagggtgggccgctgggggcgaggtggttggtccccggtttgggggaaaggggacttttttctttttagagtatcttgaaaggcgctagtgcgcgcaggagaggtacacagatttccctccaaaaccttgttaccaggcgcactgcgattgatgccccttgcctttgcttgggcttttctcttccctcattttaagacatgaagcagctaattctggtatttcattgcgctccacttcacggagatgatagactgggctatgcatgctgaccctcgacctcctgtttgcatgtcacgcatagctcgcacttctcgagaacaaaccgcccttcttctattgaggaagaataatgaatgtctgtacgagggtcttgaaggtgcaagaactttggaggattagacgaaaatgctgcagtgcaccgaaatttcccaccacacccctgacttttgaagtcttgtgtttctctcccaggctcttgtcaggatggtgaagctgttcatcggaaaccttccccgggaggctacagagcaggagattcgctcactcttcgagcagtatgggaaggtgctggaatgtgacatcattaagaattacggctttgtgcacatagaagacaagacggcagctgaggatgccatacgcaacctgcaccattacaagcttcatggggtgaacatcaacgtggaagccagcaagaataagagcaaagcttcaaccaagttacacgtgggtaacatcagccccacttgtaccaaccaagagcttcgagccaagtttgaggagtatggtccggtcatcgaatgtgacatcgtgaaagattatgccttcgtacacatggagcgggcagaggatgcagtggaggccatcaggggccttgacaacacagagtttcaaggcaaaagaatgcatgtgcagttgtccacaagccggcttcggactgcccctggtatgggagaccagagtggctgctatcggtgtgggaaagaagggcactggtccaaagagtgcccagtagatcgtacgggtcgtgtggcagactttactgagcagtataatgaacaatatggagcagttcgaacaccttacaccatgggctacggggaatccatgtattacaacgatgcatatggagcactcgactactataagcgataccgggtccgctcttatgaggcagtagcagcggcggcagcggcttctgcatacaactacgcagagcagaccatgtcccatctgcctcaagtccaaagcacaactgtgaccagccacctcaactctacttctgttgatccctatgacagacacctattgccaaactctggcgctgctgccacttcagctgctatggctgctgctgcagccaccacttcctcctactatggaagggacaggagcccactgcgtcgtgctgcagccatgctccccacagttggagagggctacggttatgggccagagagtgaattatctcaggcttccgcagctacacggaattctctgtatgacatggcccggtatgaacgggagcagtatgtggaccgagcccggtactcagccttttaaaaactggaggtaggataattgcggactgaaccctcgggctgcggtcatatatgagaacttgctccgcgcggtcccctttgccgggatgtttccattgcttcatgtttcagtaaacaaaaggagtttgtgaccaactatgttttctttcttaattcttctaagttgacttttctttcctcctgaaactagtctctgtagcctttcactctgttccttatattctcagcctctgagcagccctaggtaaggattatgctggcatcccctttttcctgtgcagtggaacccctcttatcttgctttccctaggagttgaatccttctccctgcctacctgcagcatctcctttccctttaaaatgaccatgtagtggcaagcagccttttactcttctgttagctctggactcttaacacttaagttactcttctgaaattgctaggaccattgggggttttgttgttttgtttgttttttatgtccgacctgtgatcgtggtacagcattagctgaaatttacccttgttttactccactcctcccttttttaaaaaaattttttgacaaataaatgtttctaacacttaaa

SEQ ID NO: 177798 - DNA, 867 bp, Homo sapiens
  Payload ID: 14886
  Gene Symbol: RBM4B
  Gene Name: RNA binding motif protein 4B
  ENST ID: ENST00000524637
  CDS Start-End: 87-530
aggctcgagcggccgtcgccattttgtaaggttctctctgacgtgggagccgccgtcgctgccgccacccggaggctcttgtcaggatggtgaagctgttcatcggaaaccttccccgggaggctacagagcaggagattcgctcactcttcgagcagtatgggaaggtgctggaatgtgacatcattaagaattacggctttgtgcacatagaagacaagacggcagctgaggatgccatacgcaacctgcaccattacaagcttcatggggtgaacatcaacgtggaagccagcaagaataagagcaaagcttcaaccaagttacacgtgggtaacatcagccccacttgtaccaaccaagagcttcgagccaagtttgaggagtatggtccggtcatcgaatgtgacatcgtgaaagattatgccttcgtacacatggagcgggcagaggatgcagtggaggccatcaggggccttgacaacacagagtttcaaggatggtggagcacaaggcttcctctcgcatagctgcatccagaagaaggcaaaagaatgcatgtgcagttgtccacaagccggcttcggactgcccctggtatgggagaccagagtggctgctatcggtgtgggaaagaagggcactggtccaaagagtgcccagtagatcgtacgggtcgtgtggcagactttactgagcagtataatgaacaatatggagcagttcgaacaccttacaccatgggctacggggaatccatgtattacaacgatgcatatggagcactcgactactataagcgataccgggtccgctcttatgaggcagtagcagcggcggcagcggcttctgcatacaactacgcag

SEQ ID NO: 177799 - DNA, 324 bp, Homo sapiens
  Payload ID: 14886
  Gene Symbol: RBM4B
  Gene Name: RNA binding motif protein 4B
  ENST ID: ENST00000528106
  CDS Start-End: 1-62
atgacatggcccggtatgaacgggagcagtatgtggaccgagcccggtactcagccttttaaaaactggaggtgtgaacctcaaatggactgaataaccctgagttggttgcagtcccaggagcctgatgttaatgaggctgccaggatgaaatactccagaactgttggggatccaaattcgggtctcaccctagcagaactgatccaagaacgtcacaacttttgaagtcgattggcacagatcaagaccaagatttggccctttgtctgtaataagtagaggaacttggtgtaggataattgcggactgaaccctcgggct

SEQ ID NO: 177800 - DNA, 769 bp, Homo sapiens
  Payload ID: 14886
  Gene Symbol: RBM4B
  Gene Name: RNA binding motif protein 4B
  ENST ID: ENST00000531969
  CDS Start-End: 74-505
cgtcgccattttgtaaggttctctctgacgtgggagccgccgtcgctgccgccacccggaggctcttgtcaggatggtgaagctgttcatcggaaaccttccccgggaggctacagagcaggagattcgctcactcttcgagcagtatgggaaggtgctggaatgtgacatcattaagaattacggctttgtgcacatagaagacaagacggcagctgaggatgccatacgcaacctgcaccattacaagcttcatggggtgaacatcaacgtggaagccagcaagaataagagcaaagcttcaaccaagttacacgtgggtaacatcagccccacttgtaccaaccaagagcttcgagccaagtttgaggagtatggtccggtcatcgaatgtgacatcgtgaaagattatgccttcgtacacatggagcgggcagaggatgcagtggaggccatcaggggccttgacaacacagagtttcaaggtaggataattgcggactgaaccctcgggctgcggtcatatatgagaacttgctccgcgcggtcccctttgccgggatgtttccattgcttcatgtttcagtaaacaaaaggagtttgtgaccaactatgttttctttcttaattcttctaagttgacttttctttcctcctgaaactagtctctgtagcctttcactctgttccttatattctcagcctctgagcagccctaggtaaggattatgctggcatcccctttttcctgtgcagtggaacccctctt

SEQ ID NO: 177801 - DNA, 1646 bp, Homo sapiens
  Payload ID: 14886
  Gene Symbol: RBM4B
  Gene Name: RNA binding motif protein 4B
  ENST ID: ENST00000531036
  CDS Start-End: 127-582
gtgcgtgagctggcgcgcgagaaagggcccggtcgcgtccaggctcgagcggccgtcgccattttgtaaggttctctctgacgtgggagccgccgtcgctgccgccacccggaggctcttgtcaggatggtgaagctgttcatcggaaaccttccccgggaggctacagagcaggagattcgctcactcttcgagcagtatgggaaggtgctggaatgtgacatcattaagaattacggctttgtgcacatagaagacaagacggcagctgaggatgccatacgcaacctgcaccattacaagcttcatggggtgaacatcaacgtggaagccagcaagaataagagcaaagcttcaaccaagttacacgtgggtaacatcagccccacttgtaccaaccaagagcttcgagccaagtttgaggagtatggtccggtcatcgaatgtgacatcgtgaaagattatgccttcgtacacatggagcgggcagaggatgcagtggaggccatcaggggccttgacaacacagagtttcaaggtgaactgctctgggcctgggtagtagcgccgagtggggtctagctcaaaacaggcaagaacacaagactatagaacttgctgggtggtctcttccattctgttttagctggaaataatagattatgtttaccgctcttaagcataatttacccctggggaagcaaacacttccccttttcaggtttgctaagatgttgctcaccgactgcatagaatcacaaactgtgggttactttaccctgcgggattcttgcattgattcgagtgctgttggaagtgtaatctgcttggggaaacgagtacctcatgagagaagggaggataaaggtccgtggcttacctgcttctttggtgatgatcaggaagccttatatttgagggtttaagtgcttaagatttatattctttactgctttgggtggatactggtgggaaagaagaaaaaagacatctagaggaagccctatattataaatctgggtggcaagtctggatctgcgggagtatctttttgttgatcaaagttgtgcagtctcttcaagcagagtcaaaaaaacatgccatggagtgttctgctccacctgttcatttcaccctcagaaaaggaaatttctaaatatatcagactcaatgggaatgatggtcccgcttctgaagaaatttcagtacaagcatcgtagagcatatcatactatttataccgataataaaggtacatatgttgtcattaataccacaagaggttgtcagaagactctagaactgtgctaatatggtaaccacatgcggcttagtaaattgaaattaacagattagataaaatttaaaattcagtttttcaagtgtataccagacacgtttcaagcactcagtagtcatgaggcctgtggctaccgtattaatagagacacagaacatttccatcatcatagaacattcttttggatagcactgttctacaagtgttttgttaacagtatcgtcttggacctcatgttcatagccacttttgtggttcctaagtcaacaccttttttgccctgagtgtcattaaaggggttgttaagaagtacttttgggtcttctattaaaactaaaaaacaaaa

SEQ ID NO: 177802 - DNA, 3188 bp, Homo sapiens
  Payload ID: 14887
  Gene Symbol: RBM5
  Gene Name: RNA binding motif protein 5
  Uniprot ID: P52756
  ENST ID: ENST00000347869
  CDS Start-End: 176-2623
aagcgtgaggtactgtgggtaggagacggccgtcggcggaggcgccattttgtgtagccgccgaaccttgttggaggttctggggcgcagaaccgctactgctgcttcggtctctccttgggaaaaaataaaatttgaaccttttggagctgtgtgctaaatcttcagtgggacaatgggttcagacaaaagagtgagtagaacagagcgtagtggaagatacggttccatcatagacagggatgaccgtgatgagcgtgaatcccgaagcaggcggagggactcagattacaaaagatctagtgatgatcggaggggtgatagatatgatgactaccgagactatgacagtccagagagagagcgtgaaagaaggaacagtgaccgatccgaagatggctaccattcagatggtgactatggtgagcacgactataggcatgacatcagtgacgagagggagagcaagaccatcatgctgcgcggccttcccatcaccatcacagagagcgatattcgagaaatgatggagtccttcgaaggccctcagcctgcggatgtgaggctgatgaagaggaaaacaggtgtaagccgtggtttcgccttcgtggagttttatcacttgcaagatgctaccagctggatggaagccaatcagaaaaagttggtgattcaaggaaagcacattgcaatgcattatagcaatcccagacctaagtttgaagattggctttgtaacaagtgctgccttaacaatttcaggaaaagactaaaatgcttccgatgtggagcagacaagtttgactctgaacaggaagtgcctcctggaaccacagagtcggttcagtctgtggattactactgtgatacgatcattcttcggaacatagctccgcacactgtggtggattccatcatgacagcactgtctccttacgcgtctttagctgtcaataacatccgcctcataaaagacaaacagacccagcagaacagaggcttcgcatttgtgcagctgtcctctgcaatggatgcttctcagctgcttcagatattacagagtctccatcctcctttgaaaattgatggcaaaactattggggttgattttgcaaaaagtgccagaaaagacttggtcctctcagatggtaaccgcgtcagcgctttctctgtagctagtacggctattgctgctgctcagtggtcatccacccagtctcaaagtggtgaaggaggcagtgttgactacagttatctgcaaccaggtcaagatggctatgcccaatatgctcagtattcacaggattatcagcagttttatcaacaacaagctggaggattggaatctgatgcatcatctgcatcaggcacagcagtgaccaccacctcagcggctgtagtgtcccagagtcctcagctgtataatcaaacctccaatccacctggctctccgactgaggaagcacagcctagcactagcacaagtacacaggccccagccgcttcccctactggtgtagttcctggtaccaaatatgcagtacctgacacgtccacttaccagtatgatgaatcttcaggatattactatgatccgacaacagggctctattatgaccccaactcgcaatactactataattccttgacccagcagtacctttactgggatggggaaaaagagacctacgtgccagctgcagagtctagctcccaccagcagtcgggcctgcctcctgcaaaagaggggaaagagaagaaggagaaacccaagagcaaaacagcccagcagattgccaaagacatggaacgctgggctaagagtttgaataagcagaaagaaaactttaaaaatagctttcagcctgtcaattccttgagggaagaagaaaggagagaatctgctgcagcagacgctggctttgctctctttgagaagaagggagccttagctgaaaggcagcagctcatcccagaattggtgcgaaatggagatgaggagaatcccctcaaaaggggtctggttgctgcttacagtggtgacagtgacaatgaggaggagctggtggagagacttgagagtgaggaagagaagctagctgactggaagaagatggcctgtctgctctgccggcgccagttcccgaacaaagatgccctagtcaggcaccagcaactctcagaccttcacaagcaaaacatggacatctatcgacgatccaggctgagcgagcaggagctggaagccttggagctaagggagagagagatgaaataccgagaccgagctgcagaaagacgggagaagtacggcattccagaacctccagagcccaagcgcaagaagcagtttgatgccggcactgtgaattacgagcaacccaccaaagatggcattgaccacagtaacattggcaacaagatgctgcaggccatgggctggcgggaaggctctggcttgggacgaaagtgtcaaggcattacggctcccattgaggctcaagttcggctaaagggagctggcctaggagccaaaggcagcgcatatggtttgtcgggcgccgattcctacaaagatgctgtccggaaagccatgtttgcccggttcactgagatggagtgagagagagagagagagagagatgacaaggagcacaagaagtggtccatctcccgaattcgctgttaccgcctgtctctttaagggcatgccttgtgctgttaatagatcttagggtgaaccacttcattctgcagggttctccctcccaccttaaagaagttccccttatgtgggttgcctggtgaatggccttccttcccgccagagggcttgtgaacagaccggagaggacagtggattgtttatactccagtgtacatagtgtaatgtagcgtgtttacatgtgtagcctatgttgtggtccatcagcccctcacattcctaggggtttgagatgctgtaggtggtatgtgacaccaaagccacctctgtcatttgttgtgatgtcttttcttggcaaaagccttgtgtatatttgtatattacacatttgtacagaattttggaagattttcagtctagttgccaaatctggctcctttacaaaagaaataccttgagaaatgggtgtcctgtgtctctttattcttgggtgggtaggtgggtcaagcatgtctgagccagt

SEQ ID NO: 177803 - DNA, 938 bp, Homo sapiens
  Payload ID: 14887
  Gene Symbol: RBM5
  Gene Name: RNA binding motif protein 5
  ENST ID: ENST00000395174
  CDS Start-End: 1-171
agagagagcgtgaaagaaggaacagtgaccgatccgaagatggctaccattcagatggtgactatggtgagcacgactataggcatgacatcagtgacgagagggagagcaagaccatcatgctgcgcggccttcccatcaccatcacagagagcgatattcgagaaatgatggagtccttcgaaggccctcagcctgcggatgtgaggctgatgaagaggaaaacagaaaaagttggtgattcaaggaaagcacattgcaatgcattatagcaatcccagacctaagtttgaagattggctttgtaacaagtgctgccttaacaatttcaggaaaagactaaaatgcttccgatgtggagcagacaagtttgactctgaacaggaagtgcctcctggaaccacagagtcggttcagtctgtggattactactgtgatacgatcattcttcggaacatagctccgcacactgtggtggattccatcatgacagcactgtctccttacgcgtctttagctgtcaataacatccgcctcataaaagacaaacagacccagcagaacagaggcttcgcatttgtgcagctgtcctctgcaatggatgcttctcagctgcttcagatattacagagtctccatcctcctttgaaaattgatggcaaaactattggggttgattttgcaaaaagtgccagaaaagacttggtcctctcagatggtaaccgcgtcagcgctttctctgtagctagtacggctattgctgctgctcagtggtcatccacccagtctcaaagtggtgaaggaggcagtgttgactacagttatctgcaaccaggtcaagatggctatgcccaatatgctcagtattcacaggattatcagcagttttatcaacaacaagctggaggattggaatctgatgcatcatctgcatcagg

SEQ ID NO: 177804 - DNA, 580 bp, Homo sapiens
  Payload ID: 14887
  Gene Symbol: RBM5
  Gene Name: RNA binding motif protein 5
  ENST ID: ENST00000404526
  CDS Start-End: 165-580
actgtgggtaggagacggccgtcggcggaggcgccattttgtgtagccgccgaaccttgttggaggttctggggcgcagaaccgctactgctgcttcggtctctccttgggaaaaaataaaatttgaaccttttggagctgtgtgctaaatcttcagtgggacaatgggttcagacaaaagagtgagtagaacagagcgtagtggaagatacggttccatcatagacagggatgaccgtgatgagcgtgaatcccgaagcaggcggagggactcagattacaaaagatctagtgatgatcggaggggtgatagatatgatgactaccgagactatgacagtccagagagagagcgtgaaagaaggaacagtgaccgatccgaagatggctaccattcagatggtgactatgattcgagaaatgatggagtccttcgaaggccctcagcctgcggatgtgaggctgatgaagaggaaaacaggtgtaagccgtggtttcgccttcgtggagttttatcacttgcaagatgctaccagctggatggaagccaatcagaaaaagttggtgattcaaggaaagc

SEQ ID NO: 177805 - DNA, 569 bp, Homo sapiens
  Payload ID: 14887
  Gene Symbol: RBM5
  Gene Name: RNA binding motif protein 5
  ENST ID: ENST00000441305
  CDS Start-End: 158-569
attttgtgtagccgccgaaccttgttggaggttctggggcgcagaaccgctactgctgcttcggtctctccttggggtaagtgcggcggctgtctgtaacgacgaaaaaataaaatttgaaccttttggagctgtgtgctaaatcttcagtgggacaatgggttcagacaaaagagtgagtagaacagagcgtagtggaagatacggttccatcatagacagggatgaccgtgatgagcgtgaatcccgaagcaggcggagggactcagattacaaaagatctagtgatgatcggaggggtgatagatatgatgactaccgagactatgacagtccagagagagagcgtgaaagaaggaacagtgaccgatccgaagatggctaccattcagatggtgactatggtgagcacgactataggcatgacatcagtgacgagagggagagcaagaccatcatgctgcgcggccttcccatcaccatcacagagagcgatattcgagaaatgatggagtccttcgaaggccctcagcctgcggatgtgaggctgatgaagaggaaaacaggtg

SEQ ID NO: 177806 - DNA, 582 bp, Homo sapiens
  Payload ID: 14887
  Gene Symbol: RBM5
  Gene Name: RNA binding motif protein 5
  ENST ID: ENST00000437500
  CDS Start-End: 268-582
acgttattaatgtagtagatttcagtcagctcagtatcccagcttctacgaggttttacatttttcatcagaagtgtttgaatttcatgttgctccttgtattaatgaagacacttggattaatgttttaacggtcaactatcccacggagttgctttgatacaaaaccaaggagctgattgtagctctgccctttttgctttgtaattctaagaaaaaataaaatttgaaccttttggagctgtgtgctaaatcttcagtgggacaatgggttcagacaaaagagtgagtagaacagagcgtagtggaagatacggttccatcatagacagggatgaccgtgatgagcgtgaatcccgaagcaggcggagggactcagattacaaaagatctagtgatgatcggaggggtgatagatatgatgactaccgagactatgacagtccagagagagagcgtgaaagaaggaacagtgaccgatccgaagatggctaccattcagatggtgactatggtgagcacgactataggcatgacatcagtgacgagagggagagcaagaccatcatgctgcgcggcctt

SEQ ID NO: 177807 - DNA, 427 bp, Homo sapiens
  Payload ID: 14887
  Gene Symbol: RBM5
  Gene Name: RNA binding motif protein 5
  ENST ID: ENST00000417905
  CDS Start-End: 66-427
cttgtctcctagaaaaaataaaatttgaaccttttggagctgtgtgctaaatcttcagtgggacaatgggttcagacaaaagagtgagtagaacagagcgtagtggaagatacggttccatcatagacagggatgaccgtgatgagcgtgaatcccgaagcaggcggagggactcagattacaaaagatctagtgatgatcggaggggtgatagatatgatgactaccgagactatgacagtccagagagagagcgtgaaagaaggaacagtgaccgatccgaagatggctaccattcagatggtgactatggtgagcacgactataggcatgacatcagtgacgagagggagagcaagaccatcatgctgcgcggccttcccatcaccatcacagagagcgatattcgagaaatgatggagtcctt

SEQ ID NO: 177808 - DNA, 560 bp, Homo sapiens
  Payload ID: 14887
  Gene Symbol: RBM5
  Gene Name: RNA binding motif protein 5
  ENST ID: ENST00000438369
  CDS Start-End: 129-374
ttttgtgtagccgccgaaccttgttggaggttctggggcgcagaaccgctactgctgcttcggtctctccttgggaaaaaataaaatttgaaccttttggagctgtgtgctaaatcttcagtgggacaatgggttcagacaaaagagtgagtagaacagagcgtagtggaagatacggttccatcatagacagggatgaccgtgatgagcgtgaatcccgaagcaggcggagggactcagattacaaaagatctagtgatgatcggaggggtgatagatatgatgactaccgagactatgacagtccagagctttttagtcttgtcacccaggctggagtgcagtggtgcgacctcagctactcaggaggctgagagagagcgtgaaagaaggaacagtgaccgatccgaagatggctaccattcagatggtgactatggtgagcacgactataggcatgacatcagtgacgagagggagagcaagaccatcatgctgcgcggccttcccatcaccatcacagagagcgatattcgagaaatgatggagtccttcgaagg

SEQ ID NO: 177809 - DNA, 2716 bp, Homo sapiens
  Payload ID: 14887
  Gene Symbol: RBM5
  Gene Name: RNA binding motif protein 5
  Uniprot ID: P52756
  ENST ID: ENST00000469838
  CDS Start-End: 165-596
actgtgggtaggagacggccgtcggcggaggcgccattttgtgtagccgccgaaccttgttggaggttctggggcgcagaaccgctactgctgcttcggtctctccttgggaaaaaataaaatttgaaccttttggagctgtgtgctaaatcttcagtgggacaatgggttcagacaaaagagtgagtagaacagagcgtagtggaagatacggttccatcatagacagggatgaccgtgatgagcgtgaatcccgaagcaggcggagggactcagattacaaaagatctagtgatgatcggaggggtgatagatatgatgactaccgagactatgacagtccagagagagagcgtgaaagaaggaacagtgaccgatccgaagatggctaccattcagatggtgactatggtgagcacgactataggcatgacatcagtgacgagagggagagcaagaccatcatgctgcgcggccttcccatcaccatcacagagagcgatattcgagaaatgatggagtccttcgaaggccctcagcctgcggatgtgaggctgatgaagaggaaaacaggtgagagcttgcttagttcctgatattattgttctcttccccattcccacctcagtccctaaagaacatcctgattcccccagtcttcaagcacatgaattcagaatgaaaggtttgccatggctaaggaatgtgactctttgaaaaccatgttagcatctgaggaacttttttaaactttgttttagggacttttttttccttaggtaagtaatgatttataaactcctttttttttttgactatagtcggttgcatggttactttaagcgtggaatcaaatggagtggcatttagttcaggcggcttgttccttgccatggcaaagtatcaagaagatccccaagtcaagtcacatttgtaaagctgcttcccaattggctttgtcacgcagtgttgaagcagtgggagagagattcacctgttataaaggaactgactaacacaagtatcccgtctatatctgaatgctgtctctaggtgtaagccgtggtttcgccttcgtggagttttatcacttgcaagatgctaccagctggatggaagccaatcaggttgcttcactcaccaagtctagatattcatgaaaatggaacaagtctgtacaattttaaaaaaaggttgaaggagtggtttgttccaaaggagtgacttttttttaaaaaaaaagctttgtatatattaaaattgatgttactagaataagtacagtaccaaggacttcattatagaatttgttctgcctttaaacatggctacctacctggcagggctttgttaactactgaatacctgtctggtaatcactaaaacatcttaatgtttcccttttttctagtttgttatattcctattatgtccattgagagtaagcttagtatatcaaactctccatttgacagtgaagagaacatagtgaaagtctgtggcggcatttttataagtaattccttatttctgcctgaagaccacaaagcctcctggaggcgtaactgctcagaccggtcttcagggaatatttaaggacttagtggaatttatgaacaataagtctgatgagattagcctgggagtggtgtcctgcagctgtctaatctagttagagtggcattaacattctaatctccttgagaatgccttttatagtctgttcaaagcaagtcattgatggttcttcgaggtagtgttaactgaagtgttcttcagtttgtcaagataatgttcagtgcttggcacttaaataacattttttgcaagaactccaaggcacattattgaatgcctttaaccaagtgcattctgggaagtttgcttgactcattatcttgcttttctgcagcattctgtgatttgagtcatccatgaatccatgaataaaagttacattctttgattggtaatattgccatttataacaagactcactaatgagggtatcactttgactgactgatttgttaaagtttttaagcctctcattttcctaacccagaaatcacagcctgattttattaaaagtagagcttcattcatttcataccatagataccatcctagtaaatccagaacatatacaaggttcatgtgagtctgctttcttgacatgatagcattgtttgatgcagtggatatgtcagaatgactaacctaggagtttaaaactcctaagaaactaaaacctgtaagacatttaaaagtctccacaattttaatgtatacaaagctatgttactgtgtaacacattacagttcaaattcactccagaaataaaaggccagtaggattagggactcactggtagtttggagtctcccagcacacatccctcctagtgggatgatctattcacatatctcccagcttttttatttttgcttctgtatatcacagtgagtggatggcccttcagctttttctctcctggccagacatgcagtcttgcctttagatatcgcagagacaaaattcacagcatgtcttaaatcttccaggatttgcaagaaccaaattgctcaacagtatgtatgtttagaggggttagactcctttttaaaatctggatatctaaccacctacttaaatctgtttgatagtgtcaaaccacccccacccttgatcctcccacccccaagaaaaagaaaa

SEQ ID NO: 177810 - DNA, 3750 bp, Homo sapiens
  Payload ID: 14888
  Gene Symbol: RBM6
  Gene Name: RNA binding motif protein 6
  Uniprot ID: P78332
  ENST ID: ENST00000266022
  CDS Start-End: 260-3631
acggcgggagtaagagtctgcgggaccggcagctgtacttcatctcccagcgggccgagcgctgaaggcagcggcgcggcgcctttgtggtagcagtggccccgcgcggaggaagttccggtgtccgcggcgctgggtcggtggcggaggctgaggagaaggaggagcgggccgtggaggcttcgccgcctaggtactgctataaccagaatttggtagaaaaaggatttacttgttggggccctcttgataaaaagagatgtggggggattctcgacctgctaacagaactggaccttttcgtgggagccaagaagaaaggtttgctcccgggtggaacagggattatcctcctcctccccttaagagtcatgctcaagagagacactctggcaactttcctggcagagattcacttccctttgatttccaggggcattcggggcctccttttgcaaatgtagaggagcattctttcagctatggagctagagacggaccgcatggtgactatcgaggaggggagggacctggacatgatttcagggggggagatttttcgtcttctgatttccagagcagagattcatcacagttggacttcaggggtagggacatacattctggggattttcgggatagagaaggaccacctatggactataggggtggagatggtacttctatggattatagaggtagggaggcacctcatatgaactacagagacagggatgctcacgctgttgacttcagaggtagggatgctcctccatctgacttcaggggccggggcacttatgatttagattttagaggccgggatggatcccatgcagattttaggggaagggatttatcagatttggattttagggccagagaacagtcccgttctgattttaggaatagagatgtatctgatttggactttagagacaaagacggaacacaagtagactttagaggccgaggttcaggtactactgatctagactttagggacagggatacgccacattcagatttcagaggtagacaccgatctaggactgatcaggattttaggggcagagagatgggatcttgtatggaatttaaagatagggagatgccccctgtggatccaaatattttggattacattcagccctctacacaagatagagaacattctggtatgaatgtgaacaggagagaagaatccacacatgaccatacgatagaaaggcctgcttttggcattcagaagggagaatttgagcattcagaaacaagagaaggagaaacacaaggtgtagcctttgaacatgagtctccagcagactttcagaacagccaaagtccagttcaagaccaagataagtcacagctttctggacgtgaagagcagagttcagatgctggtctgtttaaagaagaaggcggtctggactttcttgggcggcaagacaccgattacagaagcatggagtaccgtgatgtggatcataggctgccaggaagccagatgtttggctatggccagagcaagtcttttccagagggcaaaactgcccgagatgcccaacgggaccttcaggatcaagattataggaccggcccaagtgaggagaaacccagcaggcttattcgattaagtggggtacctgaagatgccacaaaagaagagattcttaatgcttttcggactcctgatggcatgcctgtaaagaacttgcagttgaaggagtataacacaggttacgactatggctatgtctgcgtggagttttcactcttggaagatgccatcggatgcatggaggccaaccagggaactctaatgatccaggacaaagaagttaccctggagtatgtatcaagcctggatttttggtactgcaaacgatgtaaggcaaacattggtgggcaccgatcttcctgttcattctgcaagaacccaagagaagtgacagaggccaagcaagaattaataacctaccctcagcctcagaaaacatccataccagcaccattggaaaaacagcccaaccagcccctaagaccagctgataaggaacctgaacccaggaagagggaagaaggccaagagtcacgcttaggacatcaaaagagagaagcagaaaggtatctgcctccttctcgaagggaagggccaactttccgaagagaccgagagagggagtcatggtctggagagacacgccaggatggagagagcaaaactatcatgctaaagcgtatctatcgttccacaccacctgaggtgatagtggaagtgctggagccctatgtccgccttactactgccaacgtccgtatcatcaagaacagaacaggccctatggggcatacctatggctttattgacctcgactcccatgcggaagctcttcgtgtggtgaagatcttacagaaccttgatccgccatttagcattgatgggaagatggtagctgtaaacctggccactggaaaacgaagaaatgattctggggaccattctgaccacatgcattactatcagggtaaaaaatatttccgagataggaggggaggtggcagaaattcagactggtcttcagatacaaatcgacaaggacaacagtcatcatctgactgctacatatatgattctgctactggctactattatgaccccttggcaggaacttattatgaccccaatacccagcaagaagtctatgtgccccaggatcctggattacctgaggaagaagagatcaaggaaaaaaaacccaccagtcaaggaaagtcaagtagcaagaaggaaatgtctaaaagagatggcaaggagaaaaaagacagaggagtgacgaggtttcaggaaaatgccagtgaagggaaggcccctgcagaagacgtctttaagaagcccctgcctcctactgtgaagaaggaagagagtccccctccacctaaagtggtaaacccactgatcggcctcttgggtgaatatggaggagacagtgactatgaggaggaagaagaggaggaacagacccctcccccacagccccgcacagcacagccccagaagcgagaggagcaaaccaagaaggagaatgaagaagacaaactcactgactggaataaactggcttgtctgctttgcagaaggcagtttcccaataaagaagttctgatcaaacaccagcagctgtcagacctgcacaagcaaaacctggaaatccaccggaagataaaacagtctgagcaggagctagcctatctggaaaggagagaacgagagggaaagtttaaaggaagaggaaatgatcgcagggaaaagctccagtcttttgactctccagaaaggaaacggattaagtactccagggaaactgacagtgatcgtaaacttgttgataaagaagatatcgacactagcagcaaaggaggctgtgtccaacaggctactggctggaggaaagggacaggcctgggatatggccatcctggattggcttcatcagaggaggctgaaggccggatgaggggccccagtgttggagcctcaggaagaaccagcaaaagacagtccaacgagacttaccgagatgctgttcgaagagtcatgtttgctcgatataaagaactcgattaagaaaggagacaagttccatgggatacaacctccctcttgttttgtttgtctctccttttcttttgttactgttcttgctgctagaacttttttaaataaactttttttcaatgtgatta

SEQ ID NO: 177811 - DNA, 582 bp, Homo sapiens
  Payload ID: 14888
  Gene Symbol: RBM6
  Gene Name: RNA binding motif protein 6
  ENST ID: ENST00000433811
  CDS Start-End: 354-582
agtagattaccggtcccgccgcggagcggccagctgtgaggctggggccggcgcgtggttgcggctctgtgctcctactcttcggagctgtaagcgggctgttcttgcggttttcctgtttcagatccaattctgtggcatcactaggaagggagctcttgtgcttagcacgtagcctcgtcctcagacttggacagacacaagggaggctccgctggaccggagggcacaagagctccgagcccggtcgtcggggcggtagaacctggaagcgggagagtggtctggtactgctataaccagaatttggtagaaaaaggatttacttgttggggccctcttgataaaaagagatgtggggggattctcgacctgctaacagaactggaccttttcgtgggagccaagaagaaaggtttgctcccgggtggaacagggattatcctcctcctccccttaagagtcatgctcaagagagacactctggcaactttcctggcagagattcacttccctttgatttccaggggcattcggggcctccttttgcaaatgtagaggagcattctttcagctatggag

SEQ ID NO: 177812 - DNA, 684 bp, Homo sapiens
  Payload ID: 14888
  Gene Symbol: RBM6
  Gene Name: RNA binding motif protein 6
  ENST ID: ENST00000421682
  CDS Start-End: 209-568
gaagaagacaaactcactgactggaataaactggcttgtctgctttgcagaaggcagtttcccaataaagaagttctgatcaaacaccagcagctgtcagacctgcacaagcaaaacctggaaatccaccggaagataaaacagtctgagcaggagctagcctatctggaaaggagagaacgagagggaaagtttaaaggaagaggaaatgatcgcagggaaaagctccagtcttttgactctccagaaaggaaacggattaagtactccagggaaactgacaggaagtgatggtgtctgcttcttttgcagtgatcgtaaacttgttgataaagaagatatcgacactagcagcaaaggaggctgtgtccaacaggctactggctggaggaaagggacaggcctgggatatggccatcctggattggcttcatcagaggaggctgaaggccggatgaggggccccagtgttggagcctcaggaagaaccagcaaaagacagtccaacgagacttaccgagatgctgttcgaagagtcatgtttgctcgatataaagaactcgattaagaaaggagacaagttccatgggatacaacctccctcttgttttgtttgtctctccttttcttttgttactgttcttgctgctagaacttttttaaataaactttttttcaatgtga

SEQ ID NO: 177813 - DNA, 2324 bp, Homo sapiens
  Payload ID: 14888
  Gene Symbol: RBM6
  Gene Name: RNA binding motif protein 6
  Uniprot ID: P78332
  ENST ID: ENST00000422955
  CDS Start-End: 404-2209
agcggcgcggcgcctttgtggtagcagtggccccgcgcggaggaagttccggtgtccgcggcgctgggtcggtggcggaggctgaggagaaggaggagcgggccgtggaggcttcgccgcctaggtactgctataaccagaatttggtagaaaaaggatttacttgttggggccctcttgataaaaagagatgtggggggattctcgacctgctaacagaactggaccttttcggatcaagattataggaccggcccaagtgaggagaaacccagcaggcttattcgattaagtggggtacctgaagatgccacaaaagaagagattcttaatgcttttcggactcctgatggcatgcctgtaaagaacttgcagttgaaggagtataacacagggaactctaatgatccaggacaaagaagttaccctggagtatgtatcaagcctggatttttggtactgcaaacgatgtaaggcaaacattggtgggcaccgatcttcctgttcattctgcaagaacccaagagaagtgacagaggccaagcaagaattaataacctaccctcagcctcagaaaacatccataccagcaccattggaaaaacagcccaaccagcccctaagaccagctgataaggaacctgaacccaggaagagggaagaaggccaagagtcacgcttaggacatcaaaagagagaagcagaaaggtatctgcctccttctcgaagggaagggccaactttccgaagagaccgagagagggagtcatggtctggagagacacgccaggatggagagagcaaaactatcatgctaaagcgtatctatcgttccacaccacctgaggtgatagtggaagtgctggagccctatgtccgccttactactgccaacgtccgtatcatcaagaacagaacaggccctatggggcatacctatggctttattgacctcgactcccatgcggaagctcttcgtgtggtgaagatcttacagaaccttgatccgccatttagcattgatgggaagatggtagctgtaaacctggccactggaaaacgaagaaatgattctggggaccattctgaccacatgcattactatcagggtaaaaaatatttccgagataggaggggaggtggcagaaattcagactggtcttcagatacaaatcgacaaggacaacagtcatcatctgactgctacatatatgattctgctactggctactattatgaccccttggcaggaacttattatgaccccaatacccagcaagaagtctatgtgccccaggatcctggattacctgaggaagaagagatcaaggaaaaaaaacccaccagtcaaggaaagtcaagtagcaagaaggaaatgtctaaaagagatggcaaggagaaaaaagacagaggagtgacgaggtttcaggaaaatgccagtgaagggaaggcccctgcagaagacgtctttaagaagcccctgcctcctactgtgaagaaggaagagagtccccctccacctaaagtggtaaacccactgatcggcctcttgggtgaatatggaggagacagtgactatgaggaggaagaagaggaggaacagacccctcccccacagccccgcacagcacagccccagaagcgagaggagcaaaccaagaaggagaatgaagaagacaaactcactgactggaataaactggcttgtctgctttgcagaaggcagtttcccaataaagaagttctgatcaaacaccagcagctgtcagacctgcacaagcaaaacctggaaatccaccggaagataaaacagtctgagcaggagctagcctatctggaaaggagagaacgagagggaaagtttaaaggaagaggaaatgatcgcagggaaaagctccagtcttttgactctccagaaaggaaacggattaagtactccagggaaactgacagtgatcgtaaacttgttgataaagaagatatcgacactagcagcaaaggaggctgtgtccaacaggctactggctggaggaaagggacaggcctgggatatggccatcctggattggcttcatcagaggaggctgaaggccggatgaggggccccagtgttggagcctcaggaagaaccagcaaaagacagtccaacgagacttaccgagatgctgttcgaagagtcatgtttgctcgatataaagaactcgattaagaaaggagacaagttccatgggatacaacctccctcttgttttgtttgtctctccttttcttttgttactgttcttgctgctagaacttttttaaataaactttttttcaatgtg

SEQ ID NO: 177814 - DNA, 2260 bp, Homo sapiens
  Payload ID: 14888
  Gene Symbol: RBM6
  Gene Name: RNA binding motif protein 6
  Uniprot ID: P78332
  ENST ID: ENST00000442092
  CDS Start-End: 339-2144
gaaggcaagtcccctgcgcgcggggcacggcgggagtaagagtctgcgggaccggcagctgtacttcatctcccagcgggccgagcgctgaaggcagcggcgcggcgcctttgtggtagcagtggccccgcgcggaggaagttccggtgtccgcggcgctgggtcggtggcggaggctgaggagaaggaggagcgggccgtggaggcttcgccgcctaggtactgctataaccagaatttggtagaaaaaggatttacttgttggggccctcttgataaaaagagatgtggggggattctcgacctgctaacagaactggaccttttcgggaactctaatgatccaggacaaagaagttaccctggagtatgtatcaagcctggatttttggtactgcaaacgatgtaaggcaaacattggtgggcaccgatcttcctgttcattctgcaagaacccaagagaagtgacagaggccaagcaagaattaataacctaccctcagcctcagaaaacatccataccagcaccattggaaaaacagcccaaccagcccctaagaccagctgataaggaacctgaacccaggaagagggaagaaggccaagagtcacgcttaggacatcaaaagagagaagcagaaaggtatctgcctccttctcgaagggaagggccaactttccgaagagaccgagagagggagtcatggtctggagagacacgccaggatggagagagcaaaactatcatgctaaagcgtatctatcgttccacaccacctgaggtgatagtggaagtgctggagccctatgtccgccttactactgccaacgtccgtatcatcaagaacagaacaggccctatggggcatacctatggctttattgacctcgactcccatgcggaagctcttcgtgtggtgaagatcttacagaaccttgatccgccatttagcattgatgggaagatggtagctgtaaacctggccactggaaaacgaagaaatgattctggggaccattctgaccacatgcattactatcagggtaaaaaatatttccgagataggaggggaggtggcagaaattcagactggtcttcagatacaaatcgacaaggacaacagtcatcatctgactgctacatatatgattctgctactggctactattatgaccccttggcaggaacttattatgaccccaatacccagcaagaagtctatgtgccccaggatcctggattacctgaggaagaagagatcaaggaaaaaaaacccaccagtcaaggaaagtcaagtagcaagaaggaaatgtctaaaagagatggcaaggagaaaaaagacagaggagtgacgaggtttcaggaaaatgccagtgaagggaaggcccctgcagaagacgtctttaagaagcccctgcctcctactgtgaagaaggaagagagtccccctccacctaaagtggtaaacccactgatcggcctcttgggtgaatatggaggagacagtgactatgaggaggaagaagaggaggaacagacccctcccccacagccccgcacagcacagccccagaagcgagaggagcaaaccaagaaggagaatgaagaagacaaactcactgactggaataaactggcttgtctgctttgcagaaggcagtttcccaataaagaagttctgatcaaacaccagcagctgtcagacctgcacaagcaaaacctggaaatccaccggaagataaaacagtctgagcaggagctagcctatctggaaaggagagaacgagagggaaagtttaaaggaagaggaaatgatcgcagggaaaagctccagtcttttgactctccagaaaggaaacggattaagtactccagggaaactgacagtgatcgtaaacttgttgataaagaagatatcgacactagcagcaaaggaggctgtgtccaacaggctactggctggaggaaagggacaggcctgggatatggccatcctggattggcttcatcagaggaggctgaaggccggatgaggggccccagtgttggagcctcaggaagaaccagcaaaagacagtccaacgagacttaccgagatgctgttcgaagagtcatgtttgctcgatataaagaactcgattaagaaaggagacaagttccatgggatacaacctccctcttgttttgtttgtctctccttttcttttgttactgttcttgctgctagaacttttttaaataaactttttttcaatgtga

SEQ ID NO: 177815 - DNA, 695 bp, Homo sapiens
  Payload ID: 14888
  Gene Symbol: RBM6
  Gene Name: RNA binding motif protein 6
  ENST ID: ENST00000446471
  CDS Start-End: 228-695
caataattttatcctgtgtatttctcttgacttttttgatgtgaaaagcagagaggtaaagcattatttgacagatgtatggattcaagcaagaaactgaggtccaattgcaaagaaatggcttgtataactcagagccctgtctgaggaaacacagaggaccctagagggcggagaatgaacacagcgcaggggctagttccagagtcgcattctcgggaactctaatgatccaggacaaagaagttaccctggagtatgtatcaagcctggatttttggtactgcaaacgatgtaaggcaaacattggtgggcaccgatcttcctgttcattctgcaagaacccaagagaagtgacagaggccaagcaagaattaataacctaccctcagcctcagaaaacatccataccagcaccattggaaaaacagcccaaccagcccctaagaccagctgataaggaacctgaacccaggaagagggaagaaggccaagagtcacgcttaggacatcaaaagagagaagcagaaaggtatctgcctccttctcgaagggaagggccaactttccgaagagaccgagagagggagtcatggtctggagagacacgccaggatggagagagcaaaactatcatgctaaagcgtatctatcgttccacaccacctgaggtgatagtggaagtgctggagccc

SEQ ID NO: 177816 - DNA, 2128 bp, Homo sapiens
  Payload ID: 14888
  Gene Symbol: RBM6
  Gene Name: RNA binding motif protein 6
  ENST ID: ENST00000419610
  CDS Start-End: 230-337
agctgtacttcatctcccagcgggccgagcgctgaaggcagcggcgcggcgcctttgtggtagcagtggccccgcgcggaggaagttccggtgtccgcggcgctgggtcggtggcggaggctgaggagaaggaggagcgggccgtggaggcttcgccgcctaggtactgctataaccagaatttggtagaaaaaggatttacttgttggggccctcttgataaaaagagatgtggggggattctcgacctgctaacagaactggaccttttcgtgtaaggcaaacattggtgggcaccgatcttcctgttcattctgcaagaacccaagagaagtgacagaggccaagcaagaattaataacctaccctcagcctcagaaaacatccataccagcaccattggaaaaacagcccaaccagcccctaagaccagctgataaggaacctgaacccaggaagagggaagaaggccaagagtcacgcttaggacatcaaaagagagaagcagaaaggtatctgcctccttctcgaagggaagggccaactttccgaagagaccgagagagggagtcatggtctggagagacacgccaggatggagagagcaaaactatcatgctaaagcgtatctatcgttccacaccacctgaggtgatagtggaagtgctggagccctatgtccgccttactactgccaacgtccgtatcatcaagaacagaacaggccctatggggcatacctatggctttattgacctcgactcccatgcggaagctcttcgtgtggtgaagatcttacagaaccttgatccgccatttagcattgatgggaagatggtagctgtaaacctggccactggaaaacgaagaaatgattctggggaccattctgaccacatgcattactatcagggtaaaaaatatttccgagataggaggggaggtggcagaaattcagactggtcttcagatacaaatcgacaaggacaacagtcatcatctgactgctacatatatgattctgctactggctactattatgaccccttggcaggaacttattatgaccccaatacccagcaagaagtctatgtgccccaggatcctggattacctgaggaagaagagatcaaggaaaaaaaacccaccagtcaaggaaagtcaagtagcaagaaggaaatgtctaaaagagatggcaaggagaaaaaagacagaggagtgacgaggtttcaggaaaatgccagtgaagggaaggcccctgcagaagacgtctttaagaagcccctgcctcctactgtgaagaaggaagagagtccccctccacctaaagtggtaaacccactgatcggcctcttgggtgaatatggaggagacagtgactatgaggaggaagaagaggaggaacagacccctcccccacagccccgcacagcacagccccagaagcgagaggagcaaaccaagaaggagaatgaagaagacaaactcactgactggaataaactggcttgtctgctttgcagaaggcagtttcccaataaagaagttctgatcaaacaccagcagctgtcagacctgcacaagcaaaacctggaaatccaccggaagataaaacagtctgagcaggagctagcctatctggaaaggagagaacgagagggaaagtttaaaggaagaggaaatgatcgcagggaaaagctccagtcttttgactctccagaaaggaaacggattaagtactccagggaaactgacagtgatcgtaaacttgttgataaagaagatatcgacactagcagcaaaggaggctgtgtccaacaggctactggctggaggaaagggacaggcctgggatatggccatcctggattggcttcatcagaggaggctgaaggccggatgaggggccccagtgttggagcctcaggaagaaccagcaaaagacagtccaacgagacttaccgagatgctgttcgaagagtcatgtttgctcgatataaagaactcgattaagaaaggagacaagttccatgggatacaacctccctcttgttttgtttgtctctccttttcttttgttactgttcttgctgctagaacttttttaaataaactttttttcaatgtg

SEQ ID NO: 177817 - DNA, 4010 bp, Homo sapiens
  Payload ID: 14888
  Gene Symbol: RBM6
  Gene Name: RNA binding motif protein 6
  ENST ID: ENST00000443081
  CDS Start-End: 920-3895
agtaagagtctgcgggaccggcagctgtacttcatctcccagcgggccgagcgctgaaggcagcggcgcggcgcctttgtggtagcagtggccccgcgcggaggaagttccggtgtccgcggcgctgggtcggtggcggaggctgaggagaaggaggagcgggccgtggaggcttcgccgcctaggtactgctataaccagaatttggtagaaaaaggatttacttgttggggccctcttgataaaaagagatgtggggggattctcgacctgctaacagaactggaccttttcggactgggtgaaagctttttctgcagcagtcatgttgaaaaccttgtgttgactttcctcgtgttctgaaatgggagcataaaagtttactccgccacttcgtcttaaaatagcaaaactttgctgttttctgcagatctaggaccttgttacagaactctgccaaaaaaaaaatgtttacagaagaatgtgctgtgattagagaagaatatgctggtgtgtagatttcaaactctctggacaatatgaataacactgtctttgtttctacagtgggagccaagaagaaaggtttgctcccgggtggaacagggattatcctcctcctccccttaagagtcatgctcaagagagacactctggcaactttcctggcagagattcacttccctttgatttccaggggcattcggggcctccttttgcaaatgtagaggagcattctttcagctatggagctagagacggaccgcatggtgactatcgaggaggggagggacctggacatgatttcagggggggagatttttcgtcttctgatttccagagcagagattcatcacagttggacttcaggggtagggacatacattctggggattttcgggatagagaaggaccacctatggactataggggtggagatggtacttctatggattatagaggtagggaggcacctcatatgaactacagagacagggatgctcacgctgttgacttcagaggtagggatgctcctccatctgacttcaggggccggggcacttatgatttagattttagaggccgggatggatcccatgcagattttaggggaagggatttatcagatttggattttagggccagagaacagtcccgttctgattttaggaatagagatgtatctgatttggactttagagacaaagacggaacacaagtagactttagaggccgaggttcaggtactactgatctagactttagggacagggatacgccacattcagatttcagaggtagacaccgatctaggactgatcaggattttaggggcagagagatgggatcttgtatggaatttaaagatagggagatgccccctgtggatccaaatattttggattacattcagccctctacacaagatagagaacattctggtatgaatgtgaacaggagagaagaatccacacatgaccatacgatagaaaggcctgcttttggcattcagaagggagaatttgagcattcagaaacaagagaaggagaaacacaaggtgtagcctttgaacatgagtctccagcagactttcagaacagccaaagtccagttcaagaccaagataagtcacagctttctggacgtgaagagcagagttcagatgctggtctgtttaaagaagaaggcggtctggactttcttgggcggcaagacaccgattacagaagcatggagtaccgtgatgtggatcataggctgccaggaagccagatgtttggctatggccagagcaagtcttttccagagggcaaaactgcccgagatgcccaacgggaccttcaggatcaagattataggaccggcccaagtgaggagaaacccagcaggcttattcgattaagtggggtacctgaagatgccacaaaagaagagattcttaatgcttttcggactcctgatggcatgcctgtaaagaacttgcagttgaaggagtataacacaggttacgactatggctatgtctgcgtggagttttcactcttggaagatgccatcggatgcatggaggccaaccagggaactctaatgatccaggacaaagaagttaccctggagtatgtatcaagcctggatttttggtactgcaaacgatgtaaggcaaacattggtgggcaccgatcttcctgttcattctgcaagaacccaagagaagtgacagaggccaagcaagaattaataacctaccctcagcctcagaaaacatccataccagcaccattggaaaaacagcccaaccagcccctaagaccagctgataaggaacctgaacccaggaagagggaagaaggccaagagtcacgcttaggacatcaaaagagagaagcagaaaggtatctgcctccttctcgaagggaagggccaactttccgaagagaccgagagagggagtcatggtctggagagacacgccaggatggagagagcaaaactatcatgctaaagcgtatctatcgttccacaccacctgaggtgatagtggaagtgctggagccctatgtccgccttactactgccaacgtccgtatcatcaagaacagaacaggccctatggggcatacctatggctttattgacctcgactcccatgcggaagctcttcgtgtggtgaagatcttacagaaccttgatccgccatttagcattgatgggaagatggtagctgtaaacctggccactggaaaacgaagaaatgattctggggaccattctgaccacatgcattactatcagggtaaaaaatatttccgagataggaggggaggtggcagaaattcagactggtcttcagatacaaatcgacaaggacaacagtcatcatctgactgctacatatatgattctgctactggctactattatgaccccttggcaggaacttattatgaccccaatacccagcaagaagtctatgtgccccaggatcctggattacctgaggaagaagagatcaaggaaaaaaaacccaccagtcaaggaaagtcaagtagcaagaaggaaatgtctaaaagagatggcaaggagaaaaaagacagaggagtgacgaggtttcaggaaaatgccagtgaagggaaggcccctgcagaagacgtctttaagaagcccctgcctcctactgtgaagaaggaagagagtccccctccacctaaagtggtaaacccactgatcggcctcttgggtgaatatggaggagacagtgactatgaggaggaagaagaggaggaacagacccctcccccacagccccgcacagcacagccccagaagcgagaggagcaaaccaagaaggagaatgaagaagacaaactcactgactggaataaactggcttgtctgctttgcagaaggcagtttcccaataaagaagttctgatcaaacaccagcagctgtcagacctgcacaagcaaaacctggaaatccaccggaagataaaacagtctgagcaggagctagcctatctggaaaggagagaacgagagggaaagtttaaaggaagaggaaatgatcgcagggaaaagctccagtcttttgactctccagaaaggaaacggattaagtactccagggaaactgacagtgatcgtaaacttgttgataaagaagatatcgacactagcagcaaaggaggctgtgtccaacaggctactggctggaggaaagggacaggcctgggatatggccatcctggattggcttcatcagaggaggctgaaggccggatgaggggccccagtgttggagcctcaggaagaaccagcaaaagacagtccaacgagacttaccgagatgctgttcgaagagtcatgtttgctcgatataaagaactcgattaagaaaggagacaagttccatgggatacaacctccctcttgttttgtttgtctctccttttcttttgttactgttcttgctgctagaacttttttaaataaactttttttcaatgtg

SEQ ID NO: 177818 - DNA, 2342 bp, Homo sapiens
  Payload ID: 14888
  Gene Symbol: RBM6
  Gene Name: RNA binding motif protein 6
  ENST ID: ENST00000434592
  CDS Start-End: 320-919
aggagaaggaggagcgggccgtggaggcttcgccgcctaggtactgctataaccagaatttggtagaaaaaggatttacttgttggggccctcttgataaaaagagatgtggggggattctcgacctgctaacagaactggaccttttcggatcaagattataggaccggcccaagtgaggagaaacccagcaggcttattcgattaagtggggtacctgaagatgccacaaaagaagagattcttaatgcttttcggactcctgatggcatgcctgtaaagaacttgcagttgaaggagtataacacagggaactctaatgatccaggacaaagaagttaccctggagtatgtatcaagcctggatttttggtactgcaaacgatgtaaggcaaacattggtgggcaccgatcttcctgttcattctgcaagaacccaagagaagtgacagaggccaagcaagaattaataacctaccctcagcctcagaaaacatccataccagcaccattggaaaaacagcccaaccagcccctaagaccagctgataaggaacctgaacccaggaagagggaagaaggccaagagtcacgcttaggacatcaaaagagagaagcagaaaggtatctgcctccttctcgaagggaagggccaactttccgaagagaccgagagagggagtcatggtctggagagacacgccaggatggagagagcaaaactatcatgctaaagcgtatctatcgttccacaccacctgaggtgatagtggaagtgctggagccctatgtccgccttactactgccaacgtccgtatcatcaagaacagaacaggccctatggggcatacctatggctttattgacctcgactcccatgcgtgtgtctggttctataggaagctcttcgtgtggtgaagatcttacagaaccttgatccgccatttagcattgatgggaagatggtagctgtaaacctggccactggaaaacgaagaaatgattctggggaccattctgaccacatgcattactatcagggtaaaaaatatttccgagataggaggggaggtggcagaaattcagactggtcttcagatacaaatcgacaaggacaacagtcatcatctgactgctacatatatgattctgctactggctactattatgaccccttggcaggaacttattatgaccccaatacccagcaagaagtctatgtgccccaggatcctggattacctgaggaagaagagatcaaggaaaaaaaacccaccagtcaaggaaagtcaagtagcaagaaggaaatgtctaaaagagatggcaaggagaaaaaagacagaggagtgacgaggtttcaggaaaatgccagtgaagggaaggcccctgcagaagacgtctttaagaagcccctgcctcctactgtgaagaaggaagagagtccccctccacctaaagtggtaaacccactgatcggcctcttgggtgaatatggaggagacagtgactatgaggaggaagaagaggaggaacagacccctcccccacagccccgcacagcacagccccagaagcgagaggagcaaaccaagaaggagaatgaagaagacaaactcactgactggaataaactggcttgtctgctttgcagaaggcagtttcccaataaagaagttctgatcaaacaccagcagctgtcagacctgcacaagcaaaacctggaaatccaccggaagataaaacagtctgagcaggagctagcctatctggaaaggagagaacgagagggaaagtttaaaggaagaggaaatgatcgcagggaaaagctccagtcttttgactctccagaaaggaaacggattaagtactccagggaaactgacagaaaaaataaaatttgaaccttttggagctgtgtgctaaatcttcagtgggacaatgggttcagacaaaagagtgagtagaacagagcgtagtggaagatacggttccatcatagacagggatgaccgtgatgagcgtgaatcccgaagcaggcggagggactcagattacaaaagatctagtgatgatcggaggggtgatagatatgatgactaccgagactatgacagtccagagagagagcgtgaaagaaggaacagtgaccgatccgaagatggctaccattcagatggtgactatggtgagcacgactataggcatgacatcagtgacgagagggagagcaagaccatcatgctgcgcggccttcccatcaccatcacagagagcgatattcgagaaatgatggagtccttcgaaggccctcagcctgcggatgtgaggctgatgaagagga

SEQ ID NO: 177819 - DNA, 473 bp, Homo sapiens
  Payload ID: 14888
  Gene Symbol: RBM6
  Gene Name: RNA binding motif protein 6
  ENST ID: ENST00000438912
  CDS Start-End: 113-473
gcattgatgggaagatggtagctgtaaacctggccactggaaaacgaaggagtgtctggaccacccaacctgcttgctgtctagaaatgattctggggaccattctgaccacatgcattactatcagggtaaaaaatatttccgagataggaggggaggtggcagaaattcagactggtcttcagatacaaatcgacaaggacaacagtcatcatctgactgctacatatatgattctgctactggctactattatgaccccttggcaggaacttattatgaccccaatacccagcaagaagtctatgtgccccaggatcctggattacctgaggaagaagagatcaaggaaaaaaaacccaccagtcaaggaaagtcaagtagcaagaaggaaatgtctaaaagagatggcaaggagaaaaaagacagaggagtgacgaggtttcaggaaaatgccagtgaagggaaggccc

SEQ ID NO: 177820 - DNA, 4324 bp, Homo sapiens
  Payload ID: 14888
  Gene Symbol: RBM6
  Gene Name: RNA binding motif protein 6
  ENST ID: ENST00000454079
  CDS Start-End: 821-2914
ggaggaagttccggtgtccgcggcgctgggtcggtggcggaggctgaggagaaggaggagcgggccgtggaggcttcgccgcctaggtactgctataaccagaatttggtagaaaaaggatttacttgttggggccctcttgataaaaagagatgtggggggattctcgacctgctaacagaactggaccttttcggactgggtgaaagctttttctgcagcagtcatgttgaaaaccttgtgttgactttcctcgtgttctgaaatgggagcataaaagtttactccgccacttcgtcttaaaatagcaaaactttgctgttttctgcagatctaggaccttgttacagaactctgccaaaaaaaaaatgtttacagaagaatgtgctgtgattagagaagaatatgctggtgtgtagatttcaaactctctggacaatatgaataacactgtctttgtttctacagtgggagccaagaagaaaggtttgctcccgggtggaacagggattatcctcctcctccccttaagagtcatgctcaagagagacactctggcaactttcctggcagagattcacttccctttgatttccaggggcattcggggcctccttttgcaaatgtagaggagcattctttcagctatggagctagagacggaccgcatggtgactatcgaggaggggagggacctggacatgatttcagggggggagatttttcgtcttctgatttccagagcagagattcatcacagttggacttcaggggtagggacatacattctggggattttcgggatagagaaggaccacctatggactataggggtggagatggtacttctatggattatagaggtagggaggcacctcatatgaactacagagacagggatgctcacgctgttgacttcagaggtagggatgctcctccatctgacttcaggggccggggcacttatgatttagattttagaggccgggatggatcccatgcagattttaggggaagggatttatcagatttggattttagggccagagaacagtcccgttctgattttaggaatagagatgtatctgatttggactttagagacaaagacggaacacaagtagactttagaggccgaggttcaggtactactgatctagactttagggacagggatacgccacattcagatttcagaggtagacaccgatctaggactgatcaggattttaggggcagagagatgggatcttgtatggaatttaaagatagggagatgccccctgtggatccaaatattttggattacattcagccctctacacaagatagagaacattctggtatgaatgtgaacaggagagaagaatccacacatgaccatacgatagaaaggcctgcttttggcattcagaagggagaatttgagcattcagaaacaagagaaggagaaacacaaggtgtagcctttgaacatgagtctccagcagactttcagaacagccaaagtccagttcaagaccaagataagtcacagctttctggacgtgaagagcagagttcagatgctggtctgtttaaagaagaaggcggtctggactttcttgggcggcaagacaccgattacagaagcatggagtaccgtgatgtggatcataggctgccaggaagccagatgtttggctatggccagagcaagtcttttccagagggcaaaactgcccgagatgcccaacgggaccttcaggatcaagattataggaccggcccaagtgaggagaaacccagcaggcttattcgattaagtggggtacctgaagatgccacaaaagaagagattcttaatgcttttcggactcctgatggcatgcctgtaaagaacttgcagttgaaggagtataacacaggttacgactatggctatgtctgcgtggagttttcactcttggaagatgccatcggatgcatggaggccaaccagggaactctaatgatccaggacaaagaagttaccctggagtatgtatcaagcctggatttttggtactgcaaacgatgtaaggcaaacattggtgggcaccgatcttcctgttcattctgcaagaacccaagagaagtgacagaggccaagcaagaattaataacctaccctcagcctcagaaaacatccataccagcaccattggaaaaacagcccaaccagcccctaagaccagctgataaggaacctgaacccaggaagagggaagaaggccaagagtcacgcttaggacatcaaaagagagaagcagaaaggtatctgcctccttctcgaagggaagggccaactttccgaagagaccgagagagggagtcatggtctggagagacacgccaggatggagagagcaaaactatcatgctaaagcgtatctatcgttccacaccacctgaggtgatagtggaagtgctggagccctatgtccgccttactactgccaacgtccgtatcatcaagaacagaacaggccctatggggcatacctatggctttattgacctcgactcccatgcggaagctcttcgtgtggtgaagatcttacagaaccttgatccgccatttagcattgatgggaagatggtagctgtaaacctggccactggaaaacgaagaaatgattctggggaccattctgaccacatgcattactatcagggtaaaaaatatttccgagataggaggggaggtggcagaaattcagactggtcttcagatacaaatcgacaaggacaacagtcatcatctgactgctacatatatgattctgctactggctactattatgaccccttggcaggaacttattatgaccccaatacccaggtgagtttggggcttttttttttttttttttttttttacctctgtcaatgattcttttgagaaaagcacccataatttgctacttgaggattttattccctggattctctggatgctcattgcatgaaaagtggaaaagtttagatctatggaaacagaactgttgcctatatggaaaatcagtgccttgtggcaatacaggtaagaacagtgttgctcttgaaaaagtggacagtgggtggtctgaatgtgtcctggtccctggagtgggtttttagattgatgtggactcttcttagacttgtaagtaaaaaagttgtttcttcccctaaaagggaactgtgcgccttagacctggaattgctgggaaactgaaacattctgtagacttacttgtttccaactgtatcgcagcaagaagtctatgtgccccaggatcctggattacctgaggaagaagagatcaaggaaaaaaaacccaccagtcaaggaaagtcaagtagcaagaaggaaatgtctaaaagagatggcaaggagaaaaaagacagaggagtgacgaggtttcaggaaaatgccagtgaagggaaggcccctgcagaagacgtctttaagaagcccctgcctcctactgtgaagaaggaagagagtccccctccacctaaagtggtaaacccactgatcggcctcttgggtgaatatggaggagacagtgactatgaggaggaagaagaggaggaacagacccctcccccacagccccgcacagcacagccccagaagcgagaggagcaaaccaagaaggagaatgaagaagacaaactcactgactggaataaactggcttgtctgctttgcagaaggcagtttcccaataaagaagttctgatcaaacaccagcagctgtcagacctgcacaagcaaaacctggaaatccaccggaagataaaacagtctgagcaggagctagcctatctggaaaggagagaacgagagggaaagtttaaaggaagaggaaatgatcgcagggaaaagctccagtcttttgactctccagaaaggaaacggattaagtactccagggaaactgacagtgatcgtaaacttgttgataaagaagatatcgacactagcagcaaaggaggctgtgtccaacaggctactggctggaggaaagggacaggcctgggatatggccatcctggattggcttcatcagaggaggctgaaggccggatgaggggccccagtgttggagcctcaggaagaaccagcaaaagacagtccaacgagacttaccgagatgctgttcgaagagtcatgtttgctcgatataaagaactcgattaagaaaggagacaagttccatgggatacaacctccctcttgttttgtttgtctctccttttcttttgttactgttcttgctgctagaacttttttaaataaactttttttcaatgt

SEQ ID NO: 177821 - DNA, 1886 bp, Homo sapiens
  Payload ID: 14888
  Gene Symbol: RBM6
  Gene Name: RNA binding motif protein 6
  Uniprot ID: P78332
  ENST ID: ENST00000425608
  CDS Start-End: 142-1704
cggtgtccgcggcgctgggtcggtggcggaggctgaggagaaggaggagcgggccgtggaggcttcgccgcctaggtactgctataaccagaatttggtagaaaaaggatttacttgttggggccctcttgataaaaagagatgtggggggattctcgacctgctaacagaactggaccttttcgtgggagccaagaagaaaggtttgctcccgggtggaacagggattatcctcctcctccccttaagagtcatgctcaagagagacactctggcaactttcctggcagagattcacttccctttgatttccaggggcattcggggcctccttttgcaaatgtagaggagcattctttcagctatggagctagagacggaccgcatggtgactatcgaggaggggagggacctggacatgatttcagggggggagatttttcgtcttctgatttccagagcagagattcatcacagttggacttcaggggtagggacatacattctggggattttcgggatagagaaggaccacctatggactataggggtggagatggtacttctatggattatagaggtagggaggcacctcatatgaactacagagacagggatgctcacgctgttgacttcagaggtagggatgctcctccatctgacttcaggggccggggcacttatgatttagattttagaggccgggatggatcccatgcagattttaggggaagggatttatcagatttggattttagggccagagaacagtcccgttctgattttaggaatagagatgtatctgatttggactttagagacaaagacggaacacaagtagactttagaggccgaggttcaggtactactgatctagactttagggacagggatacgccacattcagatttcagaggtagacaccgatctaggactgatcaggattttaggggcagagagatgggatcttgtatggaatttaaagatagggagatgccccctgtggatccaaatattttggattacattcagccctctacacaagatagagaacattctggtatgaatgtgaacaggagagaagaatccacacatgaccatacgatagaaaggcctgcttttggcattcagaagggagaatttgagcattcagaaacaagagaaggagaaacacaaggtgtagcctttgaacatgagtctccagcagactttcagaacagccaaagtccagttcaagaccaagataagtcacagctttctggacgtgaagagcagagttcagatgctggtctgtttaaagaagaaggcggtctggactttcttgggcggcaagacaccgattacagaagcatggagtaccgtgatgtggatcataggctgccaggaagccagatgtttggctatggccagagcaagtcttttccagagggcaaaactgcccgagatgcccaacgggaccttcaggatcaagattataggaccggcccaagtgaggagaaacccagcaggcttattcgattaagtggggtacctgaagatgccacaaaagaagagattcttaatgcttttcggactcctgatggcatgcctgtaaagaacttgcagttgaaggagtataacacagggaactctaatgatccaggacaaagaagttaccctggagtatgtatcaagcctggatttttggtactgcaaacgatgtaaggcaaacattggtgggcaccgatcttcctgttcattctgcaagaacccaagagaagtgacagaggccaagcaagaattaataacctaccctcagcctcagaaaacatccataccagcaccattggaaaaacagcccaaccagcccctaagaccagctgataaggaacctgaacccaggaaga

SEQ ID NO: 177822 - DNA, 2064 bp, Homo sapiens
  Payload ID: 14889
  Gene Symbol: RBM7
  Gene Name: RNA binding motif protein 7
  ENST ID: ENST00000375490
  CDS Start-End: 144-947
acgtcgtcgcccgctgagagcaagcgcaacgggcgttttcgtttgtgacgccagggagcgtgaggacgtggggcttccgtgaatgcgcagtgggtgcgtcggccacgaccttttggccaggttagggagggggcgacgctgagatgggggcggcggcggcggaagcggatcgcactctctttgtgggcaaccttgaaacgaaagtgaccgaggagctccttttcgagcttttccaccaggctgggccagtaataaaggtgaaaattccaaaagataaggatggtaaaccaaagcagtttgcgtttgtgaatttcaaacatgaagtgtctgttccttatgcaatgaatctacttaatggaatcaaactttatggaaggcctatcaaaattcaatttagatcaggaagtagtcatgccccacaagatgtcagtttgtcatatccccaacatcatgttggaaattcaagccctacctccacatctcctagcagcaggtacgaaaggactatggataacatgacttcatcagcacagataattcagagatctttctcttctccagaaaattttcagagacaagcagtgatgaacagtgctttgagacaaatgtcatatggtggaaaatttggttcttcacctctggatcaatcaggattttcaccatcagttcaatcacacagtcatagtttcaatcagtcttcaagctcccagtggcgccaaggtacaccatcatcacagcgtaaagtcagaatgaattcttatccctacctagcagatagacattatagccgggaacagcgttacactgatcatgggtctgaccatcattacagaggaaagagagatgatttcttctatgaagacaggaatcatgatgactggagccatgactatgataacagaagagacagtagtagagatggaaaatggcgctcatctcgacactaacacatgttaaaaggacattgtttttatagggtcattttaggccctttgactaagttgatatggaaatattttgttgaaaaactgtacagagcagctttacaagttgtcacatttctttataaatttttttaaagctacagtttaatacaaaatgaattgcggttttattacattaataacctttcacctcagggttttatgaagaggaaagggttttatgcaaaagaaagtgctacaattcctaatcattttagacactttaggagggggtgaagttgtatgataaagcagatattttaattatttgttatctttttgtattgcaagaaatttcttgctagtgaatcaagaaaacatccaggttgacagtctaaaatggctactggtattttagttaattcaaaaatgaaacttttcagtgattcactttactaacattctatttgagaaggcttattggtaaagtttggggataaaggcattgcttaacttcttatataatttaggtataaattctgtgacatgctcttgagctttaccctagttgaacatacatgtgtagatttacacatactgtttcattctaaaatttagaaattgttcattaaatcccatttgaggtataagtcactcaggaagttaaaatatctctacacgtatatttttacattaaaaatacagtgttagcataaatccccttttcaggaagaacaaaaatgtcagtgcatagttagataaaatggtaaaatgttttactgaaagcatacttttttggaaaatagattcatgaagcctttaagtgctgcttctgtcagtcaaacgttaaaaactttaacattttcaaagtgcccagactgtgtacaaagacacatgtaatggagattgtacaggttgtttttttgtttgaacctttgaaagagtttaatcttaacgttttctaattttaaaattttaaaatcttgtttaacaaaagcttgtattaagatactgttttcatttcattacagaattgtttataaaagttcatttgttgaaaaataaggatcctttttaataccacagcatttgtactgttcctttttaatatactgaaaatataaaaggaagggtgtgtgtt

SEQ ID NO: 177823 - DNA, 712 bp, Homo sapiens
  Payload ID: 14889
  Gene Symbol: RBM7
  Gene Name: RNA binding motif protein 7
  ENST ID: ENST00000544313
  CDS Start-End: 60-272
gcgcagtgggtgcgtcggccacgaccttttggccaggttagggagggggcgacgctgagatgggggcggcggcggcggaagcggatcgcactctctttgtgggcaaccttgaaacgaaagtgaccgaggagctccttttcgagcttttccaccaggaagtagtcatgccccacaagatgtcagtttgtcatatccccaacatcatgttggaaattcaagccctacctccacatctcctagcagcaggtacgaaaggactatggataacatgacttcatcagcacagataattcagagatctttctcttctccagaaaattttcagagacaagcagtgatgaacagtgctttgagacaaatgtcatatggtggaaaatttggttcttcacctctggatcaatcaggattttcaccatcagttcaatcacacagtcatagtttcaatcagtcttcaagctcccagtggcgccaaggtacaccatcatcacagcgtaaagtcagaatgaattcttatccctacctagcagatagacattatagccgggaacagcgttacactgatcatgggtctgaccatcattacagaggaaagagagatgatttcttctatgaagacaggaatcatgatgactggagccatgactatgataacagaagagacagtagtagagatggaaaatggcgctcatctcgacactaacacatgttaaaa

SEQ ID NO: 177824 - DNA, 1908 bp, Homo sapiens
  Payload ID: 14889
  Gene Symbol: RBM7
  Gene Name: RNA binding motif protein 7
  ENST ID: ENST00000542140
  CDS Start-End: 7-378
gctgagatgggggcggcggcggcggaagcggatcgcactctctttgtgggcaaccttgaaacgaaagtgaccgaggagctccttttcgagcttttccaccaggctgggccagtaataaaggtgaaaattccaaaagataaggatggtaaaccaaagcagtttgcgtttgtgaatttcaaacatgaagtgtctgttccttatgcaatgaatctacttaatggaatcaaactttatggaaggcctatcaaaattcaatttagatcagtagtcatgccccacaagatgtcagtttgtcatatccccaacatcatgttggaaattcaagccctacctccacatctcctagcagcaggtacgaaaggactatggataacatgacttcatcagcacagataattcagagatctttctcttctccagaaaattttcagagacaagcagtgatgaacagtgctttgagacaaatgtcatatggtggaaaatttggttcttcacctctggatcaatcaggattttcaccatcagttcaatcacacagtcatagtttcaatcagtcttcaagctcccagtggcgccaaggtacaccatcatcacagcgtaaagtcagaatgaattcttatccctacctagcagatagacattatagccgggaacagcgttacactgatcatgggtctgaccatcattacagaggaaagagagatgatttcttctatgaagacaggaatcatgatgactggagccatgactatgataacagaagagacagtagtagagatggaaaatggcgctcatctcgacactaacacatgttaaaaggacattgtttttatagggtcattttaggccctttgactaagttgatatggaaatattttgttgaaaaactgtacagagcagctttacaagttgtcacatttctttataaatttttttaaagctacagtttaatacaaaatgaattgcggttttattacattaataacctttcacctcagggttttatgaagaggaaagggttttatgcaaaagaaagtgctacaattcctaatcattttagacactttaggagggggtgaagttgtatgataaagcagatattttaattatttgttatctttttgtattgcaagaaatttcttgctagtgaatcaagaaaacatccaggttgacagtctaaaatggctactggtattttagttaattcaaaaatgaaacttttcagtgattcactttactaacattctatttgagaaggcttattggtaaagtttggggataaaggcattgcttaacttcttatataatttaggtataaattctgtgacatgctcttgagctttaccctagttgaacatacatgtgtagatttacacatactgtttcattctaaaatttagaaattgttcattaaatcccatttgaggtataagtcactcaggaagttaaaatatctctacacgtatatttttacattaaaaatacagtgttagcataaatccccttttcaggaagaacaaaaatgtcagtgcatagttagataaaatggtaaaatgttttactgaaagcatacttttttggaaaatagattcatgaagcctttaagtgctgcttctgtcagtcaaacgttaaaaactttaacattttcaaagtgcccagactgtgtacaaagacacatgtaatggagattgtacaggttgtttttttgtttgaacctttgaaagagtttaatcttaacgttttctaattttaaaattttaaaatcttgtttaacaaaagcttgtattaagatactgttttcatttcattacagaattgtttataaaagttcatttgttgaaaaataaggatcctttttaataccacagcatttgtactgttcctttttaatatactgaaaatataaaa

SEQ ID NO: 177825 - DNA, 4243 bp, Homo sapiens
  Payload ID: 14889
  Gene Symbol: RBM7
  Gene Name: RNA binding motif protein 7
  Uniprot ID: Q9Y580
  ENST ID: ENST00000540163
  CDS Start-End: 643-1443
agatcgggttcaacggcagggattgggtaaggtgagaatctggcttggcggctccggccccggccatctggttcccttgggctccggccgccaccatccactcgacggctctcggcccgaacgcttggtcgcaccgcctgccgaggtcctagatgaatcgcttcaggcctggaaacgaggaagccgtctccggagaccatcgccaacgctgacgcccgcggtctgaggtcgccatgggaagagcggtaggccaccctgctcctctgatcaccggaggacagggacacattgttcagggccatattcaaacactgcccgcagtacttgcgttacgtccctttgtgaaggcaggcccttcgcggctccccagatcagtccagcctgtgtcggacccgatgactaagcacacaggaacccataactgagcctgcggaagagccagaagccgccttgcctttaacgaggggtatcctggcgagcatgcgcagaccgtccgcgcacgtcgtcgcccgctgagagcaagcgcaacgggcgttttcgtttgtgacgccagggagcgtgaggacgtggggcttccgtgaatgcgcagtgggtgcgtcggccacgaccttttggccaggttagggagggggcgacgctgagatgggggcggcggcggcggaagcggatcgcactctctttgtgggcaaccttgaaacgaaagtgaccgaggagctccttttcgagcttttccaccaggctgggccagtaataaaggtgaaaattccaaaagataaggatggtaaaccaaagcagtttgcgtttgtgaatttcaaacatgaagtgtctgttccttatgcaatgaatctacttaatggaatcaaactttatggaaggcctatcaaaattcaatttagatcaggaagtagtcatgccccacaagatgtcagtttgtcatatccccaacatcatgttggaaattcaagccctacctccacatctcctagcaggtacgaaaggactatggataacatgacttcatcagcacagataattcagagatctttctcttctccagaaaattttcagagacaagcagtgatgaacagtgctttgagacaaatgtcatatggtggaaaatttggttcttcacctctggatcaatcaggattttcaccatcagttcaatcacacagtcatagtttcaatcagtcttcaagctcccagtggcgccaaggtacaccatcatcacagcgtaaagtcagaatgaattcttatccctacctagcagatagacattatagccgggaacagcgttacactgatcatgggtctgaccatcattacagaggaaagagagatgatttcttctatgaagacaggaatcatgatgactggagccatgactatgataacagaagagacagtagtagagatggaaaatggcgctcatctcgacactaacacatgttaaaaggacattgtttttatagggtcattttaggccctttgactaagttgatatggaaatattttgttgaaaaactgtacagagcagctttacaagttgtcacatttctttataaatttttttaaagctacagtttaatacaaaatgaattgcggttttattacattaataacctttcacctcagggttttatgaagaggaaagggttttatgcaaaagaaagtgctacaattcctaatcattttagacactttaggagggggtgaagttgtatgataaagcagatattttaattatttgttatctttttgtattgcaagaaatttcttgctagtgaatcaagaaaacatccaggttgacagtctaaaatggctactggtattttagttaattcaaaaatgaaacttttcagtgattcactttactaacattctatttgagaaggcttattggtaaagtttggggataaaggcattgcttaacttcttatataatttaggtataaattctgtgacatgctcttgagctttaccctagttgaacatacatgtgtagatttacacatactgtttcattctaaaatttagaaattgttcattaaatcccatttgaggtataagtcactcaggaagttaaaatatctctacacgtatatttttacattaaaaatacagtgttagcataaatccccttttcaggaagaacaaaaatgtcagtgcatagttagataaaatggtaaaatgttttactgaaagcatacttttttggaaaatagattcatgaagcctttaagtgctgcttctgtcagtcaaacgttaaaaactttaacattttcaaagtgcccagactgtgtacaaagacacatgtaatggagattgtacaggttgtttttttgtttgaacctttgaaagagtttaatcttaacgttttctaattttaaaattttaaaatcttgtttaacaaaagcttgtattaagatactgttttcatttcattacagaattgtttataaaagttcatttgttgaaaaataaggatcctttttaataccacagcatttgtactgttcctttttaatatactgaaaatataaaaggaagggtgtgtgttatttttttttttttatgtcactgacttcagagacattgtacacaaagaattaacatacttttattcactgattgcctgctgtttagaatatcagttctttaattttgagcatcctgaaatacatcttttgtacatatagagcatgatgtttcacaatcagattttcagtgacccctcgattatagcttggagtactttagttaccctcagtggtctctaggagttaaagtacacttagatttcctgtttataaatgaattcagtttttctgtttctaagtaaatgtagctattcaactactcactatagaattaagataaacaatttgtttgcttaagcattttcacagaatttgtttccaatgagattattatttttgggtatcttatccatatgaaaacttagtaggtttgtagatgttaacgaagattaatactgcatgtttgtttttgttttttttttgagacagagtcttgctacgacacccaggctagagtgcaatggcgggatctcaggtcactgcaacctccatatcccgggttcaagtgattctcctgccttagcctcccgagtagctgggattacaggcacccaccaccacgcctggctagtttttgtatttttagtagagatggggtttcaccacattggccaggctggtctcaaactcctgacctcaagtgatccacctaccttggcctaccgaggtgctggaattacaggtgtgagccaccgcgcctggcctaatactgctttattacaacgttatctgtgggtcggatccttttatattggttaacagatgaccctgactcagaataatctttttcaatggctttttgagggaagcttgtgaagttctggtgaatcttctttttcacttcactttcagtgagctgaaagtaaccaaactaaatacatgtattgtgtaaagggacaggacaagacagccttaaaaaattgaatatagttggtgagacaactcagaagtacaggtttgagcatcccttattcaaaatgcttgagaagtgttttgggttctggaatatttgcattaatgcttgccagttgagcatcccaggtccggaaatccacagtgctccaatgagcctttcccctgagtgtcacatctgtattggcactcaaaaagtttcatattttggagcatttcagatttcagatttgggatgcttcatctatattgacagctgcaagaacagaaaggaagaagagattatttttgtgggagaacagtttctcccatagtgtttcctgtggaatgctagtgtctcataaagtcttctaaaaaaaagaaaaaaaaaatcaaatgtttggaagccattttgtgttactgtgtgactttcttttactcaaaaacagcaccataaaatttctgacaagtactataggtaaagaaatccctttatacttaacctagtattttctacctttccccatctaaaataaaatttttataccactttctaattatgttgtgtgtgcccactttccccatacctactgctaccatcttagagtaggcaattttctcaagaggattattccaagaacaccctaatgttttcctgcttccagtcttctttcctcaaatttattccacactcttaagaattgaagatgtaaatctgtcactcgcctgaataaagcttcagtggcctctga

SEQ ID NO: 177826 - DNA, 692 bp, Homo sapiens
  Payload ID: 14889
  Gene Symbol: RBM7
  Gene Name: RNA binding motif protein 7
  ENST ID: ENST00000544582
  CDS Start-End: 7-669
gctgagatgggggcggcggcggcggaagcggatcgcactctctttgtgggcaaccttgaaacgaaagtgaccgaggagctccttttcgagcttttccaccaggctgggccagtaataaaggtgaaaattccaaaagataaggatggtaaaccaaagcagtttgcgtttgtgaatttcaaacatgaagtgtctgttccttatgcaatgaatctacttaatggaatcaaactttatggaaggcctatcaaaattcaatttagatcaggaagtagtcatgccccacaagatgtcagtttgtcatatccccaacatcatgttggaaattcaagccctacctccacatctcctagcaggtacgaaaggactatggataacatgacttcatcagcacagataattcagagatctttctcttctccagaaaattttcagagacaagcagtggtagtttcttcaaacctgtatactgatcagctgtctcatgaatacgggagaaaacctgcaggtctccgagagttctctccctgtgcaacttatcgcttttcagtgctgtgtaccggccattccagctgcctttgtttcgctggactctcagctgtgtcttctgaactcagtgagtttgccaggctctgcctgccctgtcccccaaccccacacaatgcagcctaaacgttccctcaaggtagcacgca

SEQ ID NO: 177827 - DNA, 6725 bp, Homo sapiens
  Payload ID: 14889
  Gene Symbol: RBM7
  Gene Name: RNA binding motif protein 7
  ENST ID: ENST00000541475
  CDS Start-End: 66-515
gtgaatgcgcagtgggtgcgtcggccacgaccttttggccaggttagggagggggcgacgctgagatgggggcggcggcggcggaagcggatcgcactctctttgtgggcaaccttgaaacgaaagtgaccgaggagctccttttcgagcttttccaccaggctgggccagtaataaaggtgaaaattccaaaagataaggatggtaaaccaaagcagtttgcgtttgtgaatttcaaacatgaagtgtctgttccttatgcaatgaatctacttaatggaatcaaactttatggaaggcctatcaaaattcaatttagatcaggaagtagtcatgccccacaagatgtcagtttgtcatatccccaacatcatgttggaaattcaagccctacctccacatctcctagcagcaggtacgaaaggactatggataacatgacttcatcagcacagataattcagagatctttctcttctccagaaaattttcagagacaagcagtggtaggttgactatttttcaacttgaattgccaaaaaaaaatcatccttagttaaaatgttcgcattgtatcaaataactggtttttaattaactttgttaagttggaggttttgttcctttagtcctcaaggcgtaagtgaactttttagataactttttctcaaatttttgttagactagcatgatttgtagattgagcactcattttagttttcactgggctgaaatatatacttaaaagactgaagataaatagaagtaaaactgcttttacatttgtttttcttttcaaccatcatttactcattgtctgatgctcctgtaccctatcctgagtgacttatcataaacttgggtcttctagaccagttccattttaaacttaaccttttctttttttggtggtggtaacatcatcatgagactaggcttaaaatcttagctatctttcactgtttcatctttgtcatcatttgttcaagtaggaagctgttggtaactatttggtgcctaaatcatgatcttgacttgtagtccccaggcttttgtatttcataggtctgcaaaatgaaatatagaagtcaaaataaatttgagagaccagtataaaggatgttaacttttatgtacatattgcctatttttctaattgtaccgtagactattaaaataaaaatgatcatatactaatatttatccacaggcagaatttgggaaccaccggtctagtcaattatgcccccattttcccctcactagttcatcttgcacaccatttcagaattaatattacaattctgttttgcttatcttccttgcacattgactttccattgtttgtaagatgaagtcagattcctctagcccaattattagggattcttattgtctgattccagtaaaccctgtagccttacctttaattgttcactgcttattaagatctgaaggccgggtgcggtggctaacgcctgtaaccccagcactttgggaggctgaggtgggtggatcacgaggtcaggagttcgagaccagcctggccaagatggtgaaaccccgtctctactaaaaatacaaaaattagccgggcgtggtggcacaggcctgtagtcccagctacttgggaggctgaggcaggagaatcgcttgaacccgggaggtggagcttgcagtgagccgagatctgtaacctgtctcaaagaattacttggtattctatgaacctgttctgtgtttccctgttatttttgtttgtgcaatttccttttcttggcatatctctcccttaaaatatgaaaatattccatccattgttttaatacccagatcatatgccaccttcatgaaacctttcctaatgatactgatctcctgattctttgttttttacacagtgattttgcattatagtcattttgtgtgacttattctgagttgcattcttgaggacaaagagtagtatttatgtatatatatgtatcttgtaggtatacattggaatgattgaagctattgtactgctttagttgtggatccatctaggcaagagtgactttattttctttcattttctgttaactgaccaaatacatattagctttgatatctagaagtattaacatttccacttttcctattcctcagatgaacagtgctttgagacaaatgtcatatggtggaaaatttggttcttcacctctggatcaatcaggattttcaccatcagttcaatcacacagtcatagtttcaatcagtcttcaagctcccagtggcgccaaggtacaccatcatcacagcgtaaagtcagaatgaattcttatccctacctagcagatagacattatagccgggaacagcgttacactgatcatgggtctgaccatcattacagaggaaagagagatgatttcttctatgaagacaggaatcatgatgactggagccatgactatgataacagaagagacagtagtagagatggaaaatggcgctcatctcgacactaacacatgttaaaaggacattgtttttatagggtcattttaggccctttgactaagttgatatggaaatattttgttgaaaaactgtacagagcagctttacaagttgtcacatttctttataaatttttttaaagctacagtttaatacaaaatgaattgcggttttattacattaataacctttcacctcagggttttatgaagaggaaagggttttatgcaaaagaaagtgctacaattcctaatcattttagacactttaggagggggtgaagttgtatgataaagcagatattttaattatttgttatctttttgtattgcaagaaatttcttgctagtgaatcaagaaaacatccaggttgacagtctaaaatggctactggtattttagttaattcaaaaatgaaacttttcagtgattcactttactaacattctatttgagaaggcttattggtaaagtttggggataaaggcattgcttaacttcttatataatttaggtataaattctgtgacatgctcttgagctttaccctagttgaacatacatgtgtagatttacacatactgtttcattctaaaatttagaaattgttcattaaatcccatttgaggtataagtcactcaggaagttaaaatatctctacacgtatatttttacattaaaaatacagtgttagcataaatccccttttcaggaagaacaaaaatgtcagtgcatagttagataaaatggtaaaatgttttactgaaagcatacttttttggaaaatagattcatgaagcctttaagtgctgcttctgtcagtcaaacgttaaaaactttaacattttcaaagtgcccagactgtgtacaaagacacatgtaatggagattgtacaggttgtttttttgtttgaacctttgaaagagtttaatcttaacgttttctaattttaaaattttaaaatcttgtttaacaaaagcttgtattaagatactgttttcatttcattacagaattgtttataaaagttcatttgttgaaaaataaggatcctttttaataccacagcatttgtactgttcctttttaatatactgaaaatataaaaggaagggtgtgtgttatttttttttttttatgtcactgacttcagagacattgtacacaaagaattaacatacttttattcactgattgcctgctgtttagaatatcagttctttaattttgagcatcctgaaatacatcttttgtacatatagagcatgatgtttcacaatcagattttcagtgacccctcgattatagcttggagtactttagttaccctcagtggtctctaggagttaaagtacacttagatttcctgtttataaatgaattcagtttttctgtttctaagtaaatgtagctattcaactactcactatagaattaagataaacaatttgtttgcttaagcattttcacagaatttgtttccaatgagattattatttttgggtatcttatccatatgaaaacttagtaggtttgtagatgttaacgaagattaatactgcatgtttgtttttgttttttttttgagacagagtcttgctacgacacccaggctagagtgcaatggcgggatctcaggtcactgcaacctccatatcccgggttcaagtgattctcctgccttagcctcccgagtagctgggattacaggcacccaccaccacgcctggctagtttttgtatttttagtagagatggggtttcaccacattggccaggctggtctcaaactcctgacctcaagtgatccacctaccttggcctaccgaggtgctggaattacaggtgtgagccaccgcgcctggcctaatactgctttattacaacgttatctgtgggtcggatccttttatattggttaacagatgaccctgactcagaataatctttttcaatggctttttgagggaagcttgtgaagttctggtgaatcttctttttcacttcactttcagtgagctgaaagtaaccaaactaaatacatgtattgtgtaaagggacaggacaagacagccttaaaaaattgaatatagttggtgagacaactcagaagtacaggtttgagcatcccttattcaaaatgcttgagaagtgttttgggttctggaatatttgcattaatgcttgccagttgagcatcccaggtccggaaatccacagtgctccaatgagcctttcccctgagtgtcacatctgtattggcactcaaaaagtttcatattttggagcatttcagatttcagatttgggatgcttcatctatattgacagctgcaagaacagaaaggaagaagagattatttttgtgggagaacagtttctcccatagtgtttcctgtggaatgctagtgtctcataaagtcttctaaaaaaaagaaaaaaaaaatcaaatgtttggaagccattttgtgttactgtgtgactttcttttactcaaaaacagcaccataaaatttctgacaagtactataggtaaagaaatccctttatacttaacctagtattttctacctttccccatctaaaataaaatttttataccactttctaattatgttgtgtgtgcccactttccccatacctactgctaccatcttagagtaggcaattttctcaagaggattattccaagaacaccctaatgttttcctgcttccagtcttctttcctcaaatttattccacactcttaagaattgaagatgtaaatctgtcactcgcctgaataaagcttcagtggcctctgacttaagtacaaaattctcaacttaatatgacccctatttggcatgtgctacttcagtctcctctgatgacttccccactttagttctcatagtaactgcccttcactgctcaatctatgcattacttcctctagaaagcctttccagagctctgaaatccagattcagtgccaagttatgtattccccaaatatctttttcttttatcatagcctttagactgtattataattttctttttacttgtctgtctctgtagacagctctatgaagacagaccttatcttattcatcactgcattcccaggatccagtgcctggcatatatttaacagtgaaactttttgatgaaaggaagaacgtctgttaattgaataaggaaaaggaggattcaacacataaaactttgaataggctctctaaacctaaaacattgcatcctgagaattacatgtcacagtacatgtattctagaattctatttgttcattttgtcaaacttcaaaaagttttggatctgtattcatgaataatgtgtgactttgtttttattttattttaatttatttatggcagagcctcactctgtcacccaggctggagtagagtggcacaatctcagctcactgctacctccgcctcctgggttccagtgattctctcacctcagcctcccgagtagctggaattacaggcacccaccaccacgcctggctaatttttgtatttgtaatagagacgggttttccccatgttggccatgctggtcttgaactcccaacctcaggtgatctgcctgactcggcctcccaaagtgctgggattacaggcatgagtcactgtaccagcctgattttgttttttaattgtattatcttagtttggtttaggagtatggttctgctagccttataaaataaattggcaagcttatcatcttctatgcccccccccaaatttgaataataaaggaattagccgtttctgcaagatgtgttgaactcatttatacaactatctgggtttgctttggaaatagctctttgattgctttatcaatttcctttagagttatcttttcaggtttgctactttctcaggaaacaatttggataatttatacttttcaagaaaatcaaccattccctttttctgaatatattgctatagagttgtacatagtatttcttataatttttgtaaaactcctaatattgtcaatagtgcagttttagtttctgacgatatattttaccttccctctcatcctcagatgagactggctgtgctgttttggcatacatcttacatttatatatgttataagccccacactaccttgtttttgttaggcagattcttaaataatagaaaattatatataatacttaagaaaaaataggaaaaaaaa

SEQ ID NO: 177828 - DNA, 867 bp, Homo sapiens
  Payload ID: 14889
  Gene Symbol: RBM7
  Gene Name: RNA binding motif protein 7
  ENST ID: ENST00000545678
  CDS Start-End: 111-551
gggggcggcggcggcggaagcggatcgcactctctttgtgggcaaccttgaaacgaaagtgaccgaggagctccttttcgagcttttccaccagcaggtacgaaaggactatggataacatgacttcatcagcacagataattcagagatctttctcttctccagaaaattttcagagacaagcagtgatgaacagtgctttgagacaaatgtcatatggtggaaaatttggttcttcacctctggatcaatcaggattttcaccatcagttcaatcacacagtcatagtttcaatcagtcttcaagctcccagtggcgccaaggtacaccatcatcacagcgtaaagtcagaatgaattcttatccctacctagcagatagacattatagccgggaacagcgttacactgatcatgggtctgaccatcattacagaggaaagagagatgatttcttctatgaagacaggaatcatgatgactggagccatgactatgataacagaagagacagtagtagagatggaaaatggcgctcatctcgacactaacacatgttaaaaggacattgtttttatagggtcattttaggccctttgactaagttgatatggaaatattttgttgaaaaactgtacagagcagctttacaagttgtcacatttctttataaatttttttaaagctacagtttaatacaaaatgaattgcggttttattacattaataacctttcacctcagggttttatgaagaggaaagggttttatgcaaaagaaagtgctacaattcctaatcattttagacactttaggagggggtgaagttgtatgataaagcagatattttaattatttgttatctttt

SEQ ID NO: 177829 - DNA, 3587 bp, Homo sapiens
  Payload ID: 14889
  Gene Symbol: RBM7
  Gene Name: RNA binding motif protein 7
  ENST ID: ENST00000624815
  CDS Start-End: 344-784
acgtcgtcgcccgctgagagcaagcgcaacgggcgttttcgtttgtgacgccagggagcgtgaggacgtggggcttccgtgaatgcgcagtgggtgcgtcggccacgaccttttggccaggttagggagggggcgacgctgagatgggggcggcggcggcggaagcggatcgcactctctttgtgggcaaccttgaaacgaaagtgaccgaggagctccttttcgagcttttccaccaggaagtagtcatgccccacaagatgtcagtttgtcatatccccaacatcatgttggaaattcaagccctacctccacatctcctagcagcaggtacgaaaggactatggataacatgacttcatcagcacagataattcagagatctttctcttctccagaaaattttcagagacaagcagtgatgaacagtgctttgagacaaatgtcatatggtggaaaatttggttcttcacctctggatcaatcaggattttcaccatcagttcaatcacacagtcatagtttcaatcagtcttcaagctcccagtggcgccaaggtacaccatcatcacagcgtaaagtcagaatgaattcttatccctacctagcagatagacattatagccgggaacagcgttacactgatcatgggtctgaccatcattacagaggaaagagagatgatttcttctatgaagacaggaatcatgatgactggagccatgactatgataacagaagagacagtagtagagatggaaaatggcgctcatctcgacactaacacatgttaaaaggacattgtttttatagggtcattttaggccctttgactaagttgatatggaaatattttgttgaaaaactgtacagagcagctttacaagttgtcacatttctttataaatttttttaaagctacagtttaatacaaaatgaattgcggttttattacattaataacctttcacctcagggttttatgaagaggaaagggttttatgcaaaagaaagtgctacaattcctaatcattttagacactttaggagggggtgaagttgtatgataaagcagatattttaattatttgttatctttttgtattgcaagaaatttcttgctagtgaatcaagaaaacatccaggttgacagtctaaaatggctactggtattttagttaattcaaaaatgaaacttttcagtgattcactttactaacattctatttgagaaggcttattggtaaagtttggggataaaggcattgcttaacttcttatataatttaggtataaattctgtgacatgctcttgagctttaccctagttgaacatacatgtgtagatttacacatactgtttcattctaaaatttagaaattgttcattaaatcccatttgaggtataagtcactcaggaagttaaaatatctctacacgtatatttttacattaaaaatacagtgttagcataaatccccttttcaggaagaacaaaaatgtcagtgcatagttagataaaatggtaaaatgttttactgaaagcatacttttttggaaaatagattcatgaagcctttaagtgctgcttctgtcagtcaaacgttaaaaactttaacattttcaaagtgcccagactgtgtacaaagacacatgtaatggagattgtacaggttgtttttttgtttgaacctttgaaagagtttaatcttaacgttttctaattttaaaattttaaaatcttgtttaacaaaagcttgtattaagatactgttttcatttcattacagaattgtttataaaagttcatttgttgaaaaataaggatcctttttaataccacagcatttgtactgttcctttttaatatactgaaaatataaaaggaagggtgtgtgttatttttttttttttatgtcactgacttcagagacattgtacacaaagaattaacatacttttattcactgattgcctgctgtttagaatatcagttctttaattttgagcatcctgaaatacatcttttgtacatatagagcatgatgtttcacaatcagattttcagtgacccctcgattatagcttggagtactttagttaccctcagtggtctctaggagttaaagtacacttagatttcctgtttataaatgaattcagtttttctgtttctaagtaaatgtagctattcaactactcactatagaattaagataaacaatttgtttgcttaagcattttcacagaatttgtttccaatgagattattatttttgggtatcttatccatatgaaaacttagtaggtttgtagatgttaacgaagattaatactgcatgtttgtttttgttttttttttgagacagagtcttgctacgacacccaggctagagtgcaatggcgggatctcaggtcactgcaacctccatatcccgggttcaagtgattctcctgccttagcctcccgagtagctgggattacaggcacccaccaccacgcctggctagtttttgtatttttagtagagatggggtttcaccacattggccaggctggtctcaaactcctgacctcaagtgatccacctaccttggcctaccgaggtgctggaattacaggtgtgagccaccgcgcctggcctaatactgctttattacaacgttatctgtgggtcggatccttttatattggttaacagatgaccctgactcagaataatctttttcaatggctttttgagggaagcttgtgaagttctggtgaatcttctttttcacttcactttcagtgagctgaaagtaaccaaactaaatacatgtattgtgtaaagggacaggacaagacagccttaaaaaattgaatatagttggtgagacaactcagaagtacaggtttgagcatcccttattcaaaatgcttgagaagtgttttgggttctggaatatttgcattaatgcttgccagttgagcatcccaggtccggaaatccacagtgctccaatgagcctttcccctgagtgtcacatctgtattggcactcaaaaagtttcatattttggagcatttcagatttcagatttgggatgcttcatctatattgacagctgcaagaacagaaaggaagaagagattatttttgtgggagaacagtttctcccatagtgtttcctgtggaatgctagtgtctcataaagtcttctaaaaaaaagaaaaaaaaaatcaaatgtttggaagccattttgtgttactgtgtgactttcttttactcaaaaacagcaccataaaatttctgacaagtactataggtaaagaaatccctttatacttaacctagtattttctacctttccccatctaaaataaaatttttataccactttctaattatgttgtgtgtgcccactttccccatacctactgctaccatcttagagtaggcaattttctcaagaggattattccaagaacaccctaatgttttcctgcttccagtcttctttcctcaaatttattccacactcttaagaattgaagatgtaaatctgtcactcgcctgaataaagcttcagtggcctctgactt

SEQ ID NO: 177830 - DNA, 796 bp, Homo sapiens
  Payload ID: 14890
  Gene Symbol: RBM8A
  Gene Name: RNA binding motif protein 8A
  Uniprot ID: Q9Y5S9
  ENST ID: ENST00000369307
  CDS Start-End: 35-556
gagcggcacagacgagatctcgatcgaaggcgagatggcggacgtgctagatcttcacgaggctgggggcgaagatttcgccatggatgaggatggggacgagagcattcacaaactgaaagaaaaagcgaagaaacggaagggtcgcggctttggctccgaggggtcccgagcgcggatgcgtgaggattatgacagcgtggagcaggatggcgatgaacccggaccacaacgctctgttgaaggctggattctctttgtaactggagtccatgaggaagccaccgaagaagacatacacgacaaattcgcagaatatggggaaattaaaaacattcatctcaacctcgacaggcgaacaggatatctgaaggggtatactctagttgaatatgaaacatacaaggaagcccaggctgctatggagggactcaatggccaggatttgatgggacagcccatcagcgttgactggtgttttgttcggggtccaccaaaaggcaagaggagaggtggccgaagacgcagcagaagtccagaccggagacgtcgctgacaggtcctctgttgtccaggtgttctcttcaagattccatttgaccatgcagccttggacaaataggactggggtggaacttgctgtgtttatatttaatctcttaccgtatatgcgtagtatttgagttgcgaataaatgttccatttttgttttctacatttaatgttactttcctgtcctaaaattgaaagttctaaagcatagcaaggctgtatggatcattgtgaagatacttct

SEQ ID NO: 177831 - DNA, 4961 bp, Homo sapiens
  Payload ID: 14890
  Gene Symbol: RBM8A
  Gene Name: RNA binding motif protein 8A
  Uniprot ID: Q9Y5S9
  ENST ID: ENST00000583313
  CDS Start-End: 111-635
agagttagcctttgattggtcagcttgactggcgacctttcccctctgcgacagtttcccgaggtacctagtgtctgagcggcacagacgagatctcgatcgaaggcgagatggcggacgtgctagatcttcacgaggctgggggcgaagatttcgccatggatgaggatggggacgagagcattcacaaactgaaagaaaaagcgaagaaacggaagggtcgcggctttggctccgaagaggggtcccgagcgcggatgcgtgaggattatgacagcgtggagcaggatggcgatgaacccggaccacaacgctctgttgaaggctggattctctttgtaactggagtccatgaggaagccaccgaagaagacatacacgacaaattcgcagaatatggggaaattaaaaacattcatctcaacctcgacaggcgaacaggatatctgaaggggtatactctagttgaatatgaaacatacaaggaagcccaggctgctatggagggactcaatggccaggatttgatgggacagcccatcagcgttgactggtgttttgttcggggtccaccaaaaggcaagaggagaggtggccgaagacgcagcagaagtccagaccggagacgtcgctgacaggtcctctgttgtccaggtgttctcttcaagattccatttgaccatgcagccttggacaaataggactggggtggaacttgctgtgtttatatttaatctcttaccgtatatgcgtagtatttgagttgcgaataaatgttccatttttgttttctacatttaatgttactttcctgtcctaaaattgaaagttctaaagcatagcaaggctgtatggatcattgtgaagatacttctagggactgaactctatgtatttcttttttttcttttttttgagatagagtcttgctgtgttacccagggtggattgcagctgatcatagctcactgcagcttcaaactcttgggctcaagccatccttctgcctcactgtccctagtagttgggattacaggcacatgccaccatgcccagctaaatttttaatatttttgtagagatggggtcttgctgtgttacctgggctagttatgtgagtttctatattagacatagtctcaagtttcaggtagggtttaaagtagagacactggtcagtatttcttttttggggggaactaggagagcaggagtagaagtgagatgttaagatcttatggcactaaagacttactattctgttcctacatactctgttaggatcagatagatgttatagaaatgccttttgtttctcctgcccttcttgatgtcacagttttttgtacttccagctgtctaaaggcatgaatctcctcttggagcattctcccagacccttctttagaagagtctatactaagttcttggtgccctcttcggcagccaagggtgaaggccccatagaggagaggatccaaaggagcattgaggaggcccaagaggaaaaggatgtggctcaggctgggagggacttcagttagcatggtgggggagaaccagtaccacatacccagtaggtaataaggtgtccagcagaggatgaaggtcagcaagataagcagggccagtctcagggcccggagacgaacacggggacaattgtcaaaggagcgggggagggcaaattcaccagcaggggctaggaatttagaaaatatactgtaattcagacactcagcttctgatctgagtatagggtgaattgatggaggggcatagctagtgagacagagctcgcctcctacaaggaggagaatgttgcaaaccgttttccccttcccaacctgggactatatgatttcttacccccagggattatgatagaaatatgaagccaccaagtctagacttgatggtgttcaagaataaataatactgattgcctccctagtccttgtccagctaactcagctgtttataattgaagggattcaacaaaattatctctagcatcaggtgctagacatggttagaatctcaccatggtttagtgactggtagatagctattaggtaggtagataaataaatgatgctagaggcaacaggtctagggttaaggattaaggcctgggaattggagtctcaccatggctccccttccttgtctggggcctggacacactgaggacaatgcggctatagcagatggccatggcagtcagtggcagcagaaagaggcagcagaaggtgaagaggttataggtggtctcttgccattgagccttgaagctgcctttggtgacacactgagtgaaagggactgggccagctcagtggaccgtgtggaacaggaacagctggagtggagttgaggactattagaactggttcccctcaccacccaacctacccacctatgtcatactgtctcctcccaattcatccttaattccaagtgaagcagcacagtgctgagaaacagttcatccatggtgccatgttaaagaagttggaaatatatcttgaaaatcctatcttccttttaggcttgaatatgatgctgaacagtaagtttgttaaatcttggaacttaaaacaatcctgctttctcaagtactattctaacattgcgctttataagggatgatatttctaccacctcactcatatttttagctgaaatgattttcctggtatgtctgttattttgtggaaaaagaaatattgtgtaaaatgggtgctgccaaaattccaggccattttgcagggactctgaagtgacctttagtagtaatagtcttatgtgcagtaactataatggtaaagaatgttaaataataaaatttaacattttccaaatgctattgggctgcccctccccctttttgttaaattgctgggttttccaactgaatcagtaaaaactatttctgtttagagctacaaggttaaagtgcctgctttccagtaatggagattgagtcactattaatttgataaaaggtaagctcagtaggcatcagattcctagatacaaggcatttgggaaagtgattttagcagacatgagggacatttaggaaagatgaatagtttcagcctaagagaattttgtgaactgtttggagttacgatcaggctactctgagctagttgggaaatggtctttcctcttcccatctcttgcattcatatatttctaagtttttttttttgtttttgtttttgtgctctgcctaagaagtgcttgagaattgtgaggagtataaaaatagtcaaagctggctgggcgcggtggctcacgcctgtaatcccagcactttgggaggctgaggcgggcggatcacgaggttaggagatggagaccatcctggctaacacagtgaaaccctgtctgtactaaagatacaaaaaactagccgggcgtggtggtaggtgcctgtagtcccagctacttgggaactcgggaggctgaggcaggagaatgacctgaacccaggaggcggagcttgcagtgagcagagattgcgccattgcactccagcctgggcgacagagtaagactgtctccaaaaaaaaaaaaaataataatcaaagctcttggatttatagtttggtccacagccttgttttgatctttcctttatcctgttttattgccatttaccacgtactgtagaaacatccctttcaactgctgataacttggaaacaagcctacaaaaataagtaatttctaactactcctaatactacctataactacccctaagcccttaccactctaacgtgacattattaaattttttattttattaacactaatattttaactacaattacagcatatgggcaatacagaatttacctaaaaggatactaatttggaacaaaaaaaatcacctttcgcacatgtatcatgtcacaaccagtttgccattgaaacaaatagaggttgcaaatattgtcagattgtcaggctgtaagaaaggatgaaattcatttcccattgcatcatcttgtggcccatggatttcaagtgccttagccaaaatcatatagctagttagcagtagagccgagactcagaaaaaaacaaagtaaaacaggcagactgaaacaaaaagtcttctaattcccagtccacatgtaaaatttgcttcatataaacaaacctaattgtaaatggcactgtagcaacaggcttctttttaacacttggattggtaaaggtcttgtttgcaacatattagaagtattatttttctctttcccccccaccccacccccaacagagtctggctctgccgcccacgccggagtgcagtggtgcagtcttggctcactgcagcctccacttcccaggttcaagcaattctcgtgcctcagcctcctgagtagttgggattacaggtgctcaccactatacccggctaatttttgtatttttagtagagatggggtttcgtcatgttggccaggttggtcttaaactcctgacctcaagtgatccacccaccttggccttccaaaatgctgggattacaggcttgagccaccaggcctttctttgttcttaggagtatagtcagactaacttctagtagttatatttctaataattgaggatgtaagtaaggatcaaatcttaaatcagtataatgcattgtcattccagagataaatcctagacccttcttggcctccttctgacataattctaatcctacagtctcagagatgctgttgtatcctgccccccaaccccatgatagtgatagtggtttttgccttgaaggaattgctttgtatttagcttttccccctctagatttctagttccttttcagtattggattggatttgagatttgattaacctagtactcaggttcagatgctcgcctctttgcaattttaacactcattcgacaataaagtcagtaaaaaacacaaa

SEQ ID NO: 177832 - DNA, 440 bp, Homo sapiens
  Payload ID: 14890
  Gene Symbol: RBM8A
  Gene Name: RNA binding motif protein 8A
  ENST ID: ENST00000633781
  CDS Start-End: 1-320
ctgttgaaggctggattctctttgtaactggagtccatgaggaagccaccgaagaagacatacacgacaaattcgcagaatatggggaaattaaaaacattcatctcaacctcgacaggcgaacaggatatctgaaggggtatactctagttgaatatgaaacatacaaggaagcccaggctgctatggagggactcaatggccaggatttgatgggacagcccatcagcgttgactggtgttttgttcggggtccaccaaaaggcaagaggagaggtggccgaagacgcagcagaagtccagaccggagacgtcgctgacaggtcctctgttgtccagagctacaaggttaaagtgcctgctttccagtaatggagattgagtcactattaatttgataaaagggccgcccagtatgcttgctctcttcttggccatgc

SEQ ID NO: 177833 - DNA, 751 bp, Homo sapiens
  Payload ID: 14890
  Gene Symbol: RBM8A
  Gene Name: RNA binding motif protein 8A
  Uniprot ID: Q9Y5S9
  ENST ID: ENST00000632555
  CDS Start-End: 22-546
gagatctcgatcgaaggcgagatggcggacgtgctagatcttcacgaggctgggggcgaagatttcgccatggatgaggatggggacgagagcattcacaaactgaaagaaaaagcgaagaaacggaagggtcgcggctttggctccgaagaggggtcccgagcgcggatgcgtgaggattatgacagcgtggagcaggatggcgatgaacccggaccacaacgctctgttgaaggctggattctctttgtaactggagtccatgaggaagccaccgaagaagacatacacgacaaattcgcagaatatggggaaattaaaaacattcatctcaacctcgacaggcgaacaggatatctgaaggggtatactctagttgaatatgaaacatacaaggaagcccaggctgctatggagggactcaatggccaggatttgatgggacagcccatcagcgttgactggtgttttgttcggggtccaccaaaaggcaagaggagaggtggccgaagacgcagcagaagtccagaccggagacgtcgctgacagagataaatcctagacccttcttggcctccttctgacataattctaatcctacagtctcagagatgctgttgtatcctgccccccaaccccatgatagtgatagtggtttttgccttgaaggaattgctttgtatttagcttttccccctctagatttctagttccttttcagtattggattggatttgagatttgattaacc

SEQ ID NO: 177834 - DNA, 495 bp, Homo sapiens
  Payload ID: 14890
  Gene Symbol: RBM8A
  Gene Name: RNA binding motif protein 8A
  ENST ID: ENST00000632040
  CDS Start-End: 1-320
ctgttgaaggctggattctctttgtaactggagtccatgaggaagccaccgaagaagacatacacgacaaattcgcagaatatggggaaattaaaaacattcatctcaacctcgacaggcgaacaggatatctgaaggggtatactctagttgaatatgaaacatacaaggaagcccaggctgctatggagggactcaatggccaggatttgatgggacagcccatcagcgttgactggtgttttgttcggggtccaccaaaaggcaagaggagaggtggccgaagacgcagcagaagtccagaccggagacgtcgctgacaggtcctctgttgtccaggatctggagctgattattgcgaatttcgttcactaaagcctctgcttctggagactctccatctgttctggaggaggtcacttgttcaactgtcaaggttctgcagggaacgaagatctgggccgcccagtatgcttgctctcttcttggccatgc

SEQ ID NO: 177835 - DNA, 2012 bp, Homo sapiens
  Payload ID: 14891
  Gene Symbol: RBMX
  Gene Name: RNA binding motif protein, X-linked
  Uniprot ID: P38159
  ENST ID: ENST00000320676
  CDS Start-End: 156-1331
ctcgttgcgcagtagtgctagcggcttcgcggttcggtcctcgcacccggcagccgccactggtgctgagctgctaggaagcccctatcgccgagctcgttggagcttgaacccattgtcacccctccgactcaccggcccaaaaaaaaaaaaacatggttgaagcagatcgcccaggaaagctcttcattggtgggcttaatacggaaacaaatgagaaagctcttgaagcagtatttggcaaatatggacgaatagtggaagtactcttgatgaaagaccgtgaaaccaacaaatcaagaggatttgcttttgtcacctttgaaagcccagcagacgctaaggatgcagccagagacatgaatggaaagtcattagatggaaaagccatcaaggtggaacaagccaccaaaccatcatttgaaagtggtagacgtggaccgcctccacctccaagaagtagaggccctccaagaggtcttagaggtggaagaggaggaagtggaggaaccaggggacctccctcacggggaggacacatggatgacggtggatattccatgaattttaacatgagttcttccaggggaccactcccagtaaaaagaggaccaccaccaagaagtgggggtcctcctcctaagagatctgcaccttcaggaccagttcgcagtagcagtggaatgggaggaagagctcctgtatcacgtggaagagatagttatggaggtccacctcgaagggaaccgctgccctctcgtagagatgtttatttgtccccaagagatgatgggtattctactaaagacagctattcaagcagagattacccaagttctcgtgatactagagattatgcaccaccaccacgagattatacttaccgtgattatggtcattccagttcacgtgatgactatccatcaagaggatatagcgatagagatggatatggtcgtgatcgtgactattcagatcatccaagtggaggttcctacagagattcatatgagagttatggtaactcacgtagtgctccacctacacgagggcccccgccatcttatggtggaagcagtcgctatgatgattacagcagctcacgtgacggatatggtggaagtcgagacagttactcaagcagccgaagtgatctctactcaagtggtcgtgatcgggttggcagacaagaaagagggcttcccccttctatggaaagggggtaccctcctccacgtgattcctacagcagttcaagccgcggagcaccaagaggtggtggccgtggaggaagccgatctgatagagggggaggcagaagcagatactagaaacaaacaaaactttggaccaaaatcccagttcaaagaaacaaaaagtggaaactattctatcataactacccaaggactactaaaaggaaaaattgtgttactttttttaaattccctgttaagttcccctccataatttttatgttcttgtgaggaaaaaagtaaaacatgtttaattttatttgactttcgcattgcttttcaacaagcaaatgttaaatgtgttaagacttgtactagtgttgtaactttccaagtaaaagtatcccctaaaggccacttcctatctgatttttcccagcaaatgaggcaggcaattctaagatcttccacaaaacatctagccatctaaaatggagagatgaatcattctacctatacaaacaagctagctattagagggtggttggggtatgctactcataagatttcagggtgtcttccaactgaaatctcaatgttctcagtacgaaaaacctgaaatcacatgcctatgtaaggaaagtgctattcacccagtaaacccaaaaaagcaaatggataatgctggccattttgcctttctgacatttccttgggaatctgcaagaacctcccctttcccttcccccaataagaccatttaagtgtgtgttaaacaactacagaatactaaataaaaagtttggccaaaaccaa

SEQ ID NO: 177836 - DNA, 940 bp, Homo sapiens
  Payload ID: 14891
  Gene Symbol: RBMX
  Gene Name: RNA binding motif protein, X-linked
  ENST ID: ENST00000419968
  CDS Start-End: 1-877
aaacatggttgaagcagatcgcccaggaaagctcttcattggtgggcttaatacggaaacaaatgagaaagctcttgaagcagtatttggcaaatatggacgaatagtggaagtactcttgatgaaagaccgtgaaaccaacaaatcaagaggatttgcttttgtcacctttgaaagcccagcagacgctaaggatgcagccagagacatgaatggaaagtcattagatggaaaagccatcaaggtggaacaagccaccaaaccatcatttgaaagtggtagacgtggaccgcctccacctccaagaagtagaggccctccaagaggtcttagaggtggaagaggaggaagtggaggaaccaggggacctccctcacggggaggacacatggatgacggtggatattccatgaattttaacatgagttcttccaggggaccactcccagtaaaaagaggaccaccaccaagaagtgggggtcctcctcctaagagatctgcaccttcaggaccagttcgcagtagcagtggaatgggaggaagagctcctgtatcacgtggaagagatagttatggaggtccacctcgaagggaaccgctgccctctcgtagagatgtttatttgtccccaagagatgatgggtattctactaaagacagctattcaagcagagattacccaagttctcgtgatactagagattatgcaccaccaccacgagattatacttaccgtgattatggtcattccagttcacgtgatgactatccatcaagaggatatagcgatagagatggatatggtcgtgatcgtgactattcagatcatccaagtggaggttcctacagagattcatatgagagttatggttggtgattttgctcattatggtcgtggagtgctgattgattcacagtagataaagctggcagtaagaaa

SEQ ID NO: 177837 - DNA, 2004 bp, Homo sapiens
  Payload ID: 14891
  Gene Symbol: RBMX
  Gene Name: RNA binding motif protein, X-linked
  Uniprot ID: P38159
  ENST ID: ENST00000431446
  CDS Start-End: 156-746
ctcgttgcgcagtagtgctagcggcttcgcggttcggtcctcgcacccggcagccgccactggtgctgagctgctaggaagcccctatcgccgagctcgttggagcttgaacccattgtcacccctccgactcaccggcccaaaaaaaaaaaaacatggttgaagcagatcgcccaggaaagctcttcattggtgggcttaatacggaaacaaatgagaaagctcttgaagcagtatttggcaaatatggacgaatagtggaagtactcttgatgaaagaccgtgaaaccaacaaatcaagaggatttgcttttgtcacctttgaaagcccagcagacgctaaggatgcagccagagacatgaatggaaagctcctgtatcacgtggaagagatagttatggaggtccacctcgaagggaaccgctgccctctcgtagagatgtttatttgtccccaagagatgatgggtattctactaaagacagctattcaagcagagattacccaagttctcgtgatactagagattatgcaccaccaccacgagattatacttaccgtgattatggtcattccagttcacgtgatgactatccatcaagaggatatagcgatagagatggatatggtcgtgatcgtgactattcagatcatccaagtggaggttcctacagagattcatatgagagttatggttggtgattttgctcattatggtcgtggagtgctgattgattcacagtagataaagctggcagtaagaaatgctaagagttgttgaagcagaaggcggctgattgtcaataagtcactacagttgcataagcagtgctgtcagaattggtttggtgcaggcaatagattttgccttcaggggttcctgtggatctgaggaaggcatcagtgttgattaacactcataactagggagtgactggtagttacttaaagcaagtaattgaccaaatggaaaaggggaagtaattaaggaaattggtaagtggaggtagtcaggaagttcttgtggttcttcacatagattttacagctttggctttcattttgtttagctaaagtcatggggacaactcttcaatttagaacttaagttgaattataaaaatgatggatataagtggtagctgtatctagtgaagtgtctgtcagtaagtgaaacattttttggtggtggcttatccacaaacagtttagttgtagaataaaacttatgagtgacatctggaaagtaaccatgctaagatggcaagcacactggaaacaattaggccacttggctttcttttgctgtattgttttataagcctactttacctcccagtcttggaaacaagttttagttttttattggtttggagactagagccaatagtataatgttctcaaaggaaacagacttgagttgttggattagaggaactaacccaacttatatgattttttttttgtttttgtcgtgtagttatggcactgtcttatttggaacatttgcaactagggataatacaacatttttaactctcatttgacaacctactactaatcacagaccacaagggtaatgaccaaatttatgtggtttttgcactccatagttgtcttagcccaatctttctatactcttacgattacttgggttaacgcttctgtgaggaccttctggctcttgagataccctaaatatttaagatatttagatatcttgaagatagtataggatatagagattgtaccaaataggaatataaggagtatgttaaaatgaccagatacctgtttgatagtttactgacctagcagatgtgtggaaaaggaatcagatcttgattcttctgggtttatactggttgtaaaacagaatgatacagaaaatgttttccttgtttaactggtagttgaacatagaacttgggtattatagatcacttttcactttttggaatgttttgtattgaaacttaataaaactttaacatggcatcttt

SEQ ID NO: 177838 - DNA, 577 bp, Homo sapiens
  Payload ID: 14891
  Gene Symbol: RBMX
  Gene Name: RNA binding motif protein, X-linked
  ENST ID: ENST00000563370
  CDS Start-End: 156-269
ctcgttgcgcagtagtgctagcggcttcgcggttcggtcctcgcacccggcagccgccactggtgctgagctgctaggaagcccctatcgccgagctcgttggagcttgaacccattgtcacccctccgactcaccggcccaaaaaaaaaaaaacatggttgaagcagatcgcccaggaaagctcttcattggtgggcttaatacggaaacaaatgagaaagctcttgaagcagtatttggcaaatatggacgaatagtggaagggtaacactttatttttctgaaaactactttttagtactcttgatgaaagaccgtgaaaccaacaaatcaagaggatttgcttttgtcacctttgaaagcccagcagacgctaaggatgcagccagagacatgaatggaaagtcattagatggaaaagccatcaaggtggaacaagccaccaaaccatcatttgaaagtggtagacgtggaccgcctccacctccaagaagtagaggccctccaagaggtcttagaggtggaagaggaggaagtggaggaaccaggggacctccctcacggggaggacacatg

SEQ ID NO: 177839 - DNA, 1852 bp, Homo sapiens
  Payload ID: 14891
  Gene Symbol: RBMX
  Gene Name: RNA binding motif protein, X-linked
  ENST ID: ENST00000464781
  CDS Start-End: 156-392
ctcgttgcgcagtagtgctagcggcttcgcggttcggtcctcgcacccggcagccgccactggtgctgagctgctaggaagcccctatcgccgagctcgttggagcttgaacccattgtcacccctccgactcaccggcccaaaaaaaaaaaaacatggttgaagcagatcgcccaggaaagctcttcattggtgggcttaatacggaaacaaatgagaaagctcttgaagcagtatttggcaaatatggacgaatagtggaagtactcttgatgaaagaccgtgaaaccaacaaatcaagaggatttgcttttgtcacctttgaaagcccagcagacgctaaggatgcagccagagacatgaatggaaagatgacggtggatattccatgaattttaacatgagttcttccaggggaccactcccagtaaaaagaggaccaccaccaagaagtgggggtcctcctcctaagagatctgcaccttcaggaccagttcgcagtagcagtggaatgggaggaagagctcctgtatcacgtggaagagatagttatggaggtccacctcgaagggaaccgctgccctctcgtagagatgtttatttgtccccaagagatgatgggtattctactaaagacagctattcaagcagagattacccaagttctcgtgatactagagattatgcaccaccaccacgagattatacttaccgtgattatggtcattccagttcacgtgatgactatccatcaagaggatatagcgatagagatggatatggtcgtgatcgtgactattcagatcatccaagtggaggttcctacagagattcatatgagagttatggtaactcacgtagtgctccacctacacgagggcccccgccatcttatggtggaagcagtcgctatgatgattacagcagctcacgtgacggatatggtggaagtcgagacagttactcaagcagccgaagtgatctctactcaagtggtcgtgatcgggttggcagacaagaaagagggcttcccccttctatggaaagggggtaccctcctccacgtgattcctacagcagttcaagccgcggagcaccaagaggtggtggccgtggaggaagccgatctgatagagggggaggcagaagcagatactagaaacaaacaaaactttggaccaaaatcccagttcaaagaaacaaaaagtggaaactattctatcataactacccaaggactactaaaaggaaaaattgtgttactttttttaaattccctgttaagttcccctccataatttttatgttcttgtgaggaaaaaagtaaaacatgtttaattttatttgactttcgcattgcttttcaacaagcaaatgttaaatgtgttaagacttgtactagtgttgtaactttccaagtaaaagtatcccctaaaggccacttcctatctgatttttcccagcaaatgaggcaggcaattctaagatcttccacaaaacatctagccatctaaaatggagagatgaatcattctacctatacaaacaagctagctattagagggtggttggggtatgctactcataagatttcagggtgtcttccaactgaaatctcaatgttctcagtacgaaaaacctgaaatcacatgcctatgtaaggaaagtgctattcacccagtaaacccaaaaaagcaaatggataatgctggccattttgcctttctgacatttccttgggaatctgcaagaacctcccctttcccttcccccaataagaccatttaagtgtgtgttaaacaactacagaatactaaataaaaagtttggccaaaaccaaccatgaagctgc

SEQ ID NO: 177840 - DNA, 2148 bp, Homo sapiens
  Payload ID: 14891
  Gene Symbol: RBMX
  Gene Name: RNA binding motif protein, X-linked
  ENST ID: ENST00000562646
  CDS Start-End: 156-1046
ctcgttgcgcagtagtgctagcggcttcgcggttcggtcctcgcacccggcagccgccactggtgctgagctgctaggaagcccctatcgccgagctcgttggagcttgaacccattgtcacccctccgactcaccggcccaaaaaaaaaaaaacatggttgaagcagatcgcccaggaaagctcttcattggtgggcttaatacggaaacaaatgagaaagctcttgaagcagtatttggcaaatatggacgaatagtggaagtactcttgatgaaagaccgtgaaaccaacaaatcaagaggatttgcttttgtcacctttgaaagcccagcagacgctaaggatgcagccagagacatgaatggaaagtcattagatggaaaagccatcaaggtggaacaagccaccaaaccatcatttgaaagtggtagacgtggaccgcctccacctccaagaagtagaggccctccaagaggtcttagaggtggaagaggaggaagtggaggaaccaggggacctccctcacggggaggacacatggatgacggtggatattccatgaattttaacatgagttcttccaggggaccactcccagtaaaaagaggaccaccaccaagaagtgggggtcctcctcctaagagatctgcaccttcaggaccagttcgcagtagcagtggaatgggaggaagagctcctgtatcacgtggaagagatagttatggaggtccacctcgaagggaaccgctgccctctcgtagagatgtttatttgtccccaagagatgatgggtattctactaaagacagctattcaagcagagattacccaagttctcgtgatactagagattatgcaccaccaccacgagattatacttaccgtgattatggtcattccagttcacgtgatgactatccatcaagaggatatagcgatagagatggatatggtcgtgatcgtgactattcagatcatccaagtggaggttcctacagagattcatatgagagttatggtaagatactggttaagggtctttagtatcaccagcttgagtttttaggttcgtgagccagtttattaggctgtgtggtgcttgcttttaaagggatgtttgcttgcttttaaaggggtaactttatcagctgggcttttcctagttttgtgaggggctttttttgtttttctaagtttcttttgaggctgtttgcttgctttggaggggattttgcttgcttaaattggcagccttatgtgttttcccccaacagtgaaaatacaatttaaaaattttattaacaagatcaaatatttaccattgcaatatgaaggcaagttctacagttcaaaattgcaacttatcactggaaagtggctgagtgtctactataaaataacaagctctctggaatatcctcttgaaatacacaccgtcttcagtcttttcaaacaaacattaaaatgaatccaattccatatctcagcagatgagcaaatccctgttatggccagcaatggcagagtttaaaacctcccacccagttgagaaagtaaacttttaatacaagaattctgtaaattcagatttaaaatgttgtatatatacaatttatagtgttgccatattacctgaccattgaccctgcaggtaactcacgtagtgctccacctacacgagggcccccgccatcttatggtggaagcagtcgctatgatgattacagcagctcacgtgacggatatggtggaagtcgagacagttactcaagcagccgaagtgatctctactcaagtggtcgtgatcgggttggcagacaagaaagagggcttcccccttctatggaaagggggtaccctcctccacgtgattcctacagcagttcaagccgcggagcaccaagaggtggtggccgtggaggaagccgatctgatagagggggaggcagaagcagatactagaaacaaacaaaactttggaccaaaatcccagttcaaagaaacaaaaagtggaaactattctatcataactacccaaggactactaaaaggaaaaattgtgttactttttttaaattccctgttaagttcccctccataatttttatgttcttgtgaggaaaaaagtaaaacatgtttaatttta

SEQ ID NO: 177841 - DNA, 4887 bp, Homo sapiens
  Payload ID: 14891
  Gene Symbol: RBMX
  Gene Name: RNA binding motif protein, X-linked
  ENST ID: ENST00000568578
  CDS Start-End: 153-389
gttgcgcagtagtgctagcggcttcgcggttcggtcctcgcacccggcagccgccactggtgctgagctgctaggaagcccctatcgccgagctcgttggagcttgaacccattgtcacccctccgactcaccggcccaaaaaaaaaaaaacatggttgaagcagatcgcccaggaaagctcttcattggtgggcttaatacggaaacaaatgagaaagctcttgaagcagtatttggcaaatatggacgaatagtggaagtactcttgatgaaagaccgtgaaaccaacaaatcaagaggatttgcttttgtcacctttgaaagcccagcagacgctaaggatgcagccagagacatgaatggaaagatgacggtggatattccatgaattttaacatgagttcttccaggggaccactcccagtaaaaagaggaccaccaccaagaagtgggggtcctcctcctaagagatctgcaccttcaggaccagttcgcagtagcagtggaatgggaggaagagctcctgtatcacgtggaagagatagttatggaggtccacctcgaagggaaccgctgccctctcgtagagatgtttatttgtccccaagagatgatgggtattctactaaagacagctattcaagcagagattacccaagttctcgtgatactagagattatgcaccaccaccacgagattatacttaccgtgattatggtcattccagttcacgtgatgactatccatcaagaggatatagcgatagagatggatatggtcgtgatcgtgactattcagatcatccaagtggaggttcctacagagattcatatgagagttatggtaagatactggttaagggtctttagtatcaccagcttgagtttttaggttcgtgagccagtttattaggctgtgtggtgcttgcttttaaagggatgtttgcttgcttttaaaggggtaactttatcagctgggcttttcctagttttgtgaggggctttttttgtttttctaagtttcttttgaggctgtttgcttgctttggaggggattttgcttgcttaaattggcagccttatgtgttttcccccaacagtgaaaatacaatttaaaaattttattaacaagatcaaatatttaccattgcaatatgaaggcaagttctacagttcaaaattgcaacttatcactggaaagtggctgagtgtctactataaaataacaagctctctggaatatcctcttgaaatacacaccgtcttcagtcttttcaaacaaacattaaaatgaatccaattccatatctcagcagatgagcaaatccctgttatggccagcaatggcagagtttaaaacctcccacccagttgagaaagtaaacttttaatacaagaattctgtaaattcagatttaaaatgttgtatatatacaatttatagtgttgccatattacctgaccattgaccctgcaggtaactcacgtagtgctccacctacacgagggcccccgccatcttatggtggaagcagtcgctatgatgattacagcagctcacgtgacggatatggtggaagtcgagacagttactcaagcagccgaagtgatctctactcaagtggtcgtgatcgggttggcagacaagaaagagggcttcccccttctatggaaagggggtaccctcctccacgtgattcctacagcagttcaagccgcggagcaccaagaggtggtggccgtggaggaagccgatctgatagagggggaggcagaagcagatactagaaacaaacaaaactttggaccaaaatcccagttcaaagaaacaaaaagtggaaactattctatcataactacccaaggactactaaaaggaaaaattgtgttactttttttaaattccctgttaagttcccctccataatttttatgttcttgtgaggaaaaaagtaaaacatgtttaattttatttgactttcgcattgcttttcaacaagcaaatgttaaatgtgttaagacttgtactagtgttgtaactttccaagtaaaagtatcccctaaaggccacttcctatctgatttttcccagcaaatgaggcaggcaattctaagatcttccacaaaacatctagccatctaaaatggagagatgaatcattctacctatacaaacaagctagctattagagggtggttggggtatgctactcataagatttcagggtgtcttccaactgaaatctcaatgttctcagtacgaaaaacctgaaatcacatgcctatgtaaggaaagtgctattcacccagtaaacccaaaaaagcaaatggataatgctggccattttgcctttctgacatttccttgggaatctgcaagaacctcccctttcccttcccccaataagaccatttaagtgtgtgttaaacaactacagaatactaaataaaaagtttggccaaaaccaaccatgaagctgcaaaggtgcttgctcttactgtttcaaatttttgcaactctgtagtgtctcacttttaaaggaacagcttgattgcaaaggagaaaatagataagcaatgaagttatctccaacttcctaaaggcttatgacttctaaaaagtgaatctatcagcattccacatcagatttaaagcatcaaatgcctgtgaaacagcaaagatggtaagcaaagcaaactagtttttccgtctaagtcgaaattgaacacttaccttcctcatagtacagtgaaacatactgtacctcaaggcaatggaaatgccttctagattaaaaaaaacttttggaaaaaagaaatattcaatagcgtattagaagtcctccaaattcaacacttggattttttttttttttttttaaagcatgtgtgacacttaaaggctttattaatagagctgttgtttaccaatggcgatctggggcttgggagggggtatttttttcaaagtccatttttgatgaagacctttaaacatgcttcgtatgtttttaacatttttttcaaattagtcttttagtcaatataggaaatggcttaagtttggggtccccctttttacccctgtaagccattgcaaacttgacatttagttggatgcctgacttgtttttagttctatgaaactacactgtatggagaaaatctattgcaagtggtctttaaaaagcaaaacctgaggcagcatgacccaggtccagccatgaagttgaaaaagatgctcttgaatatagtaaacttgaagacctccaactaaaaatccttatactgcacttattccttcaaataagttttgttcgttcaacttatggatttaacgtggcagtgcaccattggaacagaatgacaatccataagccatgcaacttaacaatttaagccattccagtccatcccgagccagtgaatcttccaccacttaagacaaatagtagaacatgaaatatattaagctgcaagtctgaacttgccttttctttctggaaaagagggcagtaataggcaagttttaaaagaatttccttaagagagataactagttttcatttatttaacttttgcaggttggtgattttgctcattatggtcgtggagtgctgattgattcacagtagataaagctggcagtaagaaatgctaagagttgttgaagcagaaggcggctgattgtcaataagtcactacagttgcataagcagtgctgtcagaattggtttggtgcaggcaatagattttgccttcaggggttcctgtggatctgaggaaggcatcagtgttgattaacactcataactagggagtgactggtagttacttaaagcaagtaattgaccaaatggaaaaggggaagtaattaaggaaattggtaagtggaggtagtcaggaagttcttgtggttcttcacatagattttacagctttggctttcattttgtttagctaaagtcatggggacaactcttcaatttagaacttaagttgaattataaaaatgatggatataagtggtagctgtatctagtgaagtgtctgtcagtaagtgaaacattttttggtggtggcttatccacaaacagtttagttgtagaataaaacttatgagtgacatctggaaagtaaccatgctaagatggcaagcacactggaaacaattaggccacttggctttcttttgctgtattgttttataagcctactttacctcccagtcttggaaacaagttttagttttttattggtttggagactagagccaatagtataatgttctcaaaggaaacagacttgagttgttggattagaggaactaacccaacttatatgattttttttttgtttttgtcgtgtagttatggcactgtcttatttggaacatttgcaactagggataatacaacatttttaactctcatttgacaacctactactaatcacagaccacaagggtaatgaccaaatttatgtggtttttgcactccatagttgtcttagcccaatctttctatactcttacgattacttgggttaacgcttctgtgaggaccttctggctcttgagataccctaaatatttaagatatttagatatcttgaagatagtataggatatagagattgtaccaaataggaatataaggagtatgttaaaatgaccagatacctgtttgatagtttactgacctagcagatgtgtggaaaaggaatcagatcttgattcttctgggtttatactggttgtaaaacagaatgatacagaaaatgttttccttgtttaactggtagttgaacatagaacttgggtattatagatcacttttcactttttggaatgttttgtattgaaacttaataaaactttaacatgg

SEQ ID NO: 177842 - DNA, 1292 bp, Homo sapiens
  Payload ID: 14891
  Gene Symbol: RBMX
  Gene Name: RNA binding motif protein, X-linked
  ENST ID: ENST00000565438
  CDS Start-End: 337-1128
tcccgggcagtataaagtttgctgtctcctttgttcgccctcgttgcgcagtagtgctagcggcttcgcggttcggtcctcgcacccggcagccgccactggtgctgagctgctaggaagcccctatcgccgagctcgttggagcttgaacccattgtcacccctccgtcattagatggaaaagccatcaaggtggaacaagccaccaaaccatcatttgaaagtggtagacgtggaccgcctccacctccaagaagtagaggccctccaagaggtcttagaggtggaagaggaggaagtggaggaaccaggggacctccctcacggggaggacacatggatgacggtggatattccatgaattttaacatgagttcttccaggggaccactcccagtaaaaagaggaccaccaccaagaagtgggggtcctcctcctaagagatctgcaccttcaggaccagttcgcagtagcagtggaatgggaggaagagctcctgtatcacgtggaagagatagttatggaggtccacctcgaagggaaccgctgccctctcgtagagatgtttatttgtccccaagagatgatgggtattctactaaagacagctattcaagcagagattacccaagttctcgtgatactagagattatgcaccaccaccacgagattatacttaccgtgattatggtcattccagttcacgtgatgactatccatcaagaggatatagcgatagagatggatatggtcgtgatcgtgactattcagatcatccaagtggaggttcctacagagattcatatgagagttatggtaactcacgtagtgctccacctacacgagggcccccgccatcttatggtggaagcagtcgctatgatgattacagcagctcacgtgacggatatggtggaagtcgagacagttactcaagcagccgaagtgatctctactcaagtggtcgtgatcgggttggcagacaagaaagagggcttcccccttctatggaaagggggtaccctcctccacgtgattcctacagcagttcaagccgcggagcaccaagaggtggtggccgtggaggaagccgatctgatagagggggaggcagaagcagatactagaaacaaacaaaactttggaccaaaatcccagttcaaagaaacaaaaagtggaaactattctatcataactacccaaggactactaaaaggaaaaattgtgttactttttttaaattccctgttaagttcccctccataatttttatgttcttgtgaggaaaaaa

SEQ ID NO: 177843 - DNA, 1528 bp, Homo sapiens
  Payload ID: 14892
  Gene Symbol: RBMX2
  Gene Name: RNA binding motif protein, X-linked 2
  Uniprot ID: Q9Y388
  ENST ID: ENST00000305536
  CDS Start-End: 65-1033
gcgcatgcgctgcgctgcctttcccgggcgctgattcctgagtgctgagcgcgaacccgaggagatgaaccctttaactaaggtgaagctgatcaacgagctgaatgaacgagaggtccagcttggggtggccgataaggtgtcctggcactccgagtacaaggacagcgcctggatcttcctgggagggcttccttatgaactgactgaaggggacatcatctgtgtgttctcacaatatggggagattgttaacattaatctcgtgcgggacaagaaaactgggaaatccaaaggattctgtttcctctgctatgaagaccagaggagcacaattctggccgtcgacaattttaatgggatcaagatcaaaggaagaactatccgagtggatcatgtgtctaactatcgggctcctaaggactcagaagaaatagatgatgtgaccagacaactccaggagaagggctgtggggctcgtaccccctcaccaagtttgtctgagagctctgaagatgaaaaaccaacaaaaaagcacaaaaaagacaaaaaggaaaaaaagaaaaaaaagaaagaaaaagagaaagccgaccgggaggtacaggcagagcaaccatcctcttcgtcacccagacgcaagacagtaaaggaaaaggatgacactggccctaagaagcacagcagcaagaactcagagagagctcagaagtcagagcccagggaggggcagaagctccccaaatccaggacggcctactctggtggagcagaggacctagagagggagctgaagaaggagaaacccaagcacgagcacaagtcctcaagcaggagggaggcaagagaagaaaagaccaggattagggacagagggcggagctcagatgcacattctagctggtataatgggcgttctgaagggcgtagttatagaagtagaagtaggagccgagataaatcccataggcataaaagggcccgacgctcccgggagcgggagtcttcgaatcccagtgaccgttggcgtcactgaagacttcagctgcacagtagatttggaaataattatgttttttaaatgcagtcaaattcagttgggtggttactatttttgtatctaaaacttctggggctggattcttttaatcccttgactatttagagtcattgggagggctgcagtttcaacagctagatatcctggatattgtttgcaccatccattgtccctgtaccagagtatgtatcctgaactttggttcataaatatggctcttgaacccatagaccccagttgaagatggaattttcaggaaagggaaaatactagataattctagaattctagtcttcgtgttagatgtttatagcccagcatcttgggacctttccagttactaggtttggacagcttgatgtgaacgaatgggataggatttttaaaatcagccagctccatgcccaaaccttcctgtttgcagaactttttaatgtcttttctttttcattaaaacttttttgttcgata

SEQ ID NO: 177844 - DNA, 798 bp, Homo sapiens
  Payload ID: 14892
  Gene Symbol: RBMX2
  Gene Name: RNA binding motif protein, X-linked 2
  ENST ID: ENST00000370947
  CDS Start-End: 29-205
cctgagtgctgagcgcgaacccgaggagatgaaccctttaactaaggtgaagctgatcaacgagctgaatgaacgagaggtccagcttggggtggccgataaggtgtcctggcactccgagtacaaggacagcgcctggatcttcctgggagggcttccttatgaactgactgaaggggacatcatctgtgtgttctcacagtaagtgtcctttcatttcctgcctcctgagtcgacagagtactttgtttctgtaatacattttgtggcatcacaaaaaccacttattttcactctaggctgaatggcatccctgcatggggagggctggagcttctgttctagatcagtcccaggacatggttctagaatgttctgtgggagatccaagaggtttgttaatttgggagggcatcttggggatcctagtctatttctgttgtttttcactgaggcttgttcagcctgggcctagactggaacagactggactccttgggctcttgcaaactaggggtaacccatggtcacagggcccttctggcccttacctgtgtggcgtcatacgattggggcaaagcacagaggaaattggggtaaaaaacagaaggtcgtagtttgctttctttgtttctcgatgagtgtaaggttagtgagcaaaggcaatctctgcctggaggctgagaatcacagcccgaagggaacaagaatgaataggagacctgtatattcttcattctgctgaggtgttagcagcagcatttcatgggagagggtgttggcagctcatactggtag

SEQ ID NO: 177845 - DNA, 892 bp, Homo sapiens
  Payload ID: 14892
  Gene Symbol: RBMX2
  Gene Name: RNA binding motif protein, X-linked 2
  ENST ID: ENST00000619267
  CDS Start-End: 65-892
gcgcatgcgctgcgctgcctttcccgggcgctgattcctgagtgctgagcgcgaacccgaggagatgaaccctttaactaaggtgaagctgatcaacgagctgaatgaacgagaggtccagcttggggtggccgataaggtgtcctggcactccgagtacaaggacagcgcctggatcttcctgggagggcttccttatgaactgactgaaggggacatcatctgtgtgttctcacaatatggggagattgttaacattaatctcgtgcgggacaagaaaactgggaaatccaaaggattctgtttcctctgctatgaagaccagaggagcacaattctggccgtcgacaattttaatgggatcaagatcaaaggaagaactatccgagtggatcatgtgtctaactatcgggctcctaaggactcagaagaaatagatgatgtgaccagacaactccaggagaagggctgtggggctcgtaccccctcaccaagtttgtctgagagctctgaagatgaaaaaccaacaaaaaagcacaaaaaagacaaaaaggaaaaaaagaaaaaaaagaaagaaaaagagaaagccgaccgggaggtacaggcagagcaaccatcctcttcgtcacccagacgcaagacagtaaaggaaaaggatgacactggccctaagaagcacagcagcaagaactcagagagagctcagaagtcagagcccagggaggggcagaagctccccaaatccaggacggcctactctggtggagcagaggacctagagagggagctgaagaaggagaaacccaagcacgagcacaagtcctcaagcaggagggaggcaagagaagaaaagaccaggattagggacagagggctcagatgcacattctag

SEQ ID NO: 177846 - DNA, 4799 bp, Homo sapiens
  Payload ID: 14893
  Gene Symbol: RBMXL1
  Gene Name: RNA binding motif protein, X-linked-like 1
  Uniprot ID: Q96E39
  ENST ID: ENST00000321792
  CDS Start-End: 429-1601
cacccctcatccagtctcttccagcctagagatcctggcctacccctccgccaaagcgcgcactgagtgcaaaccccagagtcaatccctgtcccggctccgccccccgcgtccgaatcccgcccagccgggccctcaagcccagtcgggactcgagcctagggaggcgaggttcccgcaccggataggaacattctgttgttttcctctgccatctagtggcaaaagaaagtaattttcctggttttttgaatggatagccataccttaaaaagcatccagattgcgcagtagtgctagcggcttcgcggttcagtcctcctaactgacagccgccactggtgctgagctgctaggaagcccctgtcggcgagcttgttggagcttgaacccactgtcacccctccgactcaccggcaaaaaaaaaaatggttgaagcagatcgcccaggaaagctcttcattggtgggcttaatacggaaacaaatgagaaagctcttgaaacagtatttggcaaatatggacgaatagtggaagtactcttgataaaagaccgtgaaaccaacaaatcaagaggatttgcttttgtcacctttgaaagcccagcagacgctaaggatgcagccagagacatgaatggaaagtcattagatggaaaagccatcaaggtggaacaagccaccaaaccatcatttgaaagaggtagacatggaccgcccccacctccaagaagtagaggtcctccaagaggttttggagctggaagaggaggaagtggaggaaccaggggacctccttcacgaggaggacacatggatgatggtggatattccatgaattttaacatgagttcttccaggggaccactcccagtaaaaagaggaccaccaccaagaagtgggggtccttctcctaagagatctgcaccttcaggactagttcgcagcagcagtggaatgggaggaagagctcctctatcacgtggaagagatagttatggaggtccacctcgaagggaaccgctcccctctcgtagagatgtttatttgtccccaagagatgatgggtattctactaaagacagctattcaagcagagattacccaagttctcgtgatacaagagattatgcaccaccaccacgagattatacttaccgtgattatggtcattccagttcacgtgatgactatccatcaagaggctatggcgatagagatggatatggtcgtgatcgtgactattcagatcatccaagtggaggttcctacagagattcatatgagagttatggtaactcacgtagtgctccacttacacgagggcccccgccatcttatggtggaagcagtcgctatgatgattatagcagctcacgtgatggatatggtggaagtcgagacagttactcaagcagccgaagtgatctctactcaagttgtgacagggttggcagacaagaaagagggcttcccccttctgtagaaagggggtacccttcttcacgtgattcctacagcagttcaagccgcggagcaccaagaggtgctggccctggaggaagccgatctgatagagggggaggcagaagcagatactagaaacaaacaaaactttggaccaaaatcccagttcaaagaaacaaaaaaaagagtggaaactattctatcataactacccaaggactactaaaaggaaaaattgtgttaccttttttaaattccctgttaagtcccttccgtaatttttatgttcttgtgaggaaaaaagtaaaacatgtttaattttatttgactttatgacattgcttttcaacaagcaaatgttaaatgtgttaagccttgtagtactagtgttgtaactttccaagtaaaggtgtccctaaagaccacttcctatctggtttttcccagtaaatgaggcaagcaattctaagatcttccacaaaacatctagccaactaaaatggagagatgaatcattctgcctatacaaacaagctagctattagagggtggttggagtatgctactcataagatttcagggtgttttctaactgaaatctcactgttctcagtatgcaaaacctgaaatcagatgcctatgtaaggaaagtgctattcacccagtaaacccaaaaaaagcaaatggataatgctggccattttgcctttctgacatttccttgggaatctgcaagaacctcccctttcccctcccacaataagaccatttaagtgtgtgctaaacaactacggaatactaaataaaaagtttggccaaaaccaaccatgaagctgcaaaggtgcttgctcttactctttcaaatttttgcaactctaatgtctcacttttaaaggaacagcttgattgcaaaggagaaaatagataagcaatgaatttatctccaacttcctaaaggcttatgacttctaaaaagtgaatctatcagcattccacatcagatttaaagcatcaaatgcctgtgaaacagcaaagatggttgaagattgtgctcattatgtttgtggagtgctgattgattcacagtagataacgctggcagtaagagaaatcaaatgctaagagttgttgaagcagaaggcggctgattgttggtaagtcagtgcagttgcataagcagtgctgtcagaattggtttggtgcaggcaatagattttgccttcaagggttcctgtggatctcaggaaggcatcagtgttgattaacactcataactagggagtgagtggtagttacttaagtaattgaccaaatggaaaaggggaagtaattaaggaaattggtaagtggaggtagtcaggaggttctcgtggtcctttacacagattttacagctttgggtttcattttgtttagctaaagtcatggggacaactcttcaatttagaacttaagatgaattataaaaatgatggatataagtggtagctctatctggtgaagtgtcttgtcagtaagtgaaacatttttttgtggtggcttatccacaaacagtttagttgtagaataaaacttatgagtgacatctggaaagtaacaaccatgctaagatggcaaacacactggaaacaattgggccacttggctttcttttgctgtattgttttataagcctgctttacctccccgtcttggaaacaagttttagtttattgctttggagactagagccaatagtgtaatgttctcaaaggaaacagacttgagttgttggattagaggaactaactcaacttctaattttttttgttgtaattatggcactgtcatgttttaacatttgcaactagggatagtaagtacaacatttttaactctcatttggcagactactactaatcacagaccacaagggtaatgaccaaatttatgtggttgttacacttccatagttgtcttagccgaatccttccatattcttatgattacttgggttaaagcttctgtgaggaccttttggctcttaagatatcctaaatatttaaaatatttagatatcctaaatataggatatagagtttgtaccaaatatgaatgaatattgttcaaagcaaggagtatgttaaaatgaccagacacctgtttgataaatagtttactgaactagcagacgtgtggaaaaagaatcagatcttgattcttctgggtttatactggttgtaaaacagaatgatattagaaaatgttttccttgtttaagtggtagttgaacatagaacttgggtattatagatcacttttcactttttggaatgttttgtattgaaacttaatacaactttaacatggcaaaaaaaaaaaaaatccaaaatctatgagataattttgttaaagttggcttgcttgggcgggtgcttggtccagagggagaaaagaaggcatgatttcagaatactctggcagctttttaaattcagctttatcaagttacagtaaactgtatctgtttagaattacaactcaatggttattttgacagatgtatatgccatgaagccactgtcaccatcaacatgcagaacacttccatcgcccccaaaagattcctcaagttcctttgcagtccatccctcacgctgctgatttgtctttgtcaccatatattagtttgctttgtggtggtgtttagtattttatataaatgggattgtgtagcatgtacttttttgtttatggtttctttcacacacaatgactttgaaattcaccaggttgcagtgtatcagtagcttattccttttattgctgagtagtgtcccattatgtgaatatgccattatttgtttttctactcacctgttgatggaccttgggattgtttccagtttggggctactgtgaataaaactgttaggaacatttgtgtacaagccactgtgtagacataggttttcctttctcttgggtaaatacctaccagtaaaatggttgggttgcatggcagatttatgtttaataaagtaactgccaaactgtttgttttccaaaggggctatacccttttatattcccaccagggttgtatagagttccaactgccaacactcagttttcagccattctgatgggaatctagtggtatctcattgtggttttattttcatttccccgggtgactaatgctggtaagcatcttttaaggtactttttggccagttgtatattttctgtgaagtggctgtcaaatcttttgcccacttttaattggattgtttgtcttattgagttgtaaaagttctttatatatactgtattaaagtcctttgtaagaca

SEQ ID NO: 177847 - DNA, 5084 bp, Homo sapiens
  Payload ID: 14893
  Gene Symbol: RBMXL1
  Gene Name: RNA binding motif protein, X-linked-like 1
  Uniprot ID: Q96E39
  ENST ID: ENST00000399794
  CDS Start-End: 717-1889
gtggcccccaccccttccctcctccatttccatccattccgcgatcgcggcggaccccaccgtcatcgcgcgccgtgagtcacactccacagccaatccctggccacatccgggctcgcccccgccccgcccccttgttcccgcaagcccggaactgcccaaatcccgcccctcccctcccaaaaaaacacccctcatccagtctcttccagcctagagatcctggcctacccctccgccaaagcgcgcactgagtgcaaaccccagagtcaatccctgtcccggctccgccccccgcgtccgaatcccgcccagccgggccctcaagcccagtcgggactcgagcctagggaggcgaggttcccgcaccggatagcatgtttttggcccagaggagcctctgctctcttagcggtagagcaaaattcctgaagacaatttcttcttccaaaatcctcggattctctacttctgctgaacattctgttgttttcctctgccatctagtggcaaaagaaagtaattttcctggttttttgaatggatagccataccttaaaaagcatccagattgcgcagtagtgctagcggcttcgcggttcagtcctcctaactgacagccgccactggtgctgagctgctaggaagcccctgtcggcgagcttgttggagcttgaacccactgtcacccctccgactcaccggcaaaaaaaaaaatggttgaagcagatcgcccaggaaagctcttcattggtgggcttaatacggaaacaaatgagaaagctcttgaaacagtatttggcaaatatggacgaatagtggaagtactcttgataaaagaccgtgaaaccaacaaatcaagaggatttgcttttgtcacctttgaaagcccagcagacgctaaggatgcagccagagacatgaatggaaagtcattagatggaaaagccatcaaggtggaacaagccaccaaaccatcatttgaaagaggtagacatggaccgcccccacctccaagaagtagaggtcctccaagaggttttggagctggaagaggaggaagtggaggaaccaggggacctccttcacgaggaggacacatggatgatggtggatattccatgaattttaacatgagttcttccaggggaccactcccagtaaaaagaggaccaccaccaagaagtgggggtccttctcctaagagatctgcaccttcaggactagttcgcagcagcagtggaatgggaggaagagctcctctatcacgtggaagagatagttatggaggtccacctcgaagggaaccgctcccctctcgtagagatgtttatttgtccccaagagatgatgggtattctactaaagacagctattcaagcagagattacccaagttctcgtgatacaagagattatgcaccaccaccacgagattatacttaccgtgattatggtcattccagttcacgtgatgactatccatcaagaggctatggcgatagagatggatatggtcgtgatcgtgactattcagatcatccaagtggaggttcctacagagattcatatgagagttatggtaactcacgtagtgctccacttacacgagggcccccgccatcttatggtggaagcagtcgctatgatgattatagcagctcacgtgatggatatggtggaagtcgagacagttactcaagcagccgaagtgatctctactcaagttgtgacagggttggcagacaagaaagagggcttcccccttctgtagaaagggggtacccttcttcacgtgattcctacagcagttcaagccgcggagcaccaagaggtgctggccctggaggaagccgatctgatagagggggaggcagaagcagatactagaaacaaacaaaactttggaccaaaatcccagttcaaagaaacaaaaaaaagagtggaaactattctatcataactacccaaggactactaaaaggaaaaattgtgttaccttttttaaattccctgttaagtcccttccgtaatttttatgttcttgtgaggaaaaaagtaaaacatgtttaattttatttgactttatgacattgcttttcaacaagcaaatgttaaatgtgttaagccttgtagtactagtgttgtaactttccaagtaaaggtgtccctaaagaccacttcctatctggtttttcccagtaaatgaggcaagcaattctaagatcttccacaaaacatctagccaactaaaatggagagatgaatcattctgcctatacaaacaagctagctattagagggtggttggagtatgctactcataagatttcagggtgttttctaactgaaatctcactgttctcagtatgcaaaacctgaaatcagatgcctatgtaaggaaagtgctattcacccagtaaacccaaaaaaagcaaatggataatgctggccattttgcctttctgacatttccttgggaatctgcaagaacctcccctttcccctcccacaataagaccatttaagtgtgtgctaaacaactacggaatactaaataaaaagtttggccaaaaccaaccatgaagctgcaaaggtgcttgctcttactctttcaaatttttgcaactctaatgtctcacttttaaaggaacagcttgattgcaaaggagaaaatagataagcaatgaatttatctccaacttcctaaaggcttatgacttctaaaaagtgaatctatcagcattccacatcagatttaaagcatcaaatgcctgtgaaacagcaaagatggttgaagattgtgctcattatgtttgtggagtgctgattgattcacagtagataacgctggcagtaagagaaatcaaatgctaagagttgttgaagcagaaggcggctgattgttggtaagtcagtgcagttgcataagcagtgctgtcagaattggtttggtgcaggcaatagattttgccttcaagggttcctgtggatctcaggaaggcatcagtgttgattaacactcataactagggagtgagtggtagttacttaagtaattgaccaaatggaaaaggggaagtaattaaggaaattggtaagtggaggtagtcaggaggttctcgtggtcctttacacagattttacagctttgggtttcattttgtttagctaaagtcatggggacaactcttcaatttagaacttaagatgaattataaaaatgatggatataagtggtagctctatctggtgaagtgtcttgtcagtaagtgaaacatttttttgtggtggcttatccacaaacagtttagttgtagaataaaacttatgagtgacatctggaaagtaacaaccatgctaagatggcaaacacactggaaacaattgggccacttggctttcttttgctgtattgttttataagcctgctttacctccccgtcttggaaacaagttttagtttattgctttggagactagagccaatagtgtaatgttctcaaaggaaacagacttgagttgttggattagaggaactaactcaacttctaattttttttgttgtaattatggcactgtcatgttttaacatttgcaactagggatagtaagtacaacatttttaactctcatttggcagactactactaatcacagaccacaagggtaatgaccaaatttatgtggttgttacacttccatagttgtcttagccgaatccttccatattcttatgattacttgggttaaagcttctgtgaggaccttttggctcttaagatatcctaaatatttaaaatatttagatatcctaaatataggatatagagtttgtaccaaatatgaatgaatattgttcaaagcaaggagtatgttaaaatgaccagacacctgtttgataaatagtttactgaactagcagacgtgtggaaaaagaatcagatcttgattcttctgggtttatactggttgtaaaacagaatgatattagaaaatgttttccttgtttaagtggtagttgaacatagaacttgggtattatagatcacttttcactttttggaatgttttgtattgaaacttaatacaactttaacatggcaaaaaaaaaaaaaatccaaaatctatgagataattttgttaaagttggcttgcttgggcgggtgcttggtccagagggagaaaagaaggcatgatttcagaatactctggcagctttttaaattcagctttatcaagttacagtaaactgtatctgtttagaattacaactcaatggttattttgacagatgtatatgccatgaagccactgtcaccatcaacatgcagaacacttccatcgcccccaaaagattcctcaagttcctttgcagtccatccctcacgctgctgatttgtctttgtcaccatatattagtttgctttgtggtggtgtttagtattttatataaatgggattgtgtagcatgtacttttttgtttatggtttctttcacacacaatgactttgaaattcaccaggttgcagtgtatcagtagcttattccttttattgctgagtagtgtcccattatgtgaatatgccattatttgtttttctactcacctgttgatggaccttgggattgtttccagtttggggctactgtgaataaaactgttaggaacatttgtgtacaagccactgtgtagacataggttttcctttctcttgggtaaatacctaccagtaaaatggttgggttgcatggcagatttatgtttaataaagtaactgccaaactgtttgttttccaaaggggctatacccttttatattcccaccagggttgtatagagttccaactgccaacactcagttttcagccattctgatgggaatctagtggtatctcattgtggttttattttcatttccccgggtgactaatgctggtaagcatcttttaaggtactttttggccagttgtatattttctgtgaagtggctgtcaaatcttttgcccacttttaattggattgtttgtcttattgagttgtaaaagttctttatatatactgtattaaagtcctttgtaag

SEQ ID NO: 177848 - DNA, 1874 bp, Homo sapiens
  Payload ID: 14894
  Gene Symbol: RBMXL2
  Gene Name: RNA binding motif protein, X-linked-like 2
  Uniprot ID: O75526
  ENST ID: ENST00000306904
  CDS Start-End: 95-1273
gtaggagccgccctcgacgagcgagctcgaaggctgcgactggcgccgcctcaccgcctcccaccgccactgaccgaccgttcgaccggcaaacatggttgaagcggatcgcccggggaagctgttcattgggggcctcaacctcgaaaccgacgagaaagccctcgaagccgagtttggcaagtatggccgcatcgtcgaggtgctcctgatgaaagaccgagaaaccaacaagtcgaggggcttcgcgttcgtcacctttgaaagccccgcagacgccaaggccgccgccagagacatgaacggcaagtccctggatggtaaggccatcaaggtggcccaggccaccaaaccggcgttcgagagcagccggcggggcccgccgcctccccgcagccgcggtcgcccgaggttcctgcgcggaacccgcgggggtggcggcggcccgcggcgttccccatcccggggcgggcccgatgatgacggcggctacacggcggatttcgacctgcggccctccagggccccgatgcccatgaagcgtgggccgccgccgcgcagggtcggcccaccccccaagagggccgcgccgtcgggcccggctcgcagcagcggcggtggaatgcgcgggagggccctggccgtgcgggggcgagacggctactcaggcccaccgcgccgggagccgctgcccccgcgccgcgacccctacctgggcccgcgggatgagggctactcgtccagagacggctactcgagccgagactaccgcgaaccccggggttttgccccctcgcccggagagtacacccaccgcgattacggccactccagtgtccgggacgactgtcccttgagaggctacagcgaccgagacggctacggaggtcgcgaccgtgactacggggatcatctgagcagaggctcccatcgagagccctttgagagctacggagagctgcgcggcgccgccccaggacgggggacaccgccatcttacggaggaggaggccgctacgaggagtaccggggctactcacccgatgcctacagcggcggccgcgacagttacagcagcagttatggccggagcgaccgctactcgaggggccgacaccgggtgggcagaccagatcgtgggctctctctgtccatggaaaggggctgccctccccagcgtgattcttacagccggtcaggctgcagggtgcccaggggcggaggccgtctaggaggccgcttggagagaggaggaggccggagcagatactaagcaggaacagacttgggaccaaaaatcccttttcaacgaaactaacaaaaagaagaacctgttgtatggtaactacccaaggactagtacaaggaagagttgtttttaccttttaagaatttcctgttaagatcgtctccatttttatgcttttgggagaaaaaacttaaaattcgtttagtttagttttggaattgttaacgtttctttcaacaagctcctgttaaaagtatatgaacctgagtactagtcttcttacatttacaagtagaaattcgattaatggcttcttcccttgtaaattttcttgataaatgaggcaaacagttctaagatctttgataaacatctgctcacctaaaatggaaaaacggatcattctgctcatttaaaccaactagattttgggtggagagtgggagggattggtgtatgctactcttaagatttcagggtatctttcaaactgaatctttgtttccagtattaaaaagcaaacaaccagcaacaacaacaacaaaagtgatttagatcaaatgtttatgtaaagaaaattattttcactcagtaaatctgaaaagtaaatggataatgttggcca

SEQ ID NO: 177849 - DNA, 3442 bp, Homo sapiens
  Payload ID: 14895
  Gene Symbol: RBMXL3
  Gene Name: RNA binding motif protein, X-linked-like 3
  Uniprot ID: Q8N7X1
  ENST ID: ENST00000424776
  CDS Start-End: 16-3219
attcggcagggagacatgatggaagcggatcgcccagagaagcttttcattgggggcctcaacctcaaaaccgacgagaaagccctcaaagccgagtttggcaagtatggccacatcatcaaggtgttcctgatgaaagaccgaaaaaccaacaagtcgaggggcttcgcgttcgtcaccttcgaaagccctgcagacgccaaggctgccgccagagatatgaacggcaagtacctggatggtaaggccatcatggtggcccagaccatcaaaccggcattcaagagcagccgatgggtcccgccaacccccggcagcggcagtcgctcaaggttctcacacagaacccgtgggggtggcagcagcccacagcgacccccctctcagggcaggcctgatgacggccgcggctacgcggggtatttcgacctgtggccctacagggccccgatgcccaggaagcgcgggccgccaccgcggcactgggccagcccaccccacaagagggccacgccgtcgagcctggctcacagcgttggctgtggaatgcgcgggaaggcaccgactgtgtcggggcaagatggctactcaggcttgcagccacggcgctgggccggcccaccccacaagagggctgtgccccggtcaagcctggctcgcattggcggcagtggaatgcctgggaaggccccggccgtgtgggggcaagatggctactcaggcccgcgggtccgggagccactgcccccgtgccgcgaccctggggattttgtccctgcgctcagagactacagccgccgctattatggccactccagtgtcccggactaccgtcccttgagaggcgacggcaaccaaaatggctacaggggtcgcgaccatgagtacacagatcatcccagcaaaggctcctaccgagagcccctcaagagctacggaggcccatgcggcgctgcccctgtgtgggggacaccgccatcttatggaggaggatgccgctacgaggagtaccagggcaactcgcccgatgcctgcagtgaaggccgctcgtccgaggccttgccagtcgtcttgccagacgcctacagcagggaccactcgcccaaagcctatagtgggggccgcagcagttccagtaacggttacagccggagtgaccgctacggagaagaaggctgctacgaggagtacagaggccgctcgcccgacgcccacagcgggggccgcaacagttccagcaacagttacggccagagccaccactatggaggagaaggccgctatgaggagtaccgaggccgctcacacgaggcccgcagcgggggccgctccactgatgcccacagcaggggccggtccgacgacgcctacagtgggggccatgacagttccagctggagcgactgctgcggaggaggaggccgttatgaggagtaccaaggccgctcgctggatgccaacagtggaggctgctcgcccgaggcctacagtgggggccacgacaattccagctggagcgaccgctacggagtaggaggccactatgaggagaaccgaggccactctctggatgccaacagcggaggccgttcacccgacacccacagtgggggccacagcagttccagcaacagttacggccagagccaccgctatggaggagaaggccgctatgagtaccgaggccgctcgcatgacgcccacagtgggggctgctctgccgacgcctacagtgggggccacgacagttccagccagagcaaccgctacggaggaggaggctgctacgaggagtaccgaggccgctccctcgatgccaacagtggaggccgctcgcccaatgcctacagcgggggccacgacagttccagctggagccaccgctacggaggaggaggccgctacgaggagtaccgaggccgctcccttgatgccaacagtggaggccgctcgcctgatgcctacagtgggggccacgacagttctggccagagcaactgctacggaggaggaggccgctacgaggagtaccgaggccgcttgctcgatgccaacagtggaggccgctcgcctgatgcctacagtgggggccacgacagttccagccagagcaaccgctatggaggaggcggccgctacgaggagtaccgaggccactcgcttgatgccaacagcggaggccgctcgcctgacacctacagccggggccacgacagttccagccagagcgaccactatggaggaggaggtcgctcactcgatgccaacagcagtggccgcttgcctgacgcctacagtgggggccatgacagttccagccggagccaccgctacggaggaggaggccgctacgaggagtaccgaggccgctcgctcgatgccaacagcggaggccgctcacccaatgcctacagcgggggccacaacagttccagccggaacgacccctgcagaggaggaggccgctacgaggagaaccgaggtcactctctcgatgccaacagcggaggccactcacccaacgcctacagtgggggccgtgacagttccagcaacagttacgaccggagccaccgctatggaggaggaggccactacgaagagtaccgaggccgctcgcacgacacccacagcaggggccgatcgcccgatgcccacagcggggaccactacaccgaagcctacagcaggggccgcgacagtttcagcaacagctatggccggagtgaccattacggaagaggaggctgctacgaggaataccaaggccgctcgcccaatgcctacggcgggggccgcggcctcaacagttccaacaacagtcatggccggagccaccgctacggaggaggaggccgctacgaggagtaccgaggcccctcgcctgacgcccacagtgggggccgcgacagttccatcaagagttacggcctgagcgaccgctacggaggaggaggccactacgaggagtaccagggcagcttgcctgacgcctacagcggcgaccacgacagatccagcaacagttacggccggagcgaccgctactcgaggggtcgagaccgggtaggcagaccggatcgtgggctccctctgcccatggaaacgggcagccctcccctgcatgattcttacagccggtcaggctgcagggtgcccaggggcggaggccgtcaaggaggccgcttcgagaggggggaaggccggagcagatactaagcaggaacagacttgggcccaaaaattccttttcaaagaaacaaaaagaagaacctgttctatgttaactacccaaggactagtataagtaggagttgtttttaccttttaagaatttcctgttaagatctccatttttatgcttttgtgaggaaaaacttaaaattagtttgaaattgttaatgtttctttcaacaagttcttgttaaaagtataagatatg

SEQ ID NO: 177850 - DNA, 1491 bp, Homo sapiens
  Payload ID: 14896
  Gene Symbol: RBMY1A1
  Gene Name: RNA binding motif protein, Y-linked, family 1, member A1
  Uniprot ID: P0DJD3
  ENST ID: ENST00000303902
  CDS Start-End: 66-1445
ggttacgtacggcctgagggccaggcgaacctcaggctctttgtcctactaaaaagcgcagcacaatggtagaagcagatcatcctggcaagcttttcattggtggcctcaatagagaaaccaatgagaagatgcttaaagcagtatttgggaaacatggtcccatatcagaagttcttttgataaaggatcgaaccagcaaatccagaggctttgcatttattacttttgagaaccctgcagatgctaagaatgctgccaaagatatgaatggaaagtctttgcatggaaaagcaataaaagtagaacaagccaagaaaccatcttttcaaagtggtggtaggcggagaccaccagcttcttcgagaaacagaagcccttcaggaagtctgagatctgcaagaggaagccgtggaggaacaagagggtggcttccctcacatgaagggcacctggatgatggtggatacactcctgatctcaagatgagttattctaggggactcattccagttaaaagaggtccatcttcaagaagtggaggtcctcctccgaaaaaatctgctccttctgctgtggcaagaagcaatagttggatgggaagccaaggtcccatgtcacaaagaagagagaattatggagttcctccacgcagagcgacaatatcttcctggagaaatgatcgcatgtcaacaagacatgatggttatgcaactaacgatggaaatcatccaagttgccaagaaacgagggattatgctccaccatctagaggctatgcataccgtgataatggtcattctaatcgggatgaacattcctctagaggatatagaaatcatcgaagttcccgagaaactagggattatgctccaccatctagaggccatgcataccgtgattatggtcattctcgtcgggatgaaagttattctagaggatacagaaatcgtcgaagttcccgagaaactagggagtatgctccaccatctagaggccatggataccgtgattatggtcattctcgtcgacatgaaagttattctagaggatatagttatcatgatggctacggtgaggcccttggtagagatcattctgaacatctaagtggaagttcttatagagatgcacttcagagatacgggacctctcatggtgcaccacctgcaagagggcctcggatgtcttatggtggaagcacctgccacgcatatagtaatacacgagatagatatggcagaagttgggagagttactcgagctgtggtgattttcattattgtgatcgtgagcatgtttgcagaaaagaccaaaggaatccgccttctctgggtagggtgctccctgatcctcgtgaagcatgtggtagctcaagttatgtggcatctatagtagatggtggggagagtcgatctgaaaaaggagactcgagcagatattaaagcaagcattgaaaataatagttattgcataccaatccttgtttgc

SEQ ID NO: 177851 - DNA, 1718 bp, Homo sapiens
  Payload ID: 14896
  Gene Symbol: RBMY1A1
  Gene Name: RNA binding motif protein, Y-linked, family 1, member A1
  ENST ID: ENST00000361046
  CDS Start-End: 128-373
cttccctctcagggaagctccagctgtccctcccgcagttggccctgtggtgttccgaagccggttacgtacggcctgagggccaggcgaacctcaggctctttgtcctactaaaaagcgcagcacaatggtagaagcagatcatcctggcaagcttttcattggtggcctcaatagagaaaccaatgagaagatgcttaaagcagtatttgggaaacatggtcccatatcagaagttcttttgataaaggatcgaaccagcaaatccagaggctttgcatttattacttttgagaaccctgcagatgctaagaatgctgccaaagatatgaatggaaagatgatggtggatacactcctgatctcaagatgagttattctaggggactcattccagttaaaagaggtccatcttcaagaagtggaggtcctcctccgaaaaaatctgctccttctgctgtggcaagaagcaatagttggatgggaagccaaggtcccatgtcacaaagaagagagaattatggagttcctccacgcagagcgacaatatcttcctggagaaatgatcgcatgtcaacaagacatgatggttatgcaactaacgatggaaatcatccaagttgccaagaaacgagggattatgctccaccatctagaggctatgcataccgtgataatggtcattctaatcgggatgaacattcctctagaggatatagaaatcatcgaagttcccgagaaactagggattatgctccaccatctagaggccatgcataccgtgattatggtcattctcgtcgggatgaaagttattctagaggatacagaaatcgtcgaagttcccgagaaactagggagtatgctccaccatctagaggccatggataccgtgattatggtcattctcgtcgacatgaaagttattctagaggatatagaaatcatccaagttcccgagaaaccagggattatgctccaccacatagagactatgcataccgtgattatggtcattctagttgggatgaacattcctctagaggatatagttatcatgatggctacggtgaggcccttggtagagatcattctgaacatctaagtggaagttcttatagagatgcacttcagagatacgggacctctcatggtgcaccacctgcaagagggcctcggatgtcttatggtggaagcacctgccacgcatatagtaatacacgagatagatatggcagaagttgggagagttactcgagctgtggtgattttcattattgtgatcgtgagcatgtttgcagaaaagaccaaaggaatccgccttctctgggtagggtgctccctgatcctcgtgaagcatgtggtagctcaagttatgtggcatctatagtagatggtggggagagtcgatctgaaaaaggagactcgagcagatattaaagcaagcattgaaaataatagttattgcataccaatccttgtttgcaaatcaaaaattgaaatgttatttctgcattgttacctgcatattactgaaagaaacatgttggttttgtggagagaggtagatactaacttcctccatgaattttttgaggtattcaaaggaaaaggaattgttttcaaagtaatttcatacttgttgatgctatttgaaaagtgtttagatgtaatatctaccttaaaattttcacaataaaatttgacatgtactgcaa

SEQ ID NO: 177852 - DNA, 1921 bp, Homo sapiens
  Payload ID: 14896
  Gene Symbol: RBMY1A1
  Gene Name: RNA binding motif protein, Y-linked, family 1, member A1
  Uniprot ID: P0DJD3
  ENST ID: ENST00000382707
  CDS Start-End: 153-1643
atttccgggcacggcttccggcgtccttccctctcagggaagctccagctgtccctcccgcagttggccctgtggtgttccgaagccggttacgtacggcctgagggccaggcgaacctcaggctctttgtcctactaaaaagcgcagcacaatggtagaagcagatcatcctggcaagcttttcattggtggcctcaatagagaaaccaatgagaagatgcttaaagcagtatttgggaaacatggtcccatatcagaagttcttttgataaaggatcgaaccagcaaatccagaggctttgcatttattacttttgagaaccctgcagatgctaagaatgctgccaaagatatgaatggaaagtctttgcatggaaaagcaataaaagtagaacaagccaagaaaccatcttttcaaagtggtggtaggcggagaccaccagcttcttcgagaaacagaagcccttcaggaagtctgagatctgcaagaggaagccgtggaggaacaagagggtggcttccctcacatgaagggcacctggatgatggtggatacactcctgatctcaagatgagttattctaggggactcattccagttaaaagaggtccatcttcaagaagtggaggtcctcctccgaaaaaatctgctccttctgctgtggcaagaagcaatagttggatgggaagccaaggtcccatgtcacaaagaagagagaattatggagttcctccacgcagagcgacaatatcttcctggagaaatgatcgcatgtcaacaagacatgatggttatgcaactaacgatggaaatcatccaagttgccaagaaacgagggattatgctccaccatctagaggctatgcataccgtgataatggtcattctaatcgggatgaacattcctctagaggatatagaaatcatcgaagttcccgagaaactagggattatgctccaccatctagaggccatgcataccgtgattatggtcattctcgtcgggatgaaagttattctagaggatacagaaatcgtcgaagttcccgagaaactagggagtatgctccaccatctagaggccatggataccgtgattatggtcattctcgtcgacatgaaagttattctagaggatatagaaatcatccaagttcccgagaaaccagggattatgctccaccacatagagactatgcataccgtgattatggtcattctagttgggatgaacattcctctagaggatatagttatcatgatggctacggtgaggcccttggtagagatcattctgaacatctaagtggaagttcttatagagatgcacttcagagatacgggacctctcatggtgcaccacctgcaagagggcctcggatgtcttatggtggaagcacctgccacgcatatagtaatacacgagatagatatggcagaagttgggagagttactcgagctgtggtgattttcattattgtgatcgtgagcatgtttgcagaaaagaccaaaggaatccgccttctctgggtagggtgctccctgatcctcgtgaagcatgtggtagctcaagttatgtggcatctatagtagatggtggggagagtcgatctgaaaaaggagactcgagcagatattaaagcaagcattgaaaataatagttattgcataccaatccttgtttgcaaatcaaaaattgaaatgttatttctgcattgttacctgcatattactgaaagaaacatgttggttttgtggagagaggtagatactaacttcctccatgaattttttgaggtattcaaaggaaaaggaattgttttcaaagtaatttcatacttgttgatgctatttgaaaagtgtttagatgtaatatctaccttaaaattttcacaataaaatttgacatgtactgcaa

SEQ ID NO: 177853 - DNA, 1879 bp, Homo sapiens
  Payload ID: 14896
  Gene Symbol: RBMY1A1
  Gene Name: RNA binding motif protein, Y-linked, family 1, member A1
  Uniprot ID: P0DJD3
  ENST ID: ENST00000439108
  CDS Start-End: 119-1609
cagggaagctccagctgtccctcccgcagttggccctgtggtgttccgaagccggttacgtacggcctgagggccaggcgaacctcaggctctttgtcctactaaaaagcgcagcacaatggtagaagcagatcatcctggcaagcttttcattggtggcctcaatagagaaaccaatgagaagatgcttaaagcagtatttgggaaacatggtcccatatcagaagttcttttgataaaggatcgaaccagcaaatccagaggctttgcatttattacttttgagaaccctgcagatgctaagaatgctgccaaagatatgaatggaaagtctttgcatggaaaagcaataaaagtagaacaagccaagaaaccatcttttcaaagtggtggtaggcggagaccaccagcttcttcgagaaacagaagcccttcaggaagtctgagatctgcaagaggaagccgtggaggaacaagagggtggcttccctcacatgaagggcacctggatgatggtggatacactcctgatctcaagatgagttattctaggggactcattccagttaaaagaggtccatcttcaagaagtggaggtcctcctccgaaaaaatctgctccttctgctgtggcaagaagcaatagttggatgggaagccaaggtcccatgtcacaaagaagagagaattatggagttcctccacgcagagcgacaatatcttcctggagaaatgatcgcatgtcaacaagacatgatggttatgcaactaacgatggaaatcatccaagttgccaagaaacgagggattatgctccaccatctagaggctatgcataccgtgataatggtcattctaatcgggatgaacattcctctagaggatatagaaatcatcgaagttcccgagaaactagggattatgctccaccatctagaggccatgcataccgtgattatggtcattctcgtcgggatgaaagttattctagaggatacagaaatcgtcgaagttcccgagaaactagggagtatgctccaccatctagaggccatggataccgtgattatggtcattctcgtcgacatgaaagttattctagaggatatagaaatcatccaagttcccgagaaaccagggattatgctccaccacatagagactatgcataccgtgattatggtcattctagttgggatgaacattcctctagaggatatagttatcatgatggctacggtgaggcccttggtagagatcattctgaacatctaagtggaagttcttatagagatgcacttcagagatacgggacctctcatggtgcaccacctgcaagagggcctcggatgtcttatggtggaagcacctgccacgcatatagtaatacacgagatagatatggcagaagttgggagagttactcgagctgtggtgattttcattattgtgatcgtgagcatgtttgcagaaaagaccaaaggaatccgccttctctgggtagggtgctccctgatcctcgtgaagcatgtggtagctcaagttatgtggcatctatagtagatggtggggagagtcgatctgaaaaaggagactcgagcagatattaaagcaagcattgaaaataatagttattgcataccaatccttgtttgcaaatcaaaaattgaaatgttatttctgcattgttacctgcatattactgaaagaaacatgttggttttgtggagagaggtagatactaacttcctccatgaattttttgaggtattcaaaggaaaaggaattgttttcaaagtaatttcatacttgttgatgctatttgaaaagtgtttagatgtaatatctaccttaaaattttcacaataaaatttgacatg

SEQ ID NO: 177854 - DNA, 1718 bp, Homo sapiens
  Payload ID: 14897
  Gene Symbol: RBMY1B
  Gene Name: RNA binding motif protein, Y-linked, family 1, member B
  ENST ID: ENST00000382639
  CDS Start-End: 128-373
cttccctctcagggaagctccagctgtccctcccgcagttggccctgtggtgttccgaagccggttacgtacggcctgagggccaggcgaacctcaggctctttgtcctactaaaaagcgcagcacaatggtagaagcagatcatcctggcaagcttttcattggtggcctcaatagagaaaccaatgagaagatgcttaaagcagtatttgggaaacatggtcccatatcagaagttcttttgataaaggatcgaaccagcaaatccagaggctttgcatttattacttttgagaaccctgcagatgctaagaatgctgccaaagatatgaatggaaagatgatggtggatacactcctgatctcaagatgagttattctaggggactcattccagttaaaagaggtccatcttcaagaagtggaggtcctcctccgaaaaaatctgctccttctgctgtggcaagaagcaatagttggatgggaagccaaggtcccatgtcacaaagaagagagaattatggagttcctccacgcagagcgacaatatcttcctggagaaatgatcgcatgtcaacaagacatgatggttatgcaactaacgatggaaatcatccaagttgccaagaaacgagggattatgctccaccatctagaggctatgcataccgtgataatggtcattctaatcgggatgaacattcctctagaggatatagaaatcatcgaagttcccgagaaactagggattatgctccaccatctagaggccatgcataccgtgattatggtcattctcgtcgggatgaaagttattctagaggatacagaaatcgtcgaagttcccgagaaactagggagtatgctccaccatctagaggccatggataccgtgattatggtcattctcgtcgacatgaaagttattctagaggatatagaaatcatccaagttcccgagaaaccagggattatgctccaccacatagagactatgcataccgtgattatggtcattctagttgggatgaacattcctctagaggatatagttatcatgatggctacggtgaggcccttggtagagatcattctgaacatctaagtggaagttcttatagagatgcacttcagagatacgggacctctcatggtgcaccacctgcaagagggcctcggatgtcttatggtggaagcacctgccacgcatatagtaatacacgagatagatatggcagaagttgggagagttactcgagctgtggtgattttcattattgtgatcgtgagcatgtttgcagaaaagaccaaaggaatccgccttctctgggtagggtgctccctgatcctcgtgaagcatatggtagctcaagttatgtggcatctatagtagatggtggggagagtcgatctgaaaaaggagactcgagcagatattaaagcaagcattgaaagtaatagttattgcataccaatccttgtttgcaaatcaaaaattgaaatgttatttctgcattgttacctgcatattactgaaagaaacatgttggttttgtggagagaggtagatactaacttcctccatgaattttttgaggtattcaaaggaaaaggaattgttttcaaagtaatttcatacttgttgatgctatttgaaaagtgtttagatgtaatatctaccttaaaattttcacaataaaatttgacatgtactgcaa

SEQ ID NO: 177855 - DNA, 1921 bp, Homo sapiens
  Payload ID: 14897
  Gene Symbol: RBMY1B
  Gene Name: RNA binding motif protein, Y-linked, family 1, member B
  Uniprot ID: A6NDE4
  ENST ID: ENST00000383020
  CDS Start-End: 153-1643
atttccgggcacggcttccggcgtccttccctctcagggaagctccagctgtccctcccgcagttggccctgtggtgttccgaagccggttacgtacggcctgagggccaggcgaacctcaggctctttgtcctactaaaaagcgcagcacaatggtagaagcagatcatcctggcaagcttttcattggtggcctcaatagagaaaccaatgagaagatgcttaaagcagtatttgggaaacatggtcccatatcagaagttcttttgataaaggatcgaaccagcaaatccagaggctttgcatttattacttttgagaaccctgcagatgctaagaatgctgccaaagatatgaatggaaagtctttgcatggaaaagcaataaaagtagaacaagccaagaaaccatcttttcaaagtggtggtaggcggagaccaccagcttcttcgagaaacagaagcccttcaggaagtctgagatctgcaagaggaagccgtggaggaacaagagggtggcttccctcacaagaagggcacctggatgatggtggatacactcctgatctcaagatgagttattctaggggactcattccagttaaaagaggtccatcttcaagaagtggaggtcctcctccgaaaaaatctgctccttctgctgtggcaagaagcaatagttggatgggaagccaaggtcccatgtcacaaagaagagagaattatggagttcctccacgcagagcgacaatatcttcctggagaaatgatcgcatgtcaacaagacatgatggttatgcaactaacgatggaaatcatccaagttgccaagaaacgagggattatgctccaccatctagaggctatgcataccgtgataatggtcattctaatcgggatgaacattcctctagaggatatagaaatcatcgaagttcccgagaaactagggattatgctccaccatctagaggccatgcataccgtgattatggtcattctcgtcgggatgaaagttattctagaggatacagaaatcgtcgaagttcccgagaaactagggagtatgctccaccatctagaggccatggataccgtgattatggtcattctcgtcgacatgaaagttattctagaggatatagaaatcatccaagttcccgagaaaccagggattatgctccaccacatagagactatgcataccgtgattatggtcattctagttgggatgaacattcctctagaggatatagttatcatgatggctacggtgaggcccttggtagagatcattctgaacatctaagtggaagttcttatagagatgcacttcagagatacgggacctctcatggtgcaccacctgcaagagggcctcggatgtcttatggtggaagcacctgccacgcatatagtaatacacgagatagatatggcagaagttgggagagttactcgagctgtggtgattttcattattgtgatcgtgagcatgtttgcagaaaagaccaaaggaatccgccttctctgggtagggtgctccctgatcctcgtgaagcatatggtagctcaagttatgtggcatctatagtagatggtggggagagtcgatctgaaaaaggagactcgagcagatattaaagcaagcattgaaagtaatagttattgcataccaatccttgtttgcaaatcaaaaattgaaatgttatttctgcattgttacctgcatattactgaaagaaacatgttggttttgtggagagaggtagatactaacttcctccatgaattttttgaggtattcaaaggaaaaggaattgttttcaaagtaatttcatacttgttgatgctatttgaaaagtgtttagatgtaatatctaccttaaaattttcacaataaaatttgacatgtactgcaa

SEQ ID NO: 177856 - DNA, 1491 bp, Homo sapiens
  Payload ID: 14897
  Gene Symbol: RBMY1B
  Gene Name: RNA binding motif protein, Y-linked, family 1, member B
  ENST ID: ENST00000619219
  CDS Start-End: 66-1445
ggttacgtacggcctgagggccaggcgaacctcaggctctttgtcctactaaaaagcgcagcacaatggtagaagcagatcatcctggcaagcttttcattggtggcctcaatagagaaaccaatgagaagatgcttaaagcagtatttgggaaacatggtcccatatcagaagttcttttgataaaggatcgaaccagcaaatccagaggctttgcatttattacttttgagaaccctgcagatgctaagaatgctgccaaagatatgaatggaaagtctttgcatggaaaagcaataaaagtagaacaagccaagaaaccatcttttcaaagtggtggtaggcggagaccaccagcttcttcgagaaacagaagcccttcaggaagtctgagatctgcaagaggaagccgtggaggaacaagagggtggcttccctcacaagaagggcacctggatgatggtggatacactcctgatctcaagatgagttattctaggggactcattccagttaaaagaggtccatcttcaagaagtggaggtcctcctccgaaaaaatctgctccttctgctgtggcaagaagcaatagttggatgggaagccaaggtcccatgtcacaaagaagagagaattatggagttcctccacgcagagcgacaatatcttcctggagaaatgatcgcatgtcaacaagacatgatggttatgcaactaacgatggaaatcatccaagttgccaagaaacgagggattatgctccaccatctagaggctatgcataccgtgataatggtcattctaatcgggatgaacattcctctagaggatatagaaatcatcgaagttcccgagaaactagggattatgctccaccatctagaggccatgcataccgtgattatggtcattctcgtcgggatgaaagttattctagaggatacagaaatcgtcgaagttcccgagaaactagggagtatgctccaccatctagaggccatggataccgtgattatggtcattctcgtcgacatgaaagttattctagaggatatagttatcatgatggctacggtgaggcccttggtagagatcattctgaacatctaagtggaagttcttatagagatgcacttcagagatacgggacctctcatggtgcaccacctgcaagagggcctcggatgtcttatggtggaagcacctgccacgcatatagtaatacacgagatagatatggcagaagttgggagagttactcgagctgtggtgattttcattattgtgatcgtgagcatgtttgcagaaaagaccaaaggaatccgccttctctgggtagggtgctccctgatcctcgtgaagcatgtggtagctcaagttatgtggcatctatagtagatggtggggagagtcgatctgaaaaaggagactcgagcagatattaaagcaagcattgaaaataatagttattgcataccaatccttgtttgc

SEQ ID NO: 177857 - DNA, 1718 bp, Homo sapiens
  Payload ID: 14898
  Gene Symbol: RBMY1D
  Gene Name: RNA binding motif protein, Y-linked, family 1, member D
  ENST ID: ENST00000382653
  CDS Start-End: 128-373
cttccctctcagggaagctccagctgtccctcccgcagttggccctgtggtgttccgaagccggttacgtacggcctgagggccaggcgaacctcaggctctttgtcctactaaaaagcgcagcacaatggtagaagcagatcatcctggcaagcttttcattggtggcctcaatagagaaaccaatgagaagatgcttaaagcagtatttgggaaacatggtcccatatcagaagttcttttgataaaggatcgaaccagcaaatccagaggctttgcatttattacttttgagaaccctgcagatgctaagaatgctgccaaagatatgaatggaaagatgatggtggatacactcctgatctcaagatgagttattctaggggactcattccagttaaaagaggtccatcttcaagaagtggaggtcctcctccgaaaaaatctgctccttctgctgtggcaagaagcaatagttggatgggaagccaaggtcccatgtcacaaagaagagagaattatggagttcctccacgcagagcgacaatatcttcctggagaaatgatcgcatgtcaacaagacatgatggttatgcaactaacgatggaaatcatccaagttgccaagaaacgagggattatgctccaccatctagaggctatgcataccgtgataatggtcattctaatcgggatgaacattcctctagaggatatagaaatcatcgaagttcccgagaaactagggattatgctccaccatctagaggccatgcataccgtgattatggtcattctcgtcgggatgaaagttattctagaggatacagaaatcgtcgaagttcccgagaaactagggagtatgctccaccatctagaggccatggataccgtgattatggtcattctcgtcgacatgaaagttattctagaggatatagaaatcatccaagttcccgagaaaccagggattatgctccaccacatagagactatgcataccgtgattatggtcattctagttgggatgaacattcctctagaggatatagttatcatgatggctacggtgaggcccttggtagagatcattctgaacatctaagtggaagttcttatagagatgcacttcagagatacgggacctctcatggtgcaccacctgcaagagggcctcggatgtcctatggtggaagcacctgccacgcatatagtaatacacgagatagatatggcagaagttgggagagttactcgagctgtggtgattttcattattgtgatcgtgagcatgtttgcagaaaagaccaaaggaatccgccttctctgggtagggtgctccctgatcctcgtgaagcatgtggtagctcaagttatgtggcatctatagtagatggtggggagagtcgatctgaaaaaggagactcgagcagatattaaagcaagcattgaaaataatagttattgcataccaatccttgtttgcaaatcaaaaattgaaatgttatttctgcattgttacctgcatattactgaaagaaacatgttggttttgtggagagaggtagatactaacttcctccatgaattttttgaggtattcaaaggaaaaggaattgttttcaaagtaatttcatacttgttgatgctatttgaaaagtgtttagatgtaatatctaccttaaaattttcacaataaaatttgacatgtactgcaa

SEQ ID NO: 177858 - DNA, 1921 bp, Homo sapiens
  Payload ID: 14898
  Gene Symbol: RBMY1D
  Gene Name: RNA binding motif protein, Y-linked, family 1, member D
  Uniprot ID: P0C7P1
  ENST ID: ENST00000382680
  CDS Start-End: 153-1643
atttccgggcacggcttccggcgtccttccctctcagggaagctccagctgtccctcccgcagttggccctgtggtgttccgaagccggttacgtacggcctgagggccaggcgaacctcaggctctttgtcctactaaaaagcgcagcacaatggtagaagcagatcatcctggcaagcttttcattggtggcctcaatagagaaaccaatgagaagatgcttaaagcagtatttgggaaacatggtcccatatcagaagttcttttgataaaggatcgaaccagcaaatccagaggctttgcatttattacttttgagaaccctgcagatgctaagaatgctgccaaagatatgaatggaaagtctttgcatggaaaagcaataaaagtagaacaagccaagaaaccatcttttcaaagtggtggtaggcggagaccaccagcttcttcgagaaacagaagcccttcaggaagtctgagatctgcaagaggaagccgtggaggaacaagagggtggcttccctcacaagaagggcacctggatgatggtggatacactcctgatctcaagatgagttattctaggggactcattccagttaaaagaggtccatcttcaagaagtggaggtcctcctccgaaaaaatctgctccttctgctgtggcaagaagcaatagttggatgggaagccaaggtcccatgtcacaaagaagagagaattatggagttcctccacgcagagcgacaatatcttcctggagaaatgatcgcatgtcaacaagacatgatggttatgcaactaacgatggaaatcatccaagttgccaagaaacgagggattatgctccaccatctagaggctatgcataccgtgataatggtcattctaatcgggatgaacattcctctagaggatatagaaatcatcgaagttcccgagaaactagggattatgctccaccatctagaggccatgcataccgtgattatggtcattctcgtcgggatgaaagttattctagaggatacagaaatcgtcgaagttcccgagaaactagggagtatgctccaccatctagaggccatggataccgtgattatggtcattctcgtcgacatgaaagttattctagaggatatagaaatcatccaagttcccgagaaaccagggattatgctccaccacatagagactatgcataccgtgattatggtcattctagttgggatgaacattcctctagaggatatagttatcatgatggctacggtgaggcccttggtagagatcattctgaacatctaagtggaagttcttatagagatgcacttcagagatacgggacctctcatggtgcaccacctgcaagagggcctcggatgtcctatggtggaagcacctgccacgcatatagtaatacacgagatagatatggcagaagttgggagagttactcgagctgtggtgattttcattattgtgatcgtgagcatgtttgcagaaaagaccaaaggaatccgccttctctgggtagggtgctccctgatcctcgtgaagcatgtggtagctcaagttatgtggcatctatagtagatggtggggagagtcgatctgaaaaaggagactcgagcagatattaaagcaagcattgaaaataatagttattgcataccaatccttgtttgcaaatcaaaaattgaaatgttatttctgcattgttacctgcatattactgaaagaaacatgttggttttgtggagagaggtagatactaacttcctccatgaattttttgaggtattcaaaggaaaaggaattgttttcaaagtaatttcatacttgttgatgctatttgaaaagtgtttagatgtaatatctaccttaaaattttcacaataaaatttgacatgtactgcaa

SEQ ID NO: 177859 - DNA, 1491 bp, Homo sapiens
  Payload ID: 14898
  Gene Symbol: RBMY1D
  Gene Name: RNA binding motif protein, Y-linked, family 1, member D
  Uniprot ID: P0C7P1
  ENST ID: ENST00000418956
  CDS Start-End: 66-1445
ggttacgtacggcctgagggccaggcgaacctcaggctctttgtcctactaaaaagcgcagcacaatggtagaagcagatcatcctggcaagcttttcattggtggcctcaatagagaaaccaatgagaagatgcttaaagcagtatttgggaaacatggtcccatatcagaagttcttttgataaaggatcgaaccagcaaatccagaggctttgcatttattacttttgagaaccctgcagatgctaagaatgctgccaaagatatgaatggaaagtctttgcatggaaaagcaataaaagtagaacaagccaagaaaccatcttttcaaagtggtggtaggcggagaccaccagcttcttcgagaaacagaagcccttcaggaagtctgagatctgcaagaggaagccgtggaggaacaagagggtggcttccctcacaagaagggcacctggatgatggtggatacactcctgatctcaagatgagttattctaggggactcattccagttaaaagaggtccatcttcaagaagtggaggtcctcctccgaaaaaatctgctccttctgctgtggcaagaagcaatagttggatgggaagccaaggtcccatgtcacaaagaagagagaattatggagttcctccacgcagagcgacaatatcttcctggagaaatgatcgcatgtcaacaagacatgatggttatgcaactaacgatggaaatcatccaagttgccaagaaacgagggattatgctccaccatctagaggctatgcataccgtgataatggtcattctaatcgggatgaacattcctctagaggatatagaaatcatcgaagttcccgagaaactagggattatgctccaccatctagaggccatgcataccgtgattatggtcattctcgtcgggatgaaagttattctagaggatacagaaatcgtcgaagttcccgagaaactagggagtatgctccaccatctagaggccatggataccgtgattatggtcattctcgtcgacatgaaagttattctagaggatatagttatcatgatggctacggtgaggcccttggtagagatcattctgaacatctaagtggaagttcttatagagatgcacttcagagatacgggacctctcatggtgcaccacctgcaagagggcctcggatgtcctatggtggaagcacctgccacgcatatagtaatacacgagatagatatggcagaagttgggagagttactcgagctgtggtgattttcattattgtgatcgtgagcatgtttgcagaaaagaccaaaggaatccgccttctctgggtagggtgctccctgatcctcgtgaagcatgtggtagctcaagttatgtggcatctatagtagatggtggggagagtcgatctgaaaaaggagactcgagcagatattaaagcaagcattgaaaataatagttattgcataccaatccttgtttgc

SEQ ID NO: 177860 - DNA, 1718 bp, Homo sapiens
  Payload ID: 14899
  Gene Symbol: RBMY1E
  Gene Name: RNA binding motif protein, Y-linked, family 1, member E
  ENST ID: ENST00000358944
  CDS Start-End: 128-373
cttccctctcagggaagctccagctgtccctcccgcagttggccctgtggtgttccgaagccggttacgtacggcctgagggccaggcgaacctcaggctctttgtcctactaaaaagcgcagcacaatggtagaagcagatcatcctggcaagcttttcattggtggcctcaatagagaaaccaatgagaagatgcttaaagcagtatttgggaaacatggtcccatatcagaagttcttttgataaaggatcgaaccagcaaatccagaggctttgcatttattacttttgagaaccctgcagatgctaagaatgctgccaaagatatgaatggaaagatgatggtggatacactcctgatctcaagatgagttattctaggggactcattccagttaaaagaggtccatcttcaagaagtggaggtcctcctccgaaaaaatctgctccttctgctgtggcaagaagcaatagttggatgggaagccaaggtcccatgtcacaaagaagagagaattatggagttcctccacgcagagcgacaatatcttcctggagaaatgatcgcatgtcaacaagacatgatggttatgcaactaacgatggaaatcatccaagttgccaagaaacgagggattatgctccaccatctagaggctatgcataccgtgataatggtcattctaatcgggatgaacattcctctagaggatatagaaatcatcgaagttcccgagaaactagggattatgctccaccatctagaggccatgcataccgtgattatggtcattctcgtcgggatgaaagttattctagaggatacagaaatcgtcgaagttcccgagaaactagggagtatgctccaccatctagaggccatggataccgtgattatggtcattctcgtcgacatgaaagttattctagaggatatagaaatcatccaagttcccgagaaaccagggattatgctccaccacatagagactatgcataccgtgattatggtcattctagttgggatgaacattcctctagaggatatagttatcatgatggctacggtgaggcccttggtagagatcattctgaacatctaagtggaagttcttatagagatgcacttcagagatacgggaccgctcatggtgcaccacctgcaagagggcctcggatgtcctatggtggaagcacctgccacgcatatagtaatacacgagatagatatggcagaagttgggagagttactcgagctgtggtgattttcattattgtgatcgtgagcatgtttgcagaaaagaccaaaggaatccgccttctctgggtagggtgctccctgatcctcgtgaagcatgtggtagctcaagttatgtggcatctatagtagatggtggggagagtcgatctgaaaaaggagactcgagcagatattaaagcaagcattgaaagtaatagttattgcataccaatccttgtttgcaaatcaaaaattgaaatgttatttctgcattgttacctgcatattactgaaagaaacatgttggttttgtggagagaggtagatactaacttcctccatgaattttttgaggtattcaaaggaaaaggaattgttttcaaagtaatttcatacttgttgatgctatttgaaaagtgtttagatgtaatatctaccttaaaattttcacaataaaatttgacatgtactgcaa

SEQ ID NO: 177861 - DNA, 1773 bp, Homo sapiens
  Payload ID: 14899
  Gene Symbol: RBMY1E
  Gene Name: RNA binding motif protein, Y-linked, family 1, member E
  ENST ID: ENST00000382658
  CDS Start-End: 118-1497
agggaagctccagctgtccctcccgcagttggccctgtggtgttccgaagccggttacgtacggcctgagggccaggcgaacctcaggctctttgtcctactaaaaagcgcagcacaatggtagaagcagatcatcctggcaagcttttcattggtggcctcaatagagaaaccaatgagaagatgcttaaagcagtatttgggaaacatggtcccatatcagaagttcttttgataaaggatcgaaccagcaaatccagaggctttgcatttattacttttgagaaccctgcagatgctaagaatgctgccaaagatatgaatggaaagtctttgcatggaaaagcaataaaagtagaacaagccaagaaaccatcttttcaaagtggtggtaggcggagaccaccagcttcttcgagaaacagaagcccttcaggaagtctgagatctgcaagaggaagccgtggaggaacaagagggtggcttccctcacaagaagggcacctggatgatggtggatacactcctgatctcaagatgagttattctaggggactcattccagttaaaagaggtccatcttcaagaagtggaggtcctcctccgaaaaaatctgctccttctgctgtggcaagaagcaatagttggatgggaagccaaggtcccatgtcacaaagaagagagaattatggagttcctccacgcagagcgacaatatcttcctggagaaatgatcgcatgtcaacaagacatgatggttatgcaactaacgatggaaatcatccaagttgccaagaaacgagggattatgctccaccatctagaggctatgcataccgtgataatggtcattctaatcgggatgaacattcctctagaggatatagaaatcatcgaagttcccgagaaactagggattatgctccaccatctagaggccatgcataccgtgattatggtcattctcgtcgggatgaaagttattctagaggatacagaaatcgtcgaagttcccgagaaactagggagtatgctccaccatctagaggccatggataccgtgattatggtcattctcgtcgacatgaaagttattctagaggatatagttatcatgatggctacggtgaggcccttggtagagatcattctgaacatctaagtggaagttcttatagagatgcacttcagagatacgggaccgctcatggtgcaccacctgcaagagggcctcggatgtcctatggtggaagcacctgccacgcatatagtaatacacgagatagatatggcagaagttgggagagttactcgagctgtggtgattttcattattgtgatcgtgagcatgtttgcagaaaagaccaaaggaatccgccttctctgggtagggtgctccctgatcctcgtgaagcatgtggtagctcaagttatgtggcatctatagtagatggtggggagagtcgatctgaaaaaggagactcgagcagatattaaagcaagcattgaaagtaatagttattgcataccaatccttgtttgcaaatcaaaaattgaaatgttatttctgcattgttacctgcatattactgaaagaaacatgttggttttgtggagagaggtagatactaacttcctccatgaattttttgaggtattcaaaggaaaaggaattgttttcaaagtaatttcatacttgttgatgctatttgaaaagtgtttagatgtaatatctaccttaaaattttcacaataaaatttgacatgtactgc

SEQ ID NO: 177862 - DNA, 1921 bp, Homo sapiens
  Payload ID: 14899
  Gene Symbol: RBMY1E
  Gene Name: RNA binding motif protein, Y-linked, family 1, member E
  Uniprot ID: A6NEQ0
  ENST ID: ENST00000382659
  CDS Start-End: 153-1643
atttccgggcacggcttccggcgtccttccctctcagggaagctccagctgtccctcccgcagttggccctgtggtgttccgaagccggttacgtacggcctgagggccaggcgaacctcaggctctttgtcctactaaaaagcgcagcacaatggtagaagcagatcatcctggcaagcttttcattggtggcctcaatagagaaaccaatgagaagatgcttaaagcagtatttgggaaacatggtcccatatcagaagttcttttgataaaggatcgaaccagcaaatccagaggctttgcatttattacttttgagaaccctgcagatgctaagaatgctgccaaagatatgaatggaaagtctttgcatggaaaagcaataaaagtagaacaagccaagaaaccatcttttcaaagtggtggtaggcggagaccaccagcttcttcgagaaacagaagcccttcaggaagtctgagatctgcaagaggaagccgtggaggaacaagagggtggcttccctcacaagaagggcacctggatgatggtggatacactcctgatctcaagatgagttattctaggggactcattccagttaaaagaggtccatcttcaagaagtggaggtcctcctccgaaaaaatctgctccttctgctgtggcaagaagcaatagttggatgggaagccaaggtcccatgtcacaaagaagagagaattatggagttcctccacgcagagcgacaatatcttcctggagaaatgatcgcatgtcaacaagacatgatggttatgcaactaacgatggaaatcatccaagttgccaagaaacgagggattatgctccaccatctagaggctatgcataccgtgataatggtcattctaatcgggatgaacattcctctagaggatatagaaatcatcgaagttcccgagaaactagggattatgctccaccatctagaggccatgcataccgtgattatggtcattctcgtcgggatgaaagttattctagaggatacagaaatcgtcgaagttcccgagaaactagggagtatgctccaccatctagaggccatggataccgtgattatggtcattctcgtcgacatgaaagttattctagaggatatagaaatcatccaagttcccgagaaaccagggattatgctccaccacatagagactatgcataccgtgattatggtcattctagttgggatgaacattcctctagaggatatagttatcatgatggctacggtgaggcccttggtagagatcattctgaacatctaagtggaagttcttatagagatgcacttcagagatacgggaccgctcatggtgcaccacctgcaagagggcctcggatgtcctatggtggaagcacctgccacgcatatagtaatacacgagatagatatggcagaagttgggagagttactcgagctgtggtgattttcattattgtgatcgtgagcatgtttgcagaaaagaccaaaggaatccgccttctctgggtagggtgctccctgatcctcgtgaagcatgtggtagctcaagttatgtggcatctatagtagatggtggggagagtcgatctgaaaaaggagactcgagcagatattaaagcaagcattgaaagtaatagttattgcataccaatccttgtttgcaaatcaaaaattgaaatgttatttctgcattgttacctgcatattactgaaagaaacatgttggttttgtggagagaggtagatactaacttcctccatgaattttttgaggtattcaaaggaaaaggaattgttttcaaagtaatttcatacttgttgatgctatttgaaaagtgtttagatgtaatatctaccttaaaattttcacaataaaatttgacatgtactgcaa

SEQ ID NO: 177863 - DNA, 1881 bp, Homo sapiens
  Payload ID: 14899
  Gene Symbol: RBMY1E
  Gene Name: RNA binding motif protein, Y-linked, family 1, member E
  ENST ID: ENST00000382673
  CDS Start-End: 113-1603
agctccagctgtccctcccgcagttggccctgtggtgttccgaagccggttacgtacggcctgagggccaggcgaacctcaggctctttgtcctactaaaaagcgcagcacaatggtagaagcagatcatcctggcaagcttttcattggtggcctcaatagagaaaccaatgagaagatgcttaaagcagtatttgggaaacatggtcccatatcagaagttcttttgataaaggatcgaaccagcaaatccagaggctttgcatttattacttttgagaaccctgcagatgctaagaatgctgccaaagatatgaatggaaagtctttgcatggaaaagcaataaaagtagaacaagccaagaaaccatcttttcaaagtggtggtaggcggagaccaccagcttcttcgagaaacagaagcccttcaggaagtctgagatctgcaagaggaagccgtggaggaacaagagggtggcttccctcacaagaagggcacctggatgatggtggatacactcctgatctcaagatgagttattctaggggactcattccagttaaaagaggtccatcttcaagaagtggaggtcctcctccgaaaaaatctgctccttctgctgtggcaagaagcaatagttggatgggaagccaaggtcccatgtcacaaagaagagagaattatggagttcctccacgcagagcgacaatatcttcctggagaaatgatcgcatgtcaacaagacatgatggttatgcaactaacgatggaaatcatccaagttgccaagaaacgagggattatgctccaccatctagaggctatgcataccgtgataatggtcattctaatcgggatgaacattcctctagaggatatagaaatcatcgaagttcccgagaaactagggattatgctccaccatctagaggccatgcataccgtgattatggtcattctcgtcgggatgaaagttattctagaggatacagaaatcgtcgaagttcccgagaaactagggagtatgctccaccatctagaggccatggataccgtgattatggtcattctcgtcgacatgaaagttattctagaggatatagaaatcatccaagttcccgagaaaccagggattatgctccaccacatagagactatgcataccgtgattatggtcattctagttgggatgaacattcctctagaggatatagttatcatgatggctacggtgaggcccttggtagagatcattctgaacatctaagtggaagttcttatagagatgcacttcagagatacgggacctctcatggtgcaccacctgcaagagggcctcggatgtcctatggtggaagcacctgccacgcatatagtaatacacgagatagatatggcagaagttgggagagttactcgagctgtggtgattttcattattgtgatcgtgagcatgtttgcagaaaagaccaaaggaatccgccttctctgggtagggtgctccctgatcctcgtgaagcatgtggtagctcaagttatgtggcatctatagtagatggtggggagagtcgatctgaaaaaggagactcgagcagatattaaagcaagcattgaaaataatagttattgcataccaatccttgtttgcaaatcaaaaattgaaatgttatttctgcattgttacctgcatattactgaaagaaacatgttggttttgtggagagaggtagatactaacttcctccatgaattttttgaggtattcaaaggaaaaggaattgttttcaaagtaatttcatacttgttgatgctatttgaaaagtgtttagatgtaatatctaccttaaaattttcacaataaaatttgacatgtactgcaa

SEQ ID NO: 177864 - DNA, 1887 bp, Homo sapiens
  Payload ID: 14900
  Gene Symbol: RBMY1F
  Gene Name: RNA binding motif protein, Y-linked, family 1, member F
  Uniprot ID: Q15415
  ENST ID: ENST00000303766
  CDS Start-End: 119-1609
cagggtagctccagctgtccctcccgcagttggccctgtggtgttccgaagccggttacgtacggcctgagggccaggcgaacctcaggctctttgtcctactaaaaagcgcagcacaatggtagaagcagatcatcctggcaagcttttcattggtggcctcaatagagaaaccaatgagaagatgcttaaagcagtatttgggaaacatggtcccatatcagaagttcttttgataaaggatcgaaccagcaaatccagaggctttgcatttattacttttgagaaccctgcagatgctaagaatgctgcgaaagatatgaatggaacgtctttgcatggaaaagcaataaaagtagaacaagccaagaaaccatcttttcaaagtggtggtaggcggagaccaccagcttcttcgagaaacagaagcccttcaggaagtctgagatctgcaagaggaagcagtggaggaacaagagggtggcttccctcacatgaagggcacctggatgatggtggatacactcctgatctcaagatgagttattctaggggactcattccagttaaaagaggtccatcttcaagaagtggaggtcctcctccgaaaaaatctgctccttctgctgtggcaagaagcaatagttggatgggaagccaaggtcccatgtcacaaagaagagagaattatggagttcctccacgcagagcgacaatatcttcctggagaaatgatcgcatgtcaacaagacatgatggttatgcaactaacgatggaaatcatccaagttgccaagaaacgagggattatgctccaccatctagaggctatgcataccgtgataatggtcattctaatcgggatgaacattcctctagaggatatagaaatcatcgaagttcccgagaaactagggattatgctccaccatctagaggccatgcataccgtgattatggtcattctcgtcgggatgaaagttattctagaggatacagaaatcatcgaagttcccgagaaactagggagtatgctccaccatctagaggccatggataccgtgattatggtcattctcgtcgacatgaaagttattctagaggatatagaaatcatccaagttcccgagaaaccagggattatgctccaccacatagagactatgcataccgtgattatggtcattctagttgggatgaacattcctctagaggatatagttatcatgatggctacggtgaggcccttggtagagatcattctgaacatctaagtggaagttcttatagagatgcacttcagaggtacgggacctctcatggtgcaccacctgcaagagggcctcggatgtcttatggtggaagcacctgccacgcatatagtaatacacgagatagatatggcagaagttgggagagttactcgagctgtggtgattttcattattgtgatcgtgagcatgtttgcagaaaagaccaaaggaatccgccttctctgggtagggtgctccctgatcctcgtgaagcatatggtagctcaagttatgtggcatctatagtagatggtggggagagtcgatctgaaaaaggagactcgagcagatattaaagcaagcattgaaaataatagttattgcataccaatccttgtttgcaaatcaaaaattgaaatgttatttctgcattgttacctgcatattactgaaagaaacatgttggttttgtggagagaggtagatactaacttcctccatgaattttttgaggtattcaaaggaaaaggaattgttttcaaagtaatttcatacttgttgatgctatttgaaaagtgtttagatgtaatatctaccttaaaattttcacaataaaattttacatgtactgcaa

SEQ ID NO: 177865 - DNA, 1810 bp, Homo sapiens
  Payload ID: 14900
  Gene Symbol: RBMY1F
  Gene Name: RNA binding motif protein, Y-linked, family 1, member F
  ENST ID: ENST00000454978
  CDS Start-End: 153-1532
atttccgggcacggcttccggcgtccttccctctcagggtagctccagctgtccctcccgcagttggccctgtggtgttccgaagccggttacgtacggcctgagggccaggcgaacctcaggctctttgtcctactaaaaagcgcagcacaatggtagaagcagatcatcctggcaagcttttcattggtggcctcaatagagaaaccaatgagaagatgcttaaagcagtatttgggaaacatggtcccatatcagaagttcttttgataaaggatcgaaccagcaaatccagaggctttgcatttattacttttgagaaccctgcagatgctaagaatgctgcgaaagatatgaatggaacgtctttgcatggaaaagcaataaaagtagaacaagccaagaaaccatcttttcaaagtggtggtaggcggagaccaccagcttcttcgagaaacagaagcccttcaggaagtctgagatctgcaagaggaagcagtggaggaacaagagggtggcttccctcacatgaagggcacctggatgatggtggatacactcctgatctcaagatgagttattctaggggactcattccagttaaaagaggtccatcttcaagaagtggaggtcctcctccgaaaaaatctgctccttctgctgtggcaagaagcaatagttggatgggaagccaaggtcccatgtcacaaagaagagagaattatggagttcctccacgcagagcgacaatatcttcctggagaaatgatcgcatgtcaacaagacatgatggttatgcaactaacgatggaaatcatccaagttgccaagaaacgagggattatgctccaccatctagaggctatgcataccgtgataatggtcattctaatcgggatgaacattcctctagaggatatagaaatcatcgaagttcccgagaaactagggattatgctccaccatctagaggccatgcataccgtgattatggtcattctcgtcgggatgaaagttattctagaggatacagaaatcatcgaagttcccgagaaactagggagtatgctccaccatctagaggccatggataccgtgattatggtcattctcgtcgacatgaaagttattctagaggatatagttatcatgatggctacggtgaggcccttggtagagatcattctgaacatctaagtggaagttcttatagagatgcacttcagaggtacgggacctctcatggtgcaccacctgcaagagggcctcggatgtcttatggtggaagcacctgccacgcatatagtaatacacgagatagatatggcagaagttgggagagttactcgagctgtggtgattttcattattgtgatcgtgagcatgtttgcagaaaagaccaaaggaatccgccttctctgggtagggtgctccctgatcctcgtgaagcatatggtagctcaagttatgtggcatctatagtagatggtggggagagtcgatctgaaaaaggagactcgagcagatattaaagcaagcattgaaaataatagttattgcataccaatccttgtttgcaaatcaaaaattgaaatgttatttctgcattgttacctgcatattactgaaagaaacatgttggttttgtggagagaggtagatactaacttcctccatgaattttttgaggtattcaaaggaaaaggaattgttttcaaagtaatttcatacttgttgatgctatttgaaaagtgtttagatgtaatatctaccttaaaattttcacaataaaattttacatgtactgcaa

SEQ ID NO: 177866 - DNA, 1886 bp, Homo sapiens
  Payload ID: 14901
  Gene Symbol: RBMY1J
  Gene Name: RNA binding motif protein, Y-linked, family 1, member J
  Uniprot ID: Q15415
  ENST ID: ENST00000250831
  CDS Start-End: 118-1608
cagggtagctccagctgtccctcccgcagttggccctgtggtgttccgaagccggttacgtacgcctgagggccaggcgaacctcaggctctttgtcctactaaaaagcgcagcacaatggtagaagcagatcatcctggcaagcttttcattggtggcctcaatagagaaaccaatgagaagatgcttaaagcagtatttgggaaacatggtcccatatcagaagttcttttgataaaggatcgaaccagcaaatccagaggctttgcatttattacttttgagaaccctgcagatgctaagaatgctgcgaaagatatgaatggaacgtctttgcatggaaaagcaataaaagtagaacaagccaagaaaccatcttttcaaagtggtggtaggcggagaccaccagcttcttcgagaaacagaagcccttcaggaagtctgagatctgcaagaggaagcagtggaggaacaagagggtggcttccctcacatgaagggcacctggatgatggtggatacactcctgatctcaagatgagttattctaggggactcattccagttaaaagaggtccatcttcaagaagtggaggtcctcctccgaaaaaatctgctccttctgctgtggcaagaagcaatagttggatgggaagccaaggtcccatgtcacaaagaagagagaattatggagttcctccacgcagagcgacaatatcttcctggagaaatgatcgcatgtcaacaagacatgatggttatgcaactaacgatggaaatcatccaagttgccaagaaacgagggattatgctccaccatctagaggctatgcataccgtgataatggtcattctaatcgggatgaacattcctctagaggatatagaaatcatcgaagttcccgagaaactagggattatgctccaccatctagaggccatgcataccgtgattatggtcattctcgtcgggatgaaagttattctagaggatacagaaatcatcgaagttcccgagaaactagggagtatgctccaccatctagaggccatggataccgtgattatggtcattctcgtcgacatgaaagttattctagaggatatagaaatcatccaagttcccgagaaaccagggattatgctccaccacatagagactatgcataccgtgattatggtcattctagttgggatgaacattcctctagaggatatagttatcatgatggctacggtgaggcccttggtagagatcattctgaacatctaagtggaagttcttatagagatgcacttcagagatacgggacctctcatggtgcaccacctgcaagagggcctcggatgtcttatggtggaagcacctgccacgcatatagtaatacacgagatagatatggcagaagttgggagagttactcgagctgtggtgattttcattattgtgatcgtgagcatgtttgcagaaaagaccaaaggaatccgccttctctgggtagggtgctccctgatcctcgtgaagcatatggtagctcaagttatgtggcatctatagtagatggtggggagagtcgatctgaaaaaggagactcgagcagatattaaagcaagcattgaaaataatagttattgcataccaatccttgtttgcaaatcaaaaattgaaatgttatttctgcattgttacctgcatattactgaaagaaacatgttggttttgtggagagaggtagatactaacttcctccatgaattttttgaggtattcaaaggaaaaggaattgttttcaaagtaatttcatacttgttgatgctatttgaaaagtgtttagatgtaatatctaccttaaaattttcacaataaaattttacatgtactgcaa

SEQ ID NO: 177867 - DNA, 1810 bp, Homo sapiens
  Payload ID: 14901
  Gene Symbol: RBMY1J
  Gene Name: RNA binding motif protein, Y-linked, family 1, member J
  ENST ID: ENST00000445779
  CDS Start-End: 153-1532
atttccgggcacggcttccggcgtccttccctctcagggtagctccagctgtccctcccgcagttggccctgtggtgttccgaagccggttacgtacggcctgagggccaggcgaacctcaggctctttgtcctactaaaaagcgcagcacaatggtagaagcagatcatcctggcaagcttttcattggtggcctcaatagagaaaccaatgagaagatgcttaaagcagtatttgggaaacatggtcccatatcagaagttcttttgataaaggatcgaaccagcaaatccagaggctttgcatttattacttttgagaaccctgcagatgctaagaatgctgcgaaagatatgaatggaacgtctttgcatggaaaagcaataaaagtagaacaagccaagaaaccatcttttcaaagtggtggtaggcggagaccaccagcttcttcgagaaacagaagcccttcaggaagtctgagatctgcaagaggaagcagtggaggaacaagagggtggcttccctcacatgaagggcacctggatgatggtggatacactcctgatctcaagatgagttattctaggggactcattccagttaaaagaggtccatcttcaagaagtggaggtcctcctccgaaaaaatctgctccttctgctgtggcaagaagcaatagttggatgggaagccaaggtcccatgtcacaaagaagagagaattatggagttcctccacgcagagcgacaatatcttcctggagaaatgatcgcatgtcaacaagacatgatggttatgcaactaacgatggaaatcatccaagttgccaagaaacgagggattatgctccaccatctagaggctatgcataccgtgataatggtcattctaatcgggatgaacattcctctagaggatatagaaatcatcgaagttcccgagaaactagggattatgctccaccatctagaggccatgcataccgtgattatggtcattctcgtcgggatgaaagttattctagaggatacagaaatcatcgaagttcccgagaaactagggagtatgctccaccatctagaggccatggataccgtgattatggtcattctcgtcgacatgaaagttattctagaggatatagttatcatgatggctacggtgaggcccttggtagagatcattctgaacatctaagtggaagttcttatagagatgcacttcagagatacgggacctctcatggtgcaccacctgcaagagggcctcggatgtcttatggtggaagcacctgccacgcatatagtaatacacgagatagatatggcagaagttgggagagttactcgagctgtggtgattttcattattgtgatcgtgagcatgtttgcagaaaagaccaaaggaatccgccttctctgggtagggtgctccctgatcctcgtgaagcatatggtagctcaagttatgtggcatctatagtagatggtggggagagtcgatctgaaaaaggagactcgagcagatattaaagcaagcattgaaaataatagttattgcataccaatccttgtttgcaaatcaaaaattgaaatgttatttctgcattgttacctgcatattactgaaagaaacatgttggttttgtggagagaggtagatactaacttcctccatgaattttttgaggtattcaaaggaaaaggaattgttttcaaagtaatttcatacttgttgatgctatttgaaaagtgtttagatgtaatatctaccttaaaattttcacaataaaattttacatgtactgcaa

SEQ ID NO: 177868 - DNA, 1921 bp, Homo sapiens
  Payload ID: 14901
  Gene Symbol: RBMY1J
  Gene Name: RNA binding motif protein, Y-linked, family 1, member J
  Uniprot ID: Q15415
  ENST ID: ENST00000414629
  CDS Start-End: 153-1643
atttccgggcacggcttccggcgtccttccctctcagggtagctccagctgtccctcccgcagttggccctgtggtgttccgaagccggttacgtacggcctgagggccaggcgaacctcaggctctttgtcctactaaaaagcgcagcacaatggtagaagcagatcatcctggcaagcttttcattggtggcctcaatagagaaaccaatgagaagatgcttaaagcagtatttgggaaacatggtcccatatcagaagttcttttgataaaggatcgaaccagcaaatccagaggctttgcatttattacttttgagaaccctgcagatgctaagaatgctgcgaaagatatgaatggaacgtctttgcatggaaaagcaataaaagtagaacaagccaagaaaccatcttttcaaagtggtggtaggcggagaccaccagcttcttcgagaaacagaagcccttcaggaagtctgagatctgcaagaggaagcagtggaggaacaagagggtggcttccctcacatgaagggcacctggatgatggtggatacactcctgatctcaagatgagttattctaggggactcattccagttaaaagaggtccatcttcaagaagtggaggtcctcctccgaaaaaatctgctccttctgctgtggcaagaagcaatagttggatgggaagccaaggtcccatgtcacaaagaagagagaattatggagttcctccacgcagagcgacaatatcttcctggagaaatgatcgcatgtcaacaagacatgatggttatgcaactaacgatggaaatcatccaagttgccaagaaacgagggattatgctccaccatctagaggctatgcataccgtgataatggtcattctaatcgggatgaacattcctctagaggatatagaaatcatcgaagttcccgagaaactagggattatgctccaccatctagaggccatgcataccgtgattatggtcattctcgtcgggatgaaagttattctagaggatacagaaatcatcgaagttcccgagaaactagggagtatgctccaccatctagaggccatggataccgtgattatggtcattctcgtcgacatgaaagttattctagaggatatagaaatcatccaagttcccgagaaaccagggattatgctccaccacatagagactatgcataccgtgattatggtcattctagttgggatgaacattcctctagaggatatagttatcatgatggctacggtgaggcccttggtagagatcattctgaacatctaagtggaagttcttatagagatgcacttcagagatacgggacctctcatggtgcaccacctgcaagagggcctcggatgtcttatggtggaagcacctgccacgcatatagtaatacacgagatagatatggcagaagttgggagagttactcgagctgtggtgattttcattattgtgatcgtgagcatgtttgcagaaaagaccaaaggaatccgccttctctgggtagggtgctccctgatcctcgtgaagcatatggtagctcaagttatgtggcatctatagtagatggtggggagagtcgatctgaaaaaggagactcgagcagatattaaagcaagcattgaaaataatagttattgcataccaatccttgtttgcaaatcaaaaattgaaatgttatttctgcattgttacctgcatattactgaaagaaacatgttggttttgtggagagaggtagatactaacttcctccatgaattttttgaggtattcaaaggaaaaggaattgttttcaaagtaatttcatacttgttgatgctatttgaaaagtgtttagatgtaatatctaccttaaaattttcacaataaaattttacatgtactgcaa

SEQ ID NO: 177869 - DNA, 4273 bp, Homo sapiens
  Payload ID: 14902
  Gene Symbol: RBMS1
  Gene Name: RNA binding motif, single stranded interacting protein 1
  Uniprot ID: P29558
  ENST ID: ENST00000348849
  CDS Start-End: 432-1652
caccaagcgcagccgccgctgccgcactttccacttgtattgatcacctctcagccccgcgcagccggctcgcccgagcggaccgcggccagcgcgccagcccttggcagccccggagcagtcgggctccgggaggaaactccttgggagcgccctgtccggggtgccctctgcgctctgcagtgtctttctttctgcctgggaggaggaggaggaggaggaagaggaggaggaggaggaggaggaggaggaagaggaggaggaggaggaggacgtctggtcccggctgggaggtggagcagcggcagcagcagcagccgccgccgccgccgccgctgccgccgccgccggaaagggagaggcaggagagcccgagacttggaaaccccaaagtgtccgcgaccctgcacggcaggctcccttccagcttcatgggcaaagtgtggaaacagcagatgtaccctcagtacgccacctactattacccccagtatctgcaagccaagcagtctctggtcccagcccaccccatggcccctcccagtcccagcaccaccagcagtaataacaacagtagcagcagtagcaactcaggatgggatcagctcagcaaaacgaacctctatatccgaggactgcctccccacaccaccgaccaggacctggtgaagctctgtcaaccatatgggaaaatagtctccacaaaggcaattttggataagacaacgaacaaatgcaaaggttatggttttgtcgactttgacagccctgcagcagctcaaaaagctgtgtctgccctgaaggccagtggggttcaagctcaaatggcaaagcaacaggaacaagatcctaccaacctctacatttctaatttgccactctccatggatgagcaagaactagaaaatatgctcaaaccatttggacaagttatttctacaaggatactacgtgattccagtggtacaagtcgtggtgttggctttgctaggatggaatcaacagaaaaatgtgaagctgttattggtcattttaatggaaaatttattaagacaccaccaggagtttctgcccccacagaacctttattgtgtaagtttgctgatggaggacagaaaaagagacagaacccaaacaaatacatccctaatggaagaccatggcatagagaaggagaggtgagacttgctggaatgacacttacttacgacccaactacagctgctatacagaacggattttatccttcaccatacagtattgctacaaaccgaatgatcactcaaacttctattacaccctatattgcatctcctgtatctgcctaccaggtgcaaagtccttcgtggatgcaacctcaaccatatattctacagcaccctggtgccgtgttaactccctcaatggagcacaccatgtcactacagcccgcatcaatgatcagccctctggcccagcagatgagtcatctgtcactaggcagcaccggaacatacatgcctgcaacgtcagctatgcaaggagcctacttgccacagtatgcacatatgcagacgacagcggttcctgttgaggaggcaagtggtcaacagcaggtggctgtcgagacgtctaatgaccattctccatatacctttcaacctaataagtaactgtgagatgtacagaaaggtgttcttacatgaagaagggtgtgaaggctgaacaatcatggatttttctgatcaattgtgctttaggaaattattgacagttttgcacaggttcttgaaaacgttatttataatgaaatcaactaaaactatttttgctataagttctataaggtgcataaaacccttaaattcatctagtagctgttcccccgaacaggtttattttagtaaaaaaaaaaaaacaaaaaacaaaaacaaaagatttttatcaaatgttatgatgcaaaaaaagaaaaagaaaaaaaaaaagaaaagaaaacttcaattttctgggtatgcacaaagaccatgaagacttatccaagtgcatgaccggatttttgtggttttgttcattttgtgtttaatttgtgttttttttttccagctgtatgaaatgggctttctgaagtttaaatagtccgacttcacccatggtgttctgtgcttgcagtgcgagtgttgctgtaattcagtgttgccgtcagtgtctcttttcttagctttctgtctttctttcaacgtagtgtgaagtgtcttatccttttctatgaattccaatttgccttaactcttttgatgctgtagctgtttcagtaaaagttagttcaaactaatgatgtagaatgctttgaccaaatgagctggtctattatgccttgtaaaacagcagcatagggcttttaaaaggtagtcaataaaagttgctgaaattttggcttttttaaatatgtagtaggtgtttttaatgatttttcacataatgtgtaaggtagtgaaatgcaagaagggaaaaatgttttgtgtgaaacacattttctgactggggaacttttattagggtaaattgtttgtaaggctgtacgccaacagtttcctctgatagtttgactgatttaggatatctgctgtatgatgcaatgtaaagtcttttttgccttttttcaggaaaaaaaaaaagctaacttgatgtactagatttagtgtaggtagtgttggggttggggatgggggtgggggaggggagtcactgaatgttttgtccttcctttatactaatgatagtgctttagaatgagaattatgcctgaaatctggcaaaccgaaaaatgttgctattgcaacaaagtggcaaaagctaaaagtaaggatttatcttcaaacataagctgagataacgaatagaagcaaaacgattggctactagctctctctctctctctctattaggtaaatttgaaaaataaaaatgacttggcacttttaaaggtaacttcaccaaagaccgaagagccagtaaccagtagctccaacttgtctcagcatcacatcttctgtgctctttatttttgccggaccagtttgcggttaggagaatgtgccttttttgtacctttgcatttaggttttataattttaattgatgtatggacacacacaaacaaaaaagcatgaaggaagatttggatccaagcagtgccacactttacatcatcactacaagtgttcaagtgtaaagaaaaccaattttgaaactatgaaattcctgattcataaatacacagttatttctactttagtacatataagataattcactgttattaaagctcttttattaaggcaattgcatatgttttaaaagcaatggtaaattaagttgtcttccaaaactgtgtacttgtctggtcagctgtgtatgatcagttatctacctcagagtctattttcttttgtgctgggacaggttgctggccctccctgtttccacagaccaaatcctcctagctcaggagctagggctaagcagttatttctttcaagtattttttagttcttaaattttatgcttgtatttgatgatagatgtcagtgacatttcatagtttcaaaagtccttgctgctctgagaagtgtagattctagtgaaaattacatagtcataagagaaatgtgtttttgtttttgtttttgtttcatttttttaaagttgtggtattattggttctatgctccctggaatattactgctttgtgaaagtccagactgaacgcagcaccctctgtgtacctagtacagttataaacctgggtctctcactacttgatatttttgcattagttaagacagaaatttgatagctcggttagaggggaggggaaatctgctgctagaaatgtctgaactaagtgccatactcgtctgggtaagatttgggaaacataacctctgtacataaaaaaaaaaaaatcagttaaacatcacatagtagacagccattaaattataaaaaaattaatttatgaagaaagaccttttgtacagattgaaaaaaaaagattttcatagagatatctatatgatcaagagagttaattttttatttttgttttactagtgccacagacttgccagtggtaacttatttgtccggttcaagataactctgtagttttctttcctaggacttgttgttaaacgccaaaagacatttttgaactgtacatttgatcagattgttagcttttctgttttatttcttttgagaacctttgaataaaaaacatctgaaatttta

SEQ ID NO: 177870 - DNA, 3781 bp, Homo sapiens
  Payload ID: 14902
  Gene Symbol: RBMS1
  Gene Name: RNA binding motif, single stranded interacting protein 1
  ENST ID: ENST00000392753
  CDS Start-End: 1-1161
tttttaaagtgtaaacagtctctggtcccagcccaccccatggcccctcccagtcccagcaccaccagcagtaataacaacagtagcagcagtagcaactcaggatgggatcagctcagcaaaacgaacctctatatccgaggactgcctccccacaccaccgaccaggacctggtgaagctctgtcaaccatatgggaaaatagtctccacaaaggcaattttggataagacaacgaacaaatgcaaaggttatggttttgtcgactttgacagccctgcagcagctcaaaaagctgtgtctgccctgaaggccagtggggttcaagctcaaatggcaaagcaacaggaacaagatcctaccaacctctacatttctaatttgccactctccatggatgagcaagaactagaaaatatgctcaaaccatttggacaagttatttctacaaggatactacgtgattccagtggtacaagtcgtggtgttggctttgctaggatggaatcaacagaaaaatgtgaagctgttattggtcattttaatggaaaatttattaagacaccaccaggagtttctgcccccacagaacctttattgtgtaagtttgctgatggaggacagaaaaagagacagaacccaaacaaatacatccctaatggaagaccatggcatagagaaggagaggtgagacttgctggaatgacacttacttacgacccaactacagctgctatacagaacggattttatccttcaccatacagtattgctacaaaccgaatgatcactcaaacttctattacaccctatattgcatctcctgtatctgcctaccaggtgcaaagtccttcgtggatgcaacctcaaccatatattctacagcaccctggtgccgtgttaactccctcaatggagcacaccatgtcactacagcccgcatcaatgatcagccctctggcccagcagatgagtcatctgtcactaggcagcaccggaacatacatgcctgcaacgtcagctatgcaaggagcctacttgccacagtatgcacatatgcagacgacagcggttcctgttgaggaggcaagtggtcaacagcaggtggctgtcgagacgtctaatgaccattctccatatacctttcaacctaataagtaactgtgagatgtacagaaaggtgttcttacatgaagaagggtgtgaaggctgaacaatcatggatttttctgatcaattgtgctttaggaaattattgacagttttgcacaggttcttgaaaacgttatttataatgaaatcaactaaaactatttttgctataagttctataaggtgcataaaacccttaaattcatctagtagctgttcccccgaacaggtttattttagtaaaaaaaaaaaaacaaaaaacaaaaacaaaagatttttatcaaatgttatgatgcaaaaaaagaaaaagaaaaaaaaaaagaaaagaaaacttcaattttctgggtatgcacaaagaccatgaagacttatccaagtgcatgaccggatttttgtggttttgttcattttgtgtttaatttgtgttttttttttccagctgtatgaaatgggctttctgaagtttaaatagtccgacttcacccatggtgttctgtgcttgcagtgcgagtgttgctgtaattcagtgttgccgtcagtgtctcttttcttagctttctgtctttctttcaacgtagtgtgaagtgtcttatccttttctatgaattccaatttgccttaactcttttgatgctgtagctgtttcagtaaaagttagttcaaactaatgatgtagaatgctttgaccaaatgagctggtctattatgccttgtaaaacagcagcatagggcttttaaaaggtagtcaataaaagttgctgaaattttggcttttttaaatatgtagtaggtgtttttaatgatttttcacataatgtgtaaggtagtgaaatgcaagaagggaaaaatgttttgtgtgaaacacattttctgactggggaacttttattagggtaaattgtttgtaaggctgtacgccaacagtttcctctgatagtttgactgatttaggatatctgctgtatgatgcaatgtaaagtcttttttgccttttttcaggaaaaaaaaaaagctaacttgatgtactagatttagtgtaggtagtgttggggttggggatgggggtgggggaggggagtcactgaatgttttgtccttcctttatactaatgatagtgctttagaatgagaattatgcctgaaatctggcaaaccgaaaaatgttgctattgcaacaaagtggcaaaagctaaaagtaaggatttatcttcaaacataagctgagataacgaatagaagcaaaacgattggctactagctctctctctctctctctattaggtaaatttgaaaaataaaaatgacttggcacttttaaaggtaacttcaccaaagaccgaagagccagtaaccagtagctccaacttgtctcagcatcacatcttctgtgctctttatttttgccggaccagtttgcggttaggagaatgtgccttttttgtacctttgcatttaggttttataattttaattgatgtatggacacacacaaacaaaaaagcatgaaggaagatttggatccaagcagtgccacactttacatcatcactacaagtgttcaagtgtaaagaaaaccaattttgaaactatgaaattcctgattcataaatacacagttatttctactttagtacatataagataattcactgttattaaagctcttttattaaggcaattgcatatgttttaaaagcaatggtaaattaagttgtcttccaaaactgtgtacttgtctggtcagctgtgtatgatcagttatctacctcagagtctattttcttttgtgctgggacaggttgctggccctccctgtttccacagaccaaatcctcctagctcaggagctagggctaagcagttatttctttcaagtattttttagttcttaaattttatgcttgtatttgatgatagatgtcagtgacatttcatagtttcaaaagtccttgctgctctgagaagtgtagattctagtgaaaattacatagtcataagagaaatgtgtttttgtttttgtttttgtttcatttttttaaagttgtggtattattggttctatgctccctggaatattactgctttgtgaaagtccagactgaacgcagcaccctctgtgtacctagtacagttataaacctgggtctctcactacttgatatttttgcattagttaagacagaaatttgatagctcggttagaggggaggggaaatctgctgctagaaatgtctgaactaagtgccatactcgtctgggtaagatttgggaaacataacctctgtacataaaaaaaaaaaaatcagttaaacatcacatagtagacagccattaaattataaaaaaattaatttatgaagaaagaccttttgtacagattgaaaaaaaaagattttcatagagatatctatatgatcaagagagttaattttttatttttgttttactagtgccacagacttgccagtggtaacttatttgtccggttcaagataactctgtagttttctttcctaggacttgttgttaaacgccaaaagacatttttgaactgtacatttgatcagattgttagcttttctgttttatttcttttgagaacctttgaataaaaaacatctgaaatttt

SEQ ID NO: 177871 - DNA, 1550 bp, Homo sapiens
  Payload ID: 14902
  Gene Symbol: RBMS1
  Gene Name: RNA binding motif, single stranded interacting protein 1
  ENST ID: ENST00000409075
  CDS Start-End: 126-1238
ggaaggattacactgttccaggttttagggagaaaggtttaccaaaccggtggccttaaatgattttcgctccttgatattatcatcttgaaggaaagctgcagtctctggtcccagcccaccccatggcccctcccagtcccagcaccaccagcagtaataacaacagtagcagcagtagcaactcaggatgggatcagctcagcaaaacgaacctctatatccgaggactgcctccccacaccaccgaccaggacctggtgaagctctgtcaaccatatgggaaaatagtctccacaaaggcaattttggataagacaacgaacaaatgcaaaggttatggttttgtcgactttgacagccctgcagcagctcaaaaagctgtgtctgccctgaaggccagtggggttcaagctcaaatggcaaagcaacaggaacaagatcctaccaacctctacatttctaatttgccactctccatggatgagcaagaactagaaaatatgctcaaaccatttggacaagttatttctacaaggatactacgtgattccagtggtacaagtcgtggtgttggctttgctaggatggaatcaacagaaaaatgtgaagctgttattggtcattttaatggaaaatttattaagacaccaccaggagtttctgcccccacagaacctttattgtgtaagtttgctgatggaggacagaaaaagagacagaacccaaacaaatacatccctaatggaagaccatggcatagagaaggagaggctggaatgacacttacttacgacccaactacagctgctatacagaacggattttatccttcaccatacagtattgctacaaaccgaatgatcactcaaacttctattacaccctatattgcatctcctgtatctgcctaccaggtgcaaagtccttcgtggatgcaacctcaaccatatattctacagcaccctggtgccgtgttaactccctcaatggagcacaccatgtcactacagcccgcatcaatgatcagccctctggcccagcagatgagtcatctgtcactaggcagcaccggaacatacatgcctgcaacgtcagctatgcaaggagcctacttgccacagtatgcacatatgcagacgacagcggttcctgttgaggaggcaagtggtcaacagcaggtggctgtcgagacgtctaatgaccattctccatatacctttcaacctaataagtaactgtgagatgtacagaaaggtgttcttacatgaagaagggtgtgaaggctgaacaatcatggatttttctgatcaattgtgctttaggaaattattgacagttttgcacaggttcttgaaaacgttatttataatgaaatcaactaaaactatttttgctataagttctataaggtgcataaaacccttaaattcatctagtagctgttcccccgaacaggtttattttagtaaaaaaaaaaaaacaaaaaacaaaaacaaaagatttttatcaaatgttatgatgcaaaaaaagaaaaagaaaaaaaaaaa

SEQ ID NO: 177872 - DNA, 1490 bp, Homo sapiens
  Payload ID: 14902
  Gene Symbol: RBMS1
  Gene Name: RNA binding motif, single stranded interacting protein 1
  ENST ID: ENST00000409289
  CDS Start-End: 66-1178
atttgccttctcttcacttggggagtatcaatttgccacagcagtctctggtcccagcccaccccatggcccctcccagtcccagcaccaccagcagtaataacaacagtagcagcagtagcaactcaggatgggatcagctcagcaaaacgaacctctatatccgaggactgcctccccacaccaccgaccaggacctggtgaagctctgtcaaccatatgggaaaatagtctccacaaaggcaattttggataagacaacgaacaaatgcaaaggttatggttttgtcgactttgacagccctgcagcagctcaaaaagctgtgtctgccctgaaggccagtggggttcaagctcaaatggcaaagcaacaggaacaagatcctaccaacctctacatttctaatttgccactctccatggatgagcaagaactagaaaatatgctcaaaccatttggacaagttatttctacaaggatactacgtgattccagtggtacaagtcgtggtgttggctttgctaggatggaatcaacagaaaaatgtgaagctgttattggtcattttaatggaaaatttattaagacaccaccaggagtttctgcccccacagaacctttattgtgtaagtttgctgatggaggacagaaaaagagacagaacccaaacaaatacatccctaatggaagaccatggcatagagaaggagaggctggaatgacacttacttacgacccaactacagctgctatacagaacggattttatccttcaccatacagtattgctacaaaccgaatgatcactcaaacttctattacaccctatattgcatctcctgtatctgcctaccaggtgcaaagtccttcgtggatgcaacctcaaccatatattctacagcaccctggtgccgtgttaactccctcaatggagcacaccatgtcactacagcccgcatcaatgatcagccctctggcccagcagatgagtcatctgtcactaggcagcaccggaacatacatgcctgcaacgtcagctatgcaaggagcctacttgccacagtatgcacatatgcagacgacagcggttcctgttgaggaggcaagtggtcaacagcaggtggctgtcgagacgtctaatgaccattctccatatacctttcaacctaataagtaactgtgagatgtacagaaaggtgttcttacatgaagaagggtgtgaaggctgaacaatcatggatttttctgatcaattgtgctttaggaaattattgacagttttgcacaggttcttgaaaacgttatttataatgaaatcaactaaaactatttttgctataagttctataaggtgcataaaacccttaaattcatctagtagctgttcccccgaacaggtttattttagtaaaaaaaaaaaaacaaaaaacaaaaacaaaagatttttatcaaatgttatgatgcaaaaaaagaaaaagaaaaaaaaaaa

SEQ ID NO: 177873 - DNA, 1815 bp, Homo sapiens
  Payload ID: 14902
  Gene Symbol: RBMS1
  Gene Name: RNA binding motif, single stranded interacting protein 1
  ENST ID: ENST00000409972
  CDS Start-End: 451-1563
ggccgcggtaggtggggacgcggcggcgctgctcctccgctgccgccgggagagtcggcgacgccgccagctccgcgcgcgaactcccgtccatggcacgcagggcggcggctgcccgagctgctcgagtctcgcccgctgccgcgccgtacttttaggcgagtgcggaggtcgaaggcggaggggaagtcagcgcggagctgcagcccccgccggccgccgccgcgcggcgagagggagttcccagagctgccgcggccccgggcccggccggccacctccttgcgccctccccctcgcggcgaggctgccccgcgcccgcgcccgcgcccgcacccgccgccgccgcccgcagcgatgatcttccccagcagcagtggcaaccccgggggcagcagcaactgccggacgccctatcgcaagcagcagtctctggtcccagcccaccccatggcccctcccagtcccagcaccaccagcagtaataacaacagtagcagcagtagcaactcaggatgggatcagctcagcaaaacgaacctctatatccgaggactgcctccccacaccaccgaccaggacctggtgaagctctgtcaaccatatgggaaaatagtctccacaaaggcaattttggataagacaacgaacaaatgcaaaggttatggttttgtcgactttgacagccctgcagcagctcaaaaagctgtgtctgccctgaaggccagtggggttcaagctcaaatggcaaagcaacaggaacaagatcctaccaacctctacatttctaatttgccactctccatggatgagcaagaactagaaaatatgctcaaaccatttggacaagttatttctacaaggatactacgtgattccagtggtacaagtcgtggtgttggctttgctaggatggaatcaacagaaaaatgtgaagctgttattggtcattttaatggaaaatttattaagacaccaccaggagtttctgcccccacagaacctttattgtgtaagtttgctgatggaggacagaaaaagagacagaacccaaacaaatacatccctaatggaagaccatggcatagagaaggagaggctggaatgacacttacttacgacccaactacagctgctatacagaacggattttatccttcaccatacagtattgctacaaaccgaatgatcactcaaacttctattacaccctatattgcatctcctgtatctgcctaccaggtgcaaagtccttcgtggatgcaacctcaaccatatattctacagcaccctggtgccgtgttaactccctcaatggagcacaccatgtcactacagcccgcatcaatgatcagccctctggcccagcagatgagtcatctgtcactaggcagcaccggaacatacatgcctgcaacgtcagctatgcaaggagcctacttgccacagtatgcacatatgcagacgacagcggttcctgttgaggaggcaagtggtcaacagcaggtggctgtcgagacgtctaatgaccattctccatatacctttcaacctaataagtaactgtgagatgtacagaaaggtgttcttacatgaagaagggtgtgaaggctgaacaatcatggatttttctgatcaattgtgctttaggaaattattgacagttttgcacaggttcttgaaaacgttatttataatgaaatcaactaaaactatttttgctataagttctataaggtgcataaaacccttaaattcatctagtagctgttcccccgaacaggtttattttagtaaaaaaaaaaaaacaaaaaa

SEQ ID NO: 177874 - DNA, 583 bp, Homo sapiens
  Payload ID: 14902
  Gene Symbol: RBMS1
  Gene Name: RNA binding motif, single stranded interacting protein 1
  ENST ID: ENST00000428519
  CDS Start-End: 201-583
atttgccttctcttcacttggggagtatcaatttgccacagagcaagcaacagcgggtggtcctaggagacttctgtgtggtctagggagaccttgacacagtcgcctaagaatggaccgtgtttacagcctctaagaatggactgtgtttagaatgaggggcagcctgaaaaaggcagtctctggtcccagcccaccccatggcccctcccagtcccagcaccaccagcagtaataacaacagtagcagcagtagcaactcaggatgggatcagctcagcaaaacgaacctctatatccgaggactgcctccccacaccaccgaccaggacctggtgaagctctgtcaaccatatgggaaaatagtctccacaaaggcaattttggataagacaacgaacaaatgcaaaggttatggttttgtcgactttgacagccctgcagcagctcaaaaagctgtgtctgccctgaaggccagtggggttcaagctcaaatggcaaagcaacaggaacaagatcctaccaacctctacatttctaatttgccactctccatggatgagcaagaactagaaaatatgct

SEQ ID NO: 177875 - DNA, 8382 bp, Homo sapiens
  Payload ID: 14903
  Gene Symbol: RBMS2
  Gene Name: RNA binding motif, single stranded interacting protein 2
  Uniprot ID: Q15434
  ENST ID: ENST00000262031
  CDS Start-End: 96-1319
ccctcgctcccctcctccctccctccccgtctttcttaccccctccctttctctctctctctctctctcgctcgttccctaacattaaagagaaaatgctgctatccgtgacttccaggcccgggatttcgacttttggctacaatagaaacaacaagaagccatatgtgtcattggctcagcagatggcaccacctagcccaagcaacagtacacctaacagcagtagtggaagcaatggaaatgaccagctgagcaaaaccaacctatacatccgaggattgcaaccaggcactactgaccaagatcttgtcaagctgtgtcagccatatggcaagattgtttccactaaggccatactggacaagaccacaaacaaatgtaaaggctatggctttgtagattttgacagcccttcagcagcacagaaagctgtaacagcactgaaggccagcggtgtacaggcacagatggcaaagcaacaggaacaggaccccacaaatttatacatctcaaacctcccactgtcaatggatgagcaggaactggaggggatgctgaagccctttggccaggttatctccacccgtatccttcgagataccagtgggaccagcagaggtgttggctttgcaaggatggagtccacagagaagtgtgaagccatcatcacccactttaatggaaaatatattaagacaccccctggagtaccagccccatccgatcccttgctttgcaaatttgctgatggcgggccaaagaaacgacagaaccaaggaaaatttgtgcaaaatggacgggcttggccaaggaatgcagacatgggcgtcatggccttgacctatgaccccaccacagctcttcagaatgggttttacccagccccctataacatcacccccaacaggatgcttgctcagtctgcactctccccatacctttcctctcctgtgtcttcgtatcagagagtgactcagacatctcctctacaagtacctaacccatcctggatgcaccaccattcatacctcatgcagccttcaggttcagttctgacaccagggatggaccatcccatttctctccagcctgcctccatgatgggaccccttacccagcaactgggccatctctccctcagcagcacaggcacgtatatgccgacggctgcagctatgcaaggagcttacatctcccagtacacccctgtgccttcttccagtgtttcagtcgaggagagcagcggccaacagaaccaagtggcagtggacgcaccctcagagcatggggtctattctttccagttcaacaagtaacagtgggattcccctccccatctttactgaatagaaatgaattcttggagatactcatgctcccagattccagagggttaaccaggaatggagaccatccgtcggccctgctaaggactaacacttagccatcgtttttcacaggcctgggcctggaaaaagaaatctctacgttcctgccctttactattgctgatggagcctgggggaaccatcactttttttgtgtgctacattcaaggagatcaaaaaaacttttcttcttttgcaaagaaagctttttgtttttaactgcaacgtacttttcccctaccttgaagagacatggtggtcgcagcttctcatctatatgaaaaagttttcgatgtattggaattatttgggaatgcttttaaaacaatttgtaattatttctttacaaaccaaaacagaacagaaaggtgtggtgctggaacatcgatgaaggagccctacttactgagcttagttatggacttttttgatgcatgtgtgtatgtgttttaaaaagtatgcaggctctaaaaatgttattttgtaaagctctcagctcatgcaccccatctcctcttcacccatattatgccttctttctcttgtccagattcttctttttctcttttctaaacagctgagcctgcctactttgcccttttacagcttttaattttatggatttttaaaaatgaaatttcatgtggaatttggggttggggggcaggctgggcaaggaacaaggcagaacactaagtaggccatggaagtggctgttctttcccccaccctgccacaccctgggagaaaaaactagactttggcttcagaaagcacagatgtgacccaggcttactaaagagacaactccacagccctgggaacacacccttgagccaaacttggttgaagactaggtcttccctggcaagttccggaagaatggacttactgacttttatcaactcttctcactgccaaggccaacagcatctgaggtatagctttttgggagtacctgctttcttgcctcctggaggatattttctgtcctgggcttcatggcccctctcttccctgttacacattgctgtgctcagagcctttgcagctgcgacctagttgaatccacataggctccttccacacggtggaagatctgctgcttcactcacagaccaggagttctcaatcagaggtggttttgtccctcaggcctttggcaacatctagagacagttttgattgccacgcctggaggtgggatgtgtgtgctactggcatctagtggctgctaaacatcctacactgcataggatagtccccactacccccagccaagaattatctgactccaggggtcaatattgccaagactgggaaacactgatatagacagtgttgtccctgcctcctgggttagggtaaattttcaccccaaccctggacaaacagtgccttttgacactcatgcaactgttggggaaggactggactgggatccttgaattctccccagactttgacttttgataactctgcatatagcaagagtgattcttgaaagagctgtggctccatgctgaatgcacacatgtactcagagggattcaggtgggcattgttctggtgtgtgctgtgcaatggtgggaaaggacaaagctctctaaactgtccagagcaacctgccctgccccggtgtgcttggaccctttgcccagggaaccaggacatcagaaataatgttccttctgtggaaggacaacggggagctagggtagcaaagagcaataaattccaactctttatgaggtcaggagtcctttaaaaaagcctatgtcttggtctttaactgtccccttctgcaagatgtgactctatacacatggagacagattgaagaaagacttcacccatcttctaggaaataaaatcctgctcttgtcttctcccagtcactcccttatgcactgaaaggagaatttgactcccttgcacttcaaggccaggtgcctctccactagacagtcagacaaaggcaaataatggaggatagagagacaggtgttcattaggctggccatagggagaggaagggggtgacagcaggggaaaagaaactgtagtatcagttgtcacaagtagagctcggcccagctttccctcccttcccagccaccctagaattgagagtcccagtgcccctagtgtcgactttctatgtacatcctaggggtgagggagtgcggggcaatgggtaggatataaagcgtaaaggacaaattgccgcagtcttctaattgatgcttccaaactcaggaagggcttatccagtgtaaaatagccccaagcccagcaaccttctagagggctctggctgggcagatagcttttgtttttgagtctccagccctcagtcaaggaaaatataccatagctgctttcttgtcagtggcctttgagagaaagagaaaacaaatctagaattctgttcatctgatagaccgggggagctttgctatggtaggaggtttaggaagggcctttcacgcatagaaaccattgttgatattgccactcccctctcctctgcctcacagaactcctgattctgtcttctttctctctctatatatatattttaaaatgtttaaatggctctaattttttgttttgaattttgaatttaccttttggagttcttctcatgtgaatctacttgttagattgtattaatgagtgtttctggtttgggcatgggaagtgatgggggcctgaagttattttgcagtggctaatggcactgaggaatttcttttttggtgcatttggtttacactcatttcctctcctaattgttagttcatttgtaacagtgggtgagtgtttggaggaaaggagggagaagaaaggagggatactgtttctcccatgaaatagtctaattggttgggttgatggcagaaggaaacataggggagccttccagctcacagccaagggttgggctcttaaacactatgcctagtgttttctgaatgctgtcttcatggagcccagctcttactctctttgtactttacatctcacccccactcattacagatgctcataacattcttaaaatattttagtacttggcatttttctgttttcagtcagctagaacacactagagtcctttcctcagatggcataatcctttataggctctgagcctgcctagccatctcctatcggtgttattactcctcatctcaggctctgagatgatactcagaccctaaactgattggactttttggaggagggtgccagtagagaggtcaggaagatgtggagatgatgatggagagagatgtttttattttattttattttttcagacagagtcttgctctgtcgcccaggctggagtgcaatggcacgatctcggctcactgcaacctccgcctcccaggttcaagcaattctcctgcctcagcctcccatgtagctgggattacaggcacccaccaccatgcccggctaatttttttatttttagtagagatggggtttcaccatgttggccaggctggtctcgaactcctgacctcaggtgatctgcccgccttagcctcccaaagtgctgggattacaggcgtgagccaccgcgcccggcctttattttattttttagagatggtcttgctgtgtcacccaggctggagtgcagtgatgcagtcgtagtctactacagtcttgaattcctgggcccaagggttcttcccacctaagcctcccaagtagctggaagtacaggcacatactaccaagcccagttcgttattttaagtttttgtagagacaggggtcttactatgttgcccagactggtcttgaactcctgtcaagtgagcctcccacctcagcctcccaaagtgctatgattacaggtgtgagcctccatgcttggatgagatgttgtttttaatgtttttggttttttggttttgttgttttgtttttttgagacagggtctcactctgtggcccaggctggagtgcagtggcaccataatggctcactgcagcctcgacctcccaaggctcaggtgatcctcttgcctcagccaccccttccccggccaccaagtagctgggactatgggcttgtgccaccatgcctggctaatttttttatttttagtagagatggggttttaccacgttggccaggctagtgtccaactcctgacctccaaacagctaatttttgtatttttaatagagacaggttttcgccatgttgcccagcctcgtctcgaactcctgggctcaaatgatccacccacctcggcctcccaaagtgctgggattataggcatgagccaccacacctggccttttcagtttttttatttttattttttctttgagacggagtctcgctctgtcgcccaggctggagtgcagtggcgtgatcttggctcactgaaacctccatctcctgggttcaagcagttctcctgcctcagcctcctgagtagctgggattacaggtgcctgccaccatgcctggctaatttttgtatttttagtagagacagggttttgccacattgcccaggctggtgttgaactcctgggctcaaatgatccacctgccttggcctcccaaagtgctgggattacaggcgtgagccactgcacccggccctttgtagtgtttttaactaaagaatttgtagagttgcccaggccaggaagcctggtggctctaaagggtaatagaccttgtcagtaacagataaggagtggtaagaggacattactcatattgaagatgaagaccagactttgctgcttcacaggccatgcgctgggttgggccacttcagctccactccattcgttttcctttcctaacttgacaatcagctcactcaccctcccttagtgcctccagtgcctactcctgtcactccaatgtcaacccattgggagttgaggcctgtcactccaatgtcaacccgtgggctgttactttgcgtcatatgatgctgtgagaggccttgctggaatgtcctaggaatccctagtagcagtggctattagtcttctagaaaagaactattgctgctgccttgtgcacatgccccaccttctgggcaagtggcagcattgcgctcatgaggggctttgcattcttagccaagggcaataaactgggtgggtgatctggcccaaacttgcccctaggctctgctagccctgaatcagcaggcttcagagacgagggtgggtgttataaaagccagtctgtaaagggtaaattccaaatcttgtgccttgttataccaatccttcctgattcccgtttaaaccaactactctatttctgtgctgcctacattttcaatcctcccacgcattagcaaattcctgaaatttcctcatttggtaggccttccataggagtcagctatggacttccataggagttggcagctaaaaccagactgtgagcttctgtctccgttctgatttttgctgcacctcccaggggacagtccccacatgattacaaaagccaggtgccctcatcacccgttacccctgacctgtccacttgttttgaataaaccttcattctccaagcagatccccaaacttccttgtccttgttacacgtctacctcacaacctcacaattcaacaacaggtaaatacctggattcactgatttctttactgtccttctctgagggttgggaaggtgggggctagaaaaggctcataatttttaaactcttgggaattaaacttgggaatttctattcctacagtgttttctctgggatttttagctcactgatcgccctagaatagtgtgaactctccagataggtcctgctgtgataggccaggggagtaggctgtgcagtgacggcttagggtaataagtaatggttggaggacaccagcataggagcagagtttagaacttaagaggacaagaaagctgctcagtggctggcgtatagctgtgaaggtaaccaaacaccaaagagggagtctgtcatttttataaggctggaagcgaatgttccttttctaccttaacatacagtttagggggttgcaccaagacaaagtttccaggctggagggtaatacatatccagcgcgagtgaagtccccactccaacatataccctttttgggtgggtaaacacctctttgcatgtggacagaaaatgtttatacttaaacagacatattttgcatatttttatctggagacttcttctagttttatactcttcccacatctatgccaatgccaccattctaaaacttacactccttttctacccctggtcttttccttgtccttccctacaacttggtagaggtccattttgtcttacttcacacttttttttttttaaataaaacacaaaagtctacgtcttggtgtcttatccgtgagtgggaagtggtaagctggtgatggtcccatatttgctatgacaggaacacagaggtggcagcttaggaagctggggccacatctcacaaggcaggacctggatgcactgaatccccctttgctccagcaactcagccagacatttaggcaggagcactaatgaccctttccatccacacagagggtatggaacaggagcccctgttgttcccttgcctgtggtctcttaagccagtcatacctatcccaacgccgtctccccctcaggtgtgtagaagggaagatgaatacacagagtcttttgaatctctatcaaatgtggttttttttattcaacaactgacaagcacttttctacagctgcacttgtggaacatcacatggcaaaaacaggagttttttcgctagactttttttttctttttaaccttattaaaaatgagattggtcctaaaaatatagaaagaaataaatttaaattcacaaaaaactgtacattatcaaaaagtcactaaaacaccacatttggttatataaaaagtcccttttgctgtaaaaggaacacagaaactt

SEQ ID NO: 177876 - DNA, 1484 bp, Homo sapiens
  Payload ID: 14903
  Gene Symbol: RBMS2
  Gene Name: RNA binding motif, single stranded interacting protein 2
  ENST ID: ENST00000542360
  CDS Start-End: 234-1022
ctcgttccctaacattaaagagaaaatgctgctatccgtgacttccaggcccgggatttcgacttttggctacaatagaaacaacaagaagatatggcaagattgtttccactaaggccatactggacaagaccacaaacaaatgtaaaggctatggctttgtagattttgacagcccttcagcagcacagaaagctgtaacagcactgaaggccagcggtgtacaggcacagatggcaaaggctggagtgcaatggcgtgatctcgactcactacaacctctgcctcccaggttcaagcgattctctcacctctgcctcctgagtagctgggactacaggatggagtccacagagaagtgtgaagccatcatcacccactttaatggaaaatatattaagacaccccctggagtaccagccccatccgatcccttgctttgcaaatttgctgatggcgggccaaagaaacgacagaaccaaggaaaatttgtgcaaaatggacgggcttggccaaggaatgcagacatgggcgtcatggccttgacctatgaccccaccacagctcttcagaatgggttttacccagccccctataacatcacccccaacaggatgcttgctcagtctgcactctccccatacctttcctctcctgtgtcttcgtatcagagagtgactcagacatctcctctacaagtacctaacccatcctggatgcaccaccattcatacctcatgcagccttcaggttcagttctgacaccagggatggaccatcccatttctctccagcctgcctccatgatgggaccccttacccagcaactgggccatctctccctcagcagcacaggcacgtatatgccgacggctgcagctatgcaaggagcttacatctcccagtacacccctgtgccttcttccagtgtttcagtcgaggagagcagcggccaacagaaccaagtggcagtggacgcaccctcagagcatggggtctattctttccagttcaacaagtaacagtgggattcccctccccatctttactgaatagaaatgaattcttggagatactcatgctcccagattccagagggttaaccaggaatggagaccatccgtcggccctgctaaggactaacacttagccatcgtttttcacaggcctgggcctggaaaaagaaatctctacgttcctgccctttactattgctgatggagcctgggggaaccatcactttttttgtgtgctacattcaaggagatcaaaaaaacttttcttcttttgcaaagaaagctttttgtttttaactgcaacgtacttttcccctaccttgaagagacatggtggtcgcagcttctcatctatatgaaaaagttttcgatgtattggaattatttgggaatgcttttaaaacaatttgtaattatttctttacaaaccaaaacagaacagaaaggtgtggtgctggaacatcgatg

SEQ ID NO: 177877 - DNA, 1471 bp, Homo sapiens
  Payload ID: 14903
  Gene Symbol: RBMS2
  Gene Name: RNA binding motif, single stranded interacting protein 2
  ENST ID: ENST00000552247
  CDS Start-End: 67-1101
tctttcttaccccctccctttctctctctctctctctctcgctcgttccctaacattaaagagaaaatgctgctatccgtgacttccaggcccgggatttcgacttttggctacaatagaaacaacaagaagccatatgtgtcattggctcagcagatggcaccacctagcccaagcaacagtacacctaacagcagtagtggaagcaatggaaatgaccagctgagcaaaaccaacctatacatccgaggattgcaaccaggcactactgaccaagatcttgtcaagctgtgtcagccatatggcaagattgtttccactaaggccatactggacaagaccacaaacaaatgtaaaggctatggctttgtagattttgacagcccttcagcagcacagaaagctgtaacagcactgaaggccagcggtgtacaggcacagatggcaaagcaacaggaacaggaccccacaaatttatacatctcaaacctcccactgtcaatggatgagcaggaactggaggggatgctgaagccctttggccaggttatctccacccgtatccttcgagataccagtgggaccagcagaggtgttggctttgcaaggatggagtccacagagaagtgtgaagccatcatcacccactttaatggaaaatatattaagacaccccctggagtaccagccccatccgatcccttgctttgcaaatttgctgatggcgggccaaagaaacgacagaaccaaggaaaatttgtgcaaaatggacgggcttggccaaggaatgcagacatgggcgtcatggccttgacctatgaccccaccacagctcttcagaatgggttttacccagccccctataacatcacccccaacaggatgcttgctcagtctgcactctccccatacctttcctctcctgtgtcttcgtatcagtatatgccgacggctgcagctatgcaaggagcttacatctcccagtacacccctgtgccttcttccagtgtttcagtcgaggagagcagcggccaacagaaccaagtggcagtggacgcaccctcagagcatggggtctattctttccagttcaacaagtaacagtgggattcccctccccatctttactgaatagaaatgaattcttggagatactcatgctcccagattccagagggttaaccaggaatggagaccatccgtcggccctgctaaggactaacacttagccatcgtttttcacaggcctgggcctggaaaaagaaatctctacgttcctgccctttactattgctgatggagcctgggggaaccatcactttttttgtgtgctacattcaaggagatcaaaaaaacttttcttcttttgcaaagaaagctttttgtttttaactgcaacgtacttttcccctaccttgaagagacatggtggtcgcagcttctcatctatatgaaaaagttttcgatgtat

SEQ ID NO: 177878 - DNA, 552 bp, Homo sapiens
  Payload ID: 14903
  Gene Symbol: RBMS2
  Gene Name: RNA binding motif, single stranded interacting protein 2
  ENST ID: ENST00000551369
  CDS Start-End: 36-218
ctctctctcgctcgttccctaacattaaagagaaaatgctgctatccgtgacttccaggcccgggatttcgacttttggctacaatagaaacaacaagaagatggagtttcgttcgctcttgttgcccagactggagtgcaatggcgtgatctcggctcactgcaacctctgcctcccagccatatgtgtcattggctcagcagatggcaccacctagcccaagcaacagtacacctaacagcagtagtggaagcaatggaaatgaccagctgagcaaaaccaacctatacatccgaggattgcaaccaggcactactgaccaagatcttgtcaagctgtgtcagccatatggcaagattgtttccactaaggccatactggacaagaccacaaacaaatgtaaaggctatggctttgtagattttgacagcccttcagcagcacagaaagctgtaacagcactgaaggccagcggtgtacaggcacagatggcaaagcaacaggaacaggaccccacaaatttatacatctcaaacctcccactgtcaatg

SEQ ID NO: 177879 - DNA, 1452 bp, Homo sapiens
  Payload ID: 14903
  Gene Symbol: RBMS2
  Gene Name: RNA binding motif, single stranded interacting protein 2
  ENST ID: ENST00000550726
  CDS Start-End: 234-1082
ctcgttccctaacattaaagagaaaatgctgctatccgtgacttccaggcccgggatttcgacttttggctacaatagaaacaacaagaagatatggcaagattgtttccactaaggccatactggacaagaccacaaacaaatgtaaaggctatggctttgtagattttgacagcccttcagcagcacagaaagctgtaacagcactgaaggccagcggtgtacaggcacagatggcaaagcaacaggaacaggaccccacaaatttatacatctcaaacctcccactgtcaatggatgagcaggaactggaggggatgctgaagccctttggccaggttatctccacccgtatccttcgagataccagtgggaccagcagaggtgttggctttgcaaggatggagtccacagagaagtgtgaagccatcatcacccactttaatggaaaatatattaagacaccccctggagtaccagccccatccgatcccttgctttgcaaatttgctgatggcgggccaaagaaacgacagaaccaaggaaaatttgtgcaaaatggacgggcttggccaaggaatgcagacatgggcgtcatggccttgacctatgaccccaccacagctcttcagaatgggttttacccagccccctataacatcacccccaacaggatgcttgctcagtctgcactctccccatacctttcctctcctgtgtcttcgtatcagagagtgactcagacatctcctctacaagtacctaacccatcctggatgcaccaccattcatacctcatgcagccttcaggttcagttctgacaccagggatggaccatcccatttctctccagcctgcctccatgatgggaccccttacccagcaactgggccatctctccctcagcagcacaggcacgtatatgccgacggctgcagctatgcaaggagcttacatctcccagtacacccctgtgccttcttccagtgtttcagtcgaggagagcagcggccaacagaaccaagtggcagtggacgcaccctcagagcatggggtctattctttccagttcaacaagtaacagtgggattcccctccccatctttactgaatagaaatgaattcttggagatactcatgctcccagattccagagggttaaccaggaatggagaccatccgtcggccctgctaaggactaacacttagccatcgtttttcacaggcctgggcctggaaaaagaaatctctacgttcctgccctttactattgctgatggagcctgggggaaccatcactttttttgtgtgctacattcaaggagatcaaaaaaacttttcttcttttgcaaagaaagctttttgtttttaactgcaacgtacttttcccctaccttgaagagacatggtggtcgcagcttctcatctatatgaaaaagttttcgatgtat

SEQ ID NO: 177880 - DNA, 1633 bp, Homo sapiens
  Payload ID: 14903
  Gene Symbol: RBMS2
  Gene Name: RNA binding motif, single stranded interacting protein 2
  ENST ID: ENST00000552916
  CDS Start-End: 35-289
tctctctcgctcgttccctaacattaaagagaaaatgctgctatccgtgacttccaggcccgggatttcgacttttggctacaatagaaacaacaagaagccatatgtgtcattggctcagcagatggcaccacctagcccaagcaacagtacacctaacagcagtagtggaagcaatggaaatgaccagctgagcaaaaccaacctatacatccgaggattgcaaccaggcactactgaccaagatcttgtcaagctgtgtcagccgctatggctttgtagattttgacagcccttcagcagcacagaaagctgtaacagcactgaaggccagcggtgtacaggcacagatggcaaagcaacaggaacaggaccccacaaatttatacatctcaaacctcccactgtcaatggatgagcaggaactggaggggatgctgaagccctttggccaggttatctccacccgtatccttcgagataccagtgggaccagcagaggtgttggctttgcaagccccatccgatcccttgctttgcaaatttgctgatggcgggccaaagaaacgacagaaccaaggaaaatttgtgcaaaatggacgggcttggccaaggaatgcagacatgggcgtcatggccttgacctatgaccccaccacagctcttcagaatgggttttacccagccccctataacatcacccccaacaggatgcttgctcagtctgcactctccccatacctttcctctcctgtgtcttcgtatcagagagtgactcagacatctcctctacaagtacctaacccatcctggatgcaccaccattcatacctcatgcagccttcaggttcagttctgacaccagggatggaccatcccatttctctccagcctgcctccatgatgggaccccttacccagcaactgggccatctctccctcagcagcacagtatatgccgacggctgcagctatgcaaggagcttacatctcccagtacacccctgtgccttcttccagtgtttcagtcgaggagagcagcggccaacagaaccaagtggcagtggacgcaccctcagagcatggggtctattctttccagttcaacaagtaacagtgggattcccctccccatctttactgaatagaaatgaattcttggagatactcatgctcccagattccagagggttaaccaggaatggagaccatccgtcggccctgctaaggactaacacttagccatcgtttttcacaggcctgggcctggaaaaagaaatctctacgttcctgccctttactattgctgatggagcctgggggaaccatcactttttttgtgtgctacattcaaggagatcaaaaaaacttttcttcttttgcaaagaaagctttttgtttttaactgcaacgtacttttcccctaccttgaagagacatggtggtcgcagcttctcatctatatgaaaaagttttcgatgtattggaattatttgggaatgcttttaaaacaatttgtaattatttctttacaaaccaaaacagaacagaaaggtgtggtgctggaacatcgatgaaggagccctacttactgagcttagttatggacttttttgatgcatgtgtgtatgtg

SEQ ID NO: 177881 - DNA, 1598 bp, Homo sapiens
  Payload ID: 14904
  Gene Symbol: RBMS3
  Gene Name: RNA binding motif, single stranded interacting protein 3
  Uniprot ID: Q6XE24
  ENST ID: ENST00000273139
  CDS Start-End: 231-1493
ttctacagatctcactcctcgccctttttttttttcctttggtgtgtgttttttgttttgttttgttttttaaaaaaattcttgctgtgttggaactagcgagtggtggagtctctgaagcctcatcagtcaccgggactgtcaggaatagtggtttaagaggaagctcggcctggggcactataccctgtcatccagttccctgcctcggagataaagattccagctacatgggcaaacgcctggatcagccacaaatgtacccccagtacacttactactatcctcattatctccaaaccaagcagtcctatgcaccagctccccaccccatggctcctcccagccccagcacaaacagcagcagcaacaacagcagcaacaacagcagcggggaacagttgagtaaaaccaacctgtacattcgaggcctcccaccaggcaccactgaccaggacctaatcaagctgtgccaaccgtatggaaaaattgtatctacaaaggcaattcttgacaaaaacacaaatcagtgcaaaggttatggttttgtagattttgacagtcctgcagccgcacagaaagcggtagcatctctcaaggcaaatggcgtgcaggcacagatggctaagcaacaagagcaagacccaacaaacctatacatctcaaatctccccatttctatggatgagcaggagcttgagaatatgctgaaaccctttggacatgtcatttccacaagaatactaagagacgctaatggagtcagcagaggtgttggctttgccagaatggagtctactgaaaaatgtgaagtggtaattcaacattttaatggaaaatatctgaaaacaccaccaggcatcccagcccccagtgagcctttgctgtgcaaattcgctgatggaggacaaaagaagcgacagaatcaaagcaaatatacccagaatgggaggccttggcccagggaaggagaggctggcatggctttgacctatgaccccacagctgccatacagaatggattttattcttcaccgtacagtattgcaaccaaccgcatgattccacagacatctatcacgccattcattgctgcttcccctgtctccacataccaggtccagagtacttcatggatgcctcatccgccatacgttatgcaaccaacaggtgctgtgattacaccaaccatggaccatcccatgtcaatgcagccagccaacatgatgggcccactgacacagcagatgaatcacctttcgttgggcacaacaggaacgtatatgactgctgctgctcctatgcaagggacctacattcctcagtacacgcctgtgcctccgacagctgtttctattgaaggtgttgttgctgatacctctccccagacagtggcaccttcatcccaggacaccagtggtcagcagcaacagatagcagtggacacatccaacgaacatgcacctgcatattcttaccaacagtctaagtaagtctgggctgtgctaagctcttttcctcaagatcagccatcttgacatcactctctcatgttgtatgtgttagcttttgctgaaatataaaccatcccaaactta

SEQ ID NO: 177882 - DNA, 2757 bp, Homo sapiens
  Payload ID: 14904
  Gene Symbol: RBMS3
  Gene Name: RNA binding motif, single stranded interacting protein 3
  Uniprot ID: Q6XE24
  ENST ID: ENST00000383766
  CDS Start-End: 231-1490
ttctacagatctcactcctcgccctttttttttttcctttggtgtgtgttttttgttttgttttgttttttaaaaaaattcttgctgtgttggaactagcgagtggtggagtctctgaagcctcatcagtcaccgggactgtcaggaatagtggtttaagaggaagctcggcctggggcactataccctgtcatccagttccctgcctcggagataaagattccagctacatgggcaaacgcctggatcagccacaaatgtacccccagtacacttactactatcctcattatctccaaaccaagtcctatgcaccagctccccaccccatggctcctcccagccccagcacaaacagcagcagcaacaacagcagcaacaacagcagcggggaacagttgagtaaaaccaacctgtacattcgaggcctcccaccaggcaccactgaccaggacctaatcaagctgtgccaaccgtatggaaaaattgtatctacaaaggcaattcttgacaaaaacacaaatcagtgcaaaggttatggttttgtagattttgacagtcctgcagccgcacagaaagcggtagcatctctcaaggcaaatggcgtgcaggcacagatggctaagcaacaagagcaagacccaacaaacctatacatctcaaatctccccatttctatggatgagcaggagcttgagaatatgctgaaaccctttggacatgtcatttccacaagaatactaagagacgctaatggagtcagcagaggtgttggctttgccagaatggagtctactgaaaaatgtgaagtggtaattcaacattttaatggaaaatatctgaaaacaccaccaggcatcccagcccccagtgagcctttgctgtgcaaattcgctgatggaggacaaaagaagcgacagaatcaaagcaaatatacccagaatgggaggccttggcccagggaaggagaggctggcatggctttgacctatgaccccacagctgccatacagaatggattttattcttcaccgtacagtattgcaaccaaccgcatgattccacagacatctatcacgccattcattgctgcttcccctgtctccacataccagggtgctgtgattacaccaaccatggaccatcccatgtcaatgcagccagccaacatgatgggcccactgacacagcagatgaatcacctttcgttgggcacaacaggaacgattcaatcccaagacaggattatgatactccaccagctgttgtgtcagtatatgactgctgctgctcctatgcaagggacctacattcctcagtacacgcctgtgcctccgacagctgtttctattgaaggtgttgttgctgatacctctccccagacagtggcaccttcatcccaggacaccagtggtcagcagcaacagatagcagtggacacatccaacgaacatgcacctgcatattcttaccaacagtctaaaccataaacaggactgaagaatgtctgtctgaatctttgccttgaatgaagaaacttcattgaacaagaagttggcttccagtttgcacagacgtcaatggaatgcatttttttgttgttgttgttgttttttttttagtgttataccttacccaatgaaagcaaagtttttatgtgctgtgcaaatggtcttcatgtggtctgacaatttatttttgccatcatttttttaattaaagaaaaaatttccagaagaggaaaaaaaaactacaaaaaacaaaacattgaaggttgatattttatgtggaagaacatttgaattgaattcagaatttttctgaaggtgtagatactttttttttttttttaacagaaaacctgatgtcaagaggtgggcaatagaaatggaaacaaattgtcttcctcaataattaagctactttctctttttcccttcttgttttaatctagtgggttttttattttattttttcttagaaatatgtaggtaaggtttatcttgaatcttaattgccttaattttaaggacgtcaaaggctctcgaggcaagctgtcaacgtcttgttgaaaacaaaaatcaagaaagaattgaaatactgtgccggctttcactggcacagaagtttaagactatgagtttttagggtgaagaaaaaactgtacagtttaaatgaaaatgtttttcttcatttgaagaaaatttgttgataaaccatggcaactgcaagaattggaaaaatgctgggacttttcatgaactttgtcttaagtgttgacatgaatcattctaaaaggctaaaacattttacagtaaagttattaaggttggtttaaaaacaactgcattagaaataatgcgtgtttggggggcagaatgcagatttttttaatttacaaagcgtgatcgctagcaaaagcattagtgctttttatctgcagtcttttttatgagctttacaaagtttttagtcagctttgcttgtcacattgcaaaacctagcttaagagcattaaaaaaaaaaacttaagtagataggagcttatggtcaaaaagtgcaaaaaaaaaaacaaaaaaaaagcaatagatagagaaattgttgacaatttctgtagtctttcctagttgtgatcaaattcagcctatggatggcctattttataccaaagatgaagtgacaccctattacagtccagaagatagaggttgttttcgtttcttttctttttaaaaaaaaaaaaatttatttgaccga

SEQ ID NO: 177883 - DNA, 1864 bp, Homo sapiens
  Payload ID: 14904
  Gene Symbol: RBMS3
  Gene Name: RNA binding motif, single stranded interacting protein 3
  Uniprot ID: Q6XE24
  ENST ID: ENST00000383767
  CDS Start-End: 337-1650
atcactacagacagcctggttagagaacaaactgcctcatcccaagtggaccccggcagctgggggaagccaggcaagatctgggaaggctgtgtgtgggtgttttttctacagatctcactcctcgccctttttttttttcctttggtgtgtgttttttgttttgttttgttttttaaaaaaattcttgctgtgttggaactagcgagtggtggagtctctgaagcctcatcagtcaccgggactgtcaggaatagtggtttaagaggaagctcggcctggggcactataccctgtcatccagttccctgcctcggagataaagattccagctacatgggcaaacgcctggatcagccacaaatgtacccccagtacacttactactatcctcattatctccaaaccaagcagtcctatgcaccagctccccaccccatggctcctcccagccccagcacaaacagcagcagcaacaacagcagcaacaacagcagcggggaacagttgagtaaaaccaacctgtacattcgaggcctcccaccaggcaccactgaccaggacctaatcaagctgtgccaaccgtatggaaaaattgtatctacaaaggcaattcttgacaaaaacacaaatcagtgcaaaggttatggttttgtagattttgacagtcctgcagccgcacagaaagcggtagcatctctcaaggcaaatggcgtgcaggcacagatggctaagcaacaagagcaagacccaacaaacctatacatctcaaatctccccatttctatggatgagcaggagcttgagaatatgctgaaaccctttggacatgtcatttccacaagaatactaagagacgctaatggagtcagcagaggtgttggctttgccagaatggagtctactgaaaaatgtgaagtggtaattcaacattttaatggaaaatatctgaaaacaccaccaggcatcccagcccccagtgagcctttgctgtgcaaattcgctgatggaggacaaaagaagcgacagaatcaaagcaaatatacccagaatgggaggccttggcccagggaaggagaggctggcatggctttgacctatgaccccacagctgccatacagaatggattttattcttcaccgtacagtattgcaaccaaccgcatgattccacagacatctatcacgccattcattgctgcttcccctgtctccacataccaggtccagagtacttcatggatgcctcatccgccatacgttatgcaaccaacaggtgctgtgattacaccaaccatggaccatcccatgtcaatgcagccagccaacatgatgggcccactgacacagcagatgaatcacctttcgttgggcacaacaggaacgattcaatcccaagacaggattatgatactccaccagctgttgtgtcagtatatgactgctgctgctcctatgcaagggacctacattcctcagtacacgcctgtgcctccgacagctgtttctattgaaggtgttgttgctgatacctctccccagacagtggcaccttcatcccaggacaccagtggtcagcagcaacagatagcagtggacacatccaacgaacatgcacctgcatattcttaccaacagtctaaaccataaacaggactgaagaatgtctgtctgaatctttgccttgaatgaagaaacttcattgaacaagaagttggcttccagtttgcacagacgtcaatggaatgcatttttttgttgttgttgttgttttttttttagtgttataccttacccaatgaaagcaaagtttttatgtgctgtgcaaatggtcttcatgtggtctgacaatttatttttgcca

SEQ ID NO: 177884 - DNA, 1120 bp, Homo sapiens
  Payload ID: 14904
  Gene Symbol: RBMS3
  Gene Name: RNA binding motif, single stranded interacting protein 3
  ENST ID: ENST00000445033
  CDS Start-End: 310-1104
caaactgcctcatcccaagtggaccccggcagctgggggaagccaggcaagatctgggaaggctgtgtgtgggtgttttttctacagatctcactcctcgccctttttttttttcctttggtgtgtgttttttgttttgttttgttttttaaaaaaattcttgctgtgttggaactagcgagtggtggagtctctgaagcctcatcagtcaccgggactgtcaggaatagtggtttaagaggaagctcggcctggggcactataccctgtcatccagttccctgcctcggagataaagattccagctacatgggcaaacgcctggatcagccacaaatgtacccccagtacacttactactatcctcattatctccaaaccaagcagtcctatgcaccagctccccaccccatggctcctcccagccccagcacaaacagcagcagcaacaacagcagcaacaacagcagcggggaacagttgagtaaaaccaacctgtacattcgaggcctcccaccaggcaccactgaccaggacctaatcaagctgtgccaaccgtatggaaaaattgtatctacaaaggcaattcttgacaaaaacacaaatcagtgcaaaggttatggttttgtagattttgacagtcctgcagccgcacagaaagcggtagcatctctcaaggcaaatggcgtgcaggcacagatggctaagcaacaagagcaagacccaacaaacctatacatctcaaatctccccatttctatggatgagcaggagcttgagaatatgctgaaaccctttggacatgtcatttccacaagaatactaagagacgctaatggagtcagcagaggtgttggctttgccagaatggagtctactgaaaaatgtgaagtggtaattcaacattttaatggaaaatatctgaaaacaccaccaggcatcccagcccccagtgagcctttgctgtgcaaattcgctgatggaggacaaaagaagcgacagaatcaaagcaaatatacccagaatgggaggccttggcccagggaaggagaggctggcatggctttgacctatgaccccacagctgccatacagaatgggtaagtagatcacattttct

SEQ ID NO: 177885 - DNA, 8540 bp, Homo sapiens
  Payload ID: 14904
  Gene Symbol: RBMS3
  Gene Name: RNA binding motif, single stranded interacting protein 3
  ENST ID: ENST00000434693
  CDS Start-End: 701-2011
acgctgctccctggagaggctctctcggttccacccaccggctggaaggaggggaagtgaatgaaaggacaggacaagccccgaacaccatgtcactctgggagggagacagcagcaactaagctgtacaaggttttttttttttttttttcttcctttttttctttttttttttctttttcccctttctttttctttctttctttctttttctttctttctttctctttctctctctcttttttctttttctttaaggtggggaaagagacaaccaagagacaggaagctgatctgcaaggattcggagttgtgctaaaaggactttgatttttttccccctttacgaacgctggcaattgacatcactacagacagcctggttagagaacaaactgcctcatcccaagtggaccccggcagctgggggaagccaggcaagatctgggaaggctgtgtgtgggtgttttttctacagatctcactcctcgccctttttttttttcctttggtgtgtgttttttgttttgttttgttttttaaaaaaattcttgctgtgttggaactagcgagtggtggagtctctgaagcctcatcagtcaccgggactgtcaggaatagtggtttaagaggaagctcggcctggggcactataccctgtcatccagttccctgcctcggagataaagattccagctacatgggcaaacgcctggatcagccacaaatgtacccccagtacacttactactatcctcattatctccaaaccaagtcctatgcaccagctccccaccccatggctcctcccagccccagcacaaacagcagcagcaacaacagcagcaacaacagcagcggggaacagttgagtaaaaccaacctgtacattcgaggcctcccaccaggcaccactgaccaggacctaatcaagctgtgccaaccgtatggaaaaattgtatctacaaaggcaattcttgacaaaaacacaaatcagtgcaaaggttatggttttgtagattttgacagtcctgcagccgcacagaaagcggtagcatctctcaaggcaaatggcgtgcaggcacagatggctaagcaacaagagcaagacccaacaaacctatacatctcaaatctccccatttctatggatgagcaggagcttgagaatatgctgaaaccctttggacatgtcatttccacaagaatactaagagacgctaatggagtcagcagaggtgttggctttgccagaatggagtctactgaaaaatgtgaagtggtaattcaacattttaatggaaaatatctgaaaacaccaccaggcatcccagcccccagtgagcctttgctgtgcaaattcgctgatggaggacaaaagaagcgacagaatcaaagcaaatatacccagaatgggaggccttggcccagggaaggagaggctggcatggctttgacctatgaccccacagctgccatacagaatggattttattcttcaccgtacagtattgcaaccaaccgcatgattccacagacatctatcacgccattcattgctgcttcccctgtctccacataccaggtccagagtacttcatggatgcctcatccgccatacgttatgcaaccaacaggtgctgtgattacaccaaccatggaccatcccatgtcaatgcagccagccaacatgatgggcccactgacacagcagatgaatcacctttcgttgggcacaacaggaacgattcaatcccaagacaggattatgatactccaccagctgttgtgtcagtatatgactgctgctgctcctatgcaagggacctacattcctcagtacacgcctgtgcctccgacagctgtttctattgaaggtgttgttgctgatacctctccccagacagtggcaccttcatcccaggacaccagtggtcagcagcaacagatagcagtggacacatccaacgaacatgcacctgcatattcttaccaacagtctaaaccataaacaggactgaagaatgtctgtctgaatctttgccttgaatgaagaaacttcattgaacaagaagttggcttccagtttgcacagacgtcaatggaatgcatttttttgttgttgttgttgttttttttttagtgttataccttacccaatgaaagcaaagtttttatgtgctgtgcaaatggtcttcatgtggtctgacaatttatttttgccatcatttttttaattaaagaaaaaatttccagaagaggaaaaaaaaactacaaaaaacaaaacattgaaggttgatattttatgtggaagaacatttgaattgaattcagaatttttctgaaggtgtagatactttttttttttttttaacagaaaacctgatgtcaagaggtgggcaatagaaatggaaacaaattgtcttcctcaataattaagctactttctctttttcccttcttgttttaatctagtgggttttttattttattttttcttagaaatatgtaggtaaggtttatcttgaatcttaattgccttaattttaaggacgtcaaaggctctcgaggcaagctgtcaacgtcttgttgaaaacaaaaatcaagaaagaattgaaatactgtgccggctttcactggcacagaagtttaagactatgagtttttagggtgaagaaaaaactgtacagtttaaatgaaaatgtttttcttcatttgaagaaaatttgttgataaaccatggcaactgcaagaattggaaaaatgctgggacttttcatgaactttgtcttaagtgttgacatgaatcattctaaaaggctaaaacattttacagtaaagttattaaggttggtttaaaaacaactgcattagaaataatgcgtgtttggggggcagaatgcagatttttttaatttacaaagcgtgatcgctagcaaaagcattagtgctttttatctgcagtcttttttatgagctttacaaagtttttagtcagctttgcttgtcacattgcaaaacctagcttaagagcattaaaaaaaaaaacttaagtagataggagcttatggtcaaaaagtgcaaaaaaaaaaacaaaaaaaaagcaatagatagagaaattgttgacaatttctgtagtctttcctagttgtgatcaaattcagcctatggatggcctattttataccaaagatgaagtgacaccctattacagtccagaagatagaggttgttttcgtttcttttctttttaaaaaaaaaaaaatttatttgaccgacatggccggaccagttctttctttgttgtttgtttaaactaccttccactggtgttttacatagtgcaaaaaaaaaaagagggtggggggagttgtctctcttttctttaaatgtgtattcattgatagcagaagcttgtacctgctgtgtttagcagtttcagcatgaagagttctggatatgaactgattcatagagccaagtggctttaaattctgtgagcttttctggtttctcactagctgtcttgaatagtgaaacctgtattgatggccactagtaaaccaagatgcttatttaacaggtggaatattctttatatgaaatttcagctaaagacactttctggacctggtctgaaaggtcatttgtcaaaaaagcttagggatattctgtgaaatggtgagtggtctcctggaaaggtctcattgtatttgaacaatagtcttccctctaaattacaacacctctgggttttgtctttacacctctgtctttgtcatcacctaccatgaatagtcaccttggttttgcaaatggggagggggtatcatctttttgcctgttttcactgtatttttgtatattggtgttgccgaaagaactttttctttcagtttaattctttgaggcatgtaggaccaataagattgagaattctattggtggaatttagggaagtccttaaaatgctagttgacaatcaaggaacagtatgatttatatcaataagaaccaaaagaattaggtttgatcaatcatttaagccaaggaggaatacttgcatttagaacaatgcaaaactttgtctaaaatgaattaaattgacccacctgtaaaatatatctacatttttaattcatgagatgatatgtgttcaacctttacagttttacctgaaattaaggacaatggaatagaatttgttaagtgaaccattcactagattgctttctgaatgaatcctttgaatcaaataggtgaaactcttttcaaaaactaagtcagtcacaggagcctgtcttagtccaaaagaagcagggaaatgtatttaagtgtactataaaacagggtaggctttttaaaaactaaaaagttttaaaggtaaatcatattcccattaggtcaacatgagtaataaggttgactcatgtgaaattgtcaatattctactatttctgtaaactctggttctcttatttgcaaccccatgcactggaagcccaaatcagagaatgactccatatatttatggtcacattggagacaaaagtgtatccaagaaaatgtagtgtgcgttatagagaaattccaactggtcacactcaccattatggtttttcatgctttagagaaaatgctagatttatactgtcttttgttccatccttcagcttcccatgcattataaaggtggcacttaagtttttatctttgaaaagtgggccccaaagttttttggggtacaaaaagacatgtatgagaaccatattttctgtttctctttttcactctctaaactctttttgtataaataaggattatcctgggcataattcatttgaatatgaaaccaacatactttctttcatttttgtgaaaaaataaccaaaaacatgtattaatgtgatacaaagaaagtctcattcacacaatcaacaatgaggctaagaggtagctaccatgtggctaatgaatgtgcctaggtaacttcctgtttctattcaaaactgctgctttatttgtacattcagaaatatttttttcaactatgaaatttcaatatcaattttttaagccagtttctgcaaaaggaaatgacctgtcatttgatgtgttcatgtgtgttttgtgtttggatagtttatatcatgccattctataaaatgtatgttttcaaaccaaaaagaaaaaaaatagaaggaaaacaacggcacatactcaaatttgccctgctttgtctgttgtcttacctaagacttgttttgaagagccaagtctgggagagaaaaaaaagcatcaacaggtaagcagcattacattgtgtggtaataaaccaaaataagttttcaatatatacagacaacagaattcaaatttaatcaacaaaatatattgtagtgatttgtttgtttgtttgtttgagacggagtctcgctctgtcgcccatcctaactaggactataatctttttttttttctttaagttgaagttaattttctgtgcattctggtccaccagattttcaagcatttatttggatgtttccatttttccttttgactttaatagccaagacttagcttaaacatcaggaaacaaactaaagccacaatccaaatgagagaaacactgtctcgtctaaactctagtttcatggtcagtgcaacagtgagttttcttttaataatggtatggtattgtcaagggaggcaaagtgttcatggtaacttggagctccccaatacatggccatgtcttctaaagacaacgtaatgagcccaagtgaactgaaggtcatactggcaggtgctgatgacagtttgtccttgaatgctgacatgtcttgaatattgcaaatgtcataatactcttttaaaacagtcctctacctgactctagttttgcgaggattagtttgtttccttggtagatttcaacatttcagaatgttacctccaaatttcacttgaattacttcctcctgtgaccttagcagatctgtcacatttgaaagcatatgactcacttccacccccttctaatgaaaaactgcatggtgttaaaagcactctcattagaaatataaggctgagaactgaagaaggctgtttaaagcaggaatttcactttattttactatgcctaaaaatacatctttggaccccttgcaaagtgctttaaaagtactttcaatttatgcatgactccaaaaaagtaatttttttttcccaaaaaaacctctttatttaaataattgggatatttgctaaatacctatttttttttacagtggcctaaaacccctattaatgaaaagtgaaatttgatttaattaggactcttgcagtcatcttcacgactgaggagaagtttcaataggctgtctagacattatgatgttaataggagattaaaatacatttggcaattcattttcattcttaatttgagtgcatgaaccactgcagatgagctgataagcagaaattctcaagtgggtttcactaataaatgtttttttatatgatttgaaatcaagtaaagggacaatgtttatgtacgtgtataacaacattcagcacatttgaggaatcacacactataataaagcttaaacctgtcatagaaccttgatctatattactttgtcttcagtaaaaagtgaaggatgagattttgtctttcatgttattgtagctggcatgcttcaaaattttgagcttactgggactgacagcctctcacttcaatctgagggattgacagaatttaaacaggctcattgattctgtacactctacccttcctgtggcaagtgataatgggatttcattaatgaatcaatttgttttacaaatgacatccactgtggcattggaagacagttgggtctgactcaagtttaacatttcttaccaaacattcttaagtatgaaattggtcctttaatccaaatgctcttggtcatggctgtcctttgcggattacatagcattcaggaaagtacaaaaactaaacactaaatccccaactggccccaaagaccttttatgatgtgagagacaagagttcaccccagattaatttcttttatcattggctttatactctaacatatagatactctctatagcaaaaaagggatgaatggctttcaatattcatttctgtttatttttgtgagggaaaataatatatcaagaaaattttcttccacttagaaagctttaaagctgaagtagaggtgcagtcaagcttggatctgcaggaagaaccactaggccactgagtcatacttgagcttttcttactactgccccaatttctaaattgtgcataaatacaatcactctcaatttttgaagggctaattatctactttgtgggtgtgttttgttttttcttttcagcgtgtagggcttgggctctgtttccttttattagcatgtcacctgagggtggaacaaacaattggaaataaaatttgattattttatttcttataaagtattaatttcttaagggggtttgaaatcattggtaaaattaatatcagtacattatatgtcataaattttgattatctataatgtcttttcttatctaccacaaataattgagagttggctaaattcttgcagaatatatgggaaaaaaatcatagcaaagaattcagcttccctcaaaagaaagctatttttgtttccttcactccactaaatttgaaccagtagcacggatcaacacgacttctgcaatgagagtataacggtagctcttggtacagtcatattcatatttttaaatctttctttgaccaaaactattgcattgttttcattacattttgactgcgttacttattaaggccgaatgactttgacacccccgtggattatttttatgatcacatcaaatttaaacaatgtccaaagtgtaactttaatgttatattttgtttcaaaccctctggtctaagattattgagaaagatgttttttcctcctccctcaaatatgttatctcttcatatataaaaaaataagttattccatgcttttcaggaactgtaaaaattatttcaaaaagatatttgaaaaagttttctctattctggacacaaatgcttccatttatttcaaaagaagaagaagaaaaatggaatcttaatttaaaaaaatatatgtagtagtatctgctatgagatattcagtctctataaaaaaaaaaagggacacagcttcttttaaaacccttgtttcagtccatattcaacttcatggaacttctgaaacatcattcaattttgaactttatttaagagcatttttgtactgctgtctctgactgtcatggaaagttctgtaattctaaggtgtttctggttttatttttaatttcttcatctgtaccacagtcaaattagcaaccatctcccccatcccttgggctttctgtagatcagtggatgttaggtttaaacttctgttttctttgatgaagctttcaataaaaaatgaaaataaaatcaattgaa

SEQ ID NO: 177886 - DNA, 1547 bp, Homo sapiens
  Payload ID: 14904
  Gene Symbol: RBMS3
  Gene Name: RNA binding motif, single stranded interacting protein 3
  Uniprot ID: Q6XE24
  ENST ID: ENST00000452462
  CDS Start-End: 131-1396
gagtggtggagtctctgaagcctcatcagtcaccgggactgtcaggaatagtggtttaagaggaagctcggcctggggcactataccctgtcatccagttccctgcctcggagataaagattccagctacatgggcaaacgcctggatcagccacaaatgtacccccagtacacttactactatcctcattatctccaaaccaagcagtcctatgcaccagctccccaccccatggctcctcccagccccagcacaaacagcagcagcaacaacagcagcaacaacagcagcggggaacagttgagtaaaaccaacctgtacattcgaggcctcccaccaggcaccactgaccaggacctaatcaagctgtgccaaccgtatggaaaaattgtatctacaaaggcaattcttgacaaaaacacaaatcagtgcaaaggttatggttttgtagattttgacagtcctgcagccgcacagaaagcggtagcatctctcaaggcaaatggcgtgcaggcacagatggctaagcaacaagagcaagacccaacaaacctatacatctcaaatctccccatttctatggatgagcaggagcttgagaatatgctgaaaccctttggacatgtcatttccacaagaatactaagagacgctaatggagtcagcagaggtgttggctttgccagaatggagtctactgaaaaatgtgaagtggtaattcaacattttaatggaaaatatctgaaaacaccaccaggcatcccagcccccagtgagcctttgctgtgcaaattcgctgatggaggacaaaagaagcgacagaatcaaagcaaatatacccagaatgggaggccttggcccagggaaggagaggctggcatggctttgacctatgaccccacagctgccatacagaatggattttattcttcaccgtacagtattgcaaccaaccgcatgattccacagacatctatcacgccattcattgctgcttcccctgtctccacataccaggtccagagtacttcatggatgcctcatccgccatacgttatgcaaccaacaggtgctgtgattacaccaaccatggaccatcccatgtcaatgcagccagccaacatgatgggcccactgacacagcagatgaatcacctttcgttgggcacaacaggaacgtatatgactgctgctgctcctatgcaagggacctacattcctcagtacacgcctgtgcctccgacagctgtttctattgaaggtgttgttgctgatacctctccccagacagtggcaccttcatcccaggacaccagtggtcagcagcaacagatagcagtggacacatccaacgaacatgcacctgcatattcttaccaacagtctaaaccataaacaggactgaagaatgtctgtctgaatctttgccttgaatgaagaaacttcattgaacaagaagttggcttccagtttgcacagacgtcaatggaatgcatttttttgttgttgttgttgttttttttttagtgttataccttacccaatg

SEQ ID NO: 177887 - DNA, 1394 bp, Homo sapiens
  Payload ID: 14904
  Gene Symbol: RBMS3
  Gene Name: RNA binding motif, single stranded interacting protein 3
  Uniprot ID: Q6XE24
  ENST ID: ENST00000456853
  CDS Start-End: 67-1368
agctcggcctggggcactataccctgtcatccagttccctgcctcggagataaagattccagctacatgggcaaacgcctggatcagccacaaatgtacccccagtacacttactactatcctcattatctccaaaccaagcagtcctatgcaccagctccccaccccatggctcctcccagccccagcacaaacagcagcagcaacaacagcagcaacaacagcagcggggaacagttgagtaaaaccaacctgtacattcgaggcctcccaccaggcaccactgaccaggacctaatcaagctgtgccaaccgtatggaaaaattgtatctacaaaggcaattcttgacaaaaacacaaatcagtgcaaaggttatggttttgtagattttgacagtcctgcagccgcacagaaagcggtagcatctctcaaggcaaatggcgtgcaggcacagatggctaagcaacaagagcaagacccaacaaacctatacatctcaaatctccccatttctatggatgagcaggagcttgagaatatgctgaaaccctttggacatgtcatttccacaagaatactaagagacgctaatggagtcagcagaggtgttggctttgccagaatggagtctactgaaaaatgtgaagtggtaattcaacattttaatggaaaatatctgaaaacaccaccaggcatcccagcccccagtgagcctttgctgtgcaaattcgctgatggaggacaaaagaagcgacagaatcaaagcaaatatacccagaatgggaggccttggcccagggaaggagaggtactcagaggcaggactgtccctaggcaaaatcgtgaagctggcatggctttgacctatgaccccacagctgccatacagaatggattttattcttcaccgtacagtattgcaaccaaccgcatgattccacagacatctatcacgccattcattgctgcttcccctgtctccacataccaggtccagagtacttcatggatgcctcatccgccatacgttatgcaaccaacaggtgctgtgattacaccaaccatggaccatcccatgtcaatgcagccagccaacatgatgggcccactgacacagcagatgaatcacctttcgttgggcacaacaggaacgtatatgactgctgctgctcctatgcaagggacctacattcctcagtacacgcctgtgcctccgacagctgtttctattgaaggtgttgttgctgatacctctccccagacagtggcaccttcatcccaggacaccagtggtcagcagcaacagatagcagtggacacatccaacgaacatgcacctgcatattcttaccaacagtctaagtaagtctgggctgtgctaagctcttttcc

SEQ ID NO: 177888 - DNA, 1276 bp, Homo sapiens
  Payload ID: 14905
  Gene Symbol: RNPS1
  Gene Name: RNA binding protein S1, serine-rich domain
  Uniprot ID: Q15287
  ENST ID: ENST00000301730
  CDS Start-End: 241-1158
agagcggcgccggcctcggcggctgaggaaagcaggaggaggtggcggcggcgggaagatgacgcgcacctttccggaggatgggggaggtaaccgaggtcctgagccggtacctgaacttgggctgctctttggcgtaaattgcaatcgattagggatcgtttctcagaatcaagttagaagtgagagttcagataagtgaggccgccattgctgctttgaacacctcagaaggggagaatggatttatcaggagtgaaaaagaagagcttgctaggagtcaaagaaaataataaaaagtccagcactagggctccttcacctaccaaacgcaaagaccgctcagatgagaagtccaaggatcgctcaaaagataaaggggccaccaaggagtcgagtgagaaggatcgcggccgggacaaaacccgaaagaggcgcagcgcttccagtggtagcagcagtaccaggtctcggtccagctcgacttccagctcaggctccagcaccagcactggctcaagcagtggctccagctcttcctcagcatccagccgctcaggaagctccagcacctcccgcagctccagctctagcagctcttctggctctccaagtccttctcggcgcagacacgacaacaggaggcgctcccgctccaaatccaaaccacctaaaagagatgaaaaggagaggaaaaggcggagcccatctcctaagcccaccaaagtgcacattgggagactcacccggaatgtgacaaaggatcacatcatggagatattttccacctatgggaaaattaaaatgattgacatgcccgtggaaaggatgcatccccatctgtccaaaggctatgcgtacgtagagtttgagaatccagatgaagccgagaaggcgctgaagcacatggatggaggacaaattgatggccaggagatcactgccaccgccgtgctggccccctggcctaggccaccccccaggagattcagccctcccaggagaatgttgccaccaccgcctatgtggcgcaggtctcccccacggatgaggagaaggtcccgctccccgaggcgcaggtcccccgtgcgccggagatcacggtccccgggccgccgccgccacaggagccgctccagctccaactcctcccgataaacaggccactgaagctctcgcccctgtaacttataccccacccagctcagttttgtcacttttctagccaaaggaagaccagtaggaaagcaaacccttgactctggcaggatttgca

SEQ ID NO: 177889 - DNA, 2241 bp, Homo sapiens
  Payload ID: 14905
  Gene Symbol: RNPS1
  Gene Name: RNA binding protein S1, serine-rich domain
  Uniprot ID: Q15287
  ENST ID: ENST00000320225
  CDS Start-End: 476-1393
ggaaaggggcggggcacgggcgcgttaacaccctccgcgccggaggacgagcctcggtcatcgcgctgccctcccaggttcaacaggctacccatgtgcccgctccagtaagcgtgcaaccagcccggtcagtcccagggactttaccggctaggagacaccttgaacgtccccagcgcgactcccacaaactgccttgactctttaacgcttcctcgctggcgcccattgggccaggcgtttacgtcatcgctgcgcgccgggcggcggcgacttcccgctccttgactctgacgtcagagcggcgccggcctcggcggctgaggaaagcaggaggaggtggcggcggcgggaagatgctgctctttggcgtaaattgcaatcgattagggatcgtttctcagaatcaagttagaagtgagagttcagataagtgaggccgccattgctgctttgaacacctcagaaggggagaatggatttatcaggagtgaaaaagaagagcttgctaggagtcaaagaaaataataaaaagtccagcactagggctccttcacctaccaaacgcaaagaccgctcagatgagaagtccaaggatcgctcaaaagataaaggggccaccaaggagtcgagtgagaaggatcgcggccgggacaaaacccgaaagaggcgcagcgcttccagtggtagcagcagtaccaggtctcggtccagctcgacttccagctcaggctccagcaccagcactggctcaagcagtggctccagctcttcctcagcatccagccgctcaggaagctccagcacctcccgcagctccagctctagcagctcttctggctctccaagtccttctcggcgcagacacgacaacaggaggcgctcccgctccaaatccaaaccacctaaaagagatgaaaaggagaggaaaaggcggagcccatctcctaagcccaccaaagtgcacattgggagactcacccggaatgtgacaaaggatcacatcatggagatattttccacctatgggaaaattaaaatgattgacatgcccgtggaaaggatgcatccccatctgtccaaaggctatgcgtacgtagagtttgagaatccagatgaagccgagaaggcgctgaagcacatggatggaggacaaattgatggccaggagatcactgccaccgccgtgctggccccctggcctaggccaccccccaggagattcagccctcccaggagaatgttgccaccaccgcctatgtggcgcaggtctcccccacggatgaggagaaggtcccgctccccgaggcgcaggtcccccgtgcgccggagatcacggtccccgggccgccgccgccacaggagccgctccagctccaactcctcccgataaacaggccactgaagctctcgcccctgtaacttataccccacccagctcagttttgtcacttttctagccaaaggaagaccagtaggaaagcaaacccttgactctggcaggatttgcaggcagcaggcagcacccctctgccagccgggccccggctgcagaagtgctgttggtttggatgctgtgtgcctgtcaagattccctccggttttctggctagaaagctcatccgtttccggtttctaagagtcagttcagtggcagagccaccagggaaaagtgaggctcttgggggtggtttgaccctgcttacctgggagcacacttttcccttccccgatgacctgggatggtggccaggccgtgcccttgctgttgctgggcagtgtccttttggaaagggagctgccccaggctttagtgcagctgccaaccctgttaggcctggcctctcgaggcctcttctgacctcaagggtcacaccccctcaaagatcctctcacccatggtagttgctgctcgtggttctgtctgtccgtgcaccgatgcacacaccgcaccccaccactgtactctgaaattggcgagtgagtggagagccagctctgcggagtcatcacgcagccatggttgtgcctgccgttcatggtggtctttcaggttatcttggcaacatgtacattgcttttattttttttcttttttgctttcattgtacagtcagtactataaaatttctcttttgagttttatacctttgtagcattttagatgacattgtgtttgtactttgttgtgtagagtggaagaattgtgttgaataaacccaagatcggaatgcaaatcta

SEQ ID NO: 177890 - DNA, 2069 bp, Homo sapiens
  Payload ID: 14905
  Gene Symbol: RNPS1
  Gene Name: RNA binding protein S1, serine-rich domain
  Uniprot ID: Q15287
  ENST ID: ENST00000397086
  CDS Start-End: 304-1221
gctgcggacggaagggcgcctgtgcttcgtccgctcggcggtggcccagccaggcccgcgggactcagaccagcggggagcgcggcctccgcccttggggccctcccgccgggccggagacccaagcccccaacgccaggccctgccctggaagcgctcgcggcccggcgcctggacgggggagttgctgctctttggcgtaaattgcaatcgattagggatcgtttctcagaatcaagttagaagtgagagttcagataagtgaggccgccattgctgctttgaacacctcagaaggggagaatggatttatcaggagtgaaaaagaagagcttgctaggagtcaaagaaaataataaaaagtccagcactagggctccttcacctaccaaacgcaaagaccgctcagatgagaagtccaaggatcgctcaaaagataaaggggccaccaaggagtcgagtgagaaggatcgcggccgggacaaaacccgaaagaggcgcagcgcttccagtggtagcagcagtaccaggtctcggtccagctcgacttccagctcaggctccagcaccagcactggctcaagcagtggctccagctcttcctcagcatccagccgctcaggaagctccagcacctcccgcagctccagctctagcagctcttctggctctccaagtccttctcggcgcagacacgacaacaggaggcgctcccgctccaaatccaaaccacctaaaagagatgaaaaggagaggaaaaggcggagcccatctcctaagcccaccaaagtgcacattgggagactcacccggaatgtgacaaaggatcacatcatggagatattttccacctatgggaaaattaaaatgattgacatgcccgtggaaaggatgcatccccatctgtccaaaggctatgcgtacgtagagtttgagaatccagatgaagccgagaaggcgctgaagcacatggatggaggacaaattgatggccaggagatcactgccaccgccgtgctggccccctggcctaggccaccccccaggagattcagccctcccaggagaatgttgccaccaccgcctatgtggcgcaggtctcccccacggatgaggagaaggtcccgctccccgaggcgcaggtcccccgtgcgccggagatcacggtccccgggccgccgccgccacaggagccgctccagctccaactcctcccgataaacaggccactgaagctctcgcccctgtaacttataccccacccagctcagttttgtcacttttctagccaaaggaagaccagtaggaaagcaaacccttgactctggcaggatttgcaggcagcaggcagcacccctctgccagccgggccccggctgcagaagtgctgttggtttggatgctgtgtgcctgtcaagattccctccggttttctggctagaaagctcatccgtttccggtttctaagagtcagttcagtggcagagccaccagggaaaagtgaggctcttgggggtggtttgaccctgcttacctgggagcacacttttcccttccccgatgacctgggatggtggccaggccgtgcccttgctgttgctgggcagtgtccttttggaaagggagctgccccaggctttagtgcagctgccaaccctgttaggcctggcctctcgaggcctcttctgacctcaagggtcacaccccctcaaagatcctctcacccatggtagttgctgctcgtggttctgtctgtccgtgcaccgatgcacacaccgcaccccaccactgtactctgaaattggcgagtgagtggagagccagctctgcggagtcatcacgcagccatggttgtgcctgccgttcatggtggtctttcaggttatcttggcaacatgtacattgcttttattttttttcttttttgctttcattgtacagtcagtactataaaatttctcttttgagttttatacctttgtagcattttagatgacattgtgtttgtactttgttgtgtagagtggaagaattgtgttgaataaacccaagatcggaatgcaaatcta

SEQ ID NO: 177891 - DNA, 1092 bp, Homo sapiens
  Payload ID: 14905
  Gene Symbol: RNPS1
  Gene Name: RNA binding protein S1, serine-rich domain
  ENST ID: ENST00000561518
  CDS Start-End: 240-1092
gtaagttggggcggaatccgactgcatccgtgtttcgggggctgcccggcaggcccggcaggacgcctcgtgaagccggtccactcctcagccccgcagtgcggcggtggcctggcagcgcggctgctctttggcgtaaattgcaatcgattagggatcgtttctcagaatcaagttagaagtgagagttcagataagtgaggccgccattgctgctttgaacacctcagaaggggagaatggatttatcaggagtgaaaaagaagagcttgctaggagtcaaagaaaataataaaaagtccagcactagggctccttcacctaccaaacgcaaagaccgctcagatgagaagtccaaggatcgctcaaaagataaaggggccaccaaggagtcgagtgagaaggatcgcggccgggacaaaacccgaaagaggcgcagcgcttccagtggtagcagcagtaccaggtctcggtccagctcgacttccagctcaggctccagcaccagcactggctcaagcagtggctccagctcttcctcagcatccagccgctcaggaagctccagcacctcccgcagctccagctctagcagctcttctggctctccaagtccttctcggcgcagacacgacaacaggaggcgctcccgctccaaatccaaaccacctaaaagagatgaaaaggagaggaaaaggcggagcccatctcctaagcccaccaaagtgcacattgggagactcacccggaatgtgacaaaggatcacatcatggagatattttccacctatgggaaaattaaaatgattgacatgcccgtggaaaggatgcatccccatctgtccaaaggctatgcgtacgtagagtttgagaatccagatgaagccgagaaggcgctgaagcacatggatggaggacaaattgatggccaggagatcactgccaccgccgtgctggccccctggcctaggccaccccccaggagattcagccctcccaggagaatgttgccaccaccgcctatgtggcgcaggtctcccccacggatgaggagaaggtcccgctccccgaggcgcaggtcccccgtgcgcc

SEQ ID NO: 177892 - DNA, 830 bp, Homo sapiens
  Payload ID: 14905
  Gene Symbol: RNPS1
  Gene Name: RNA binding protein S1, serine-rich domain
  ENST ID: ENST00000567147
  CDS Start-End: 16-789
ggcggcggcgggaagatggctccttcacctaccaaacgcaaagaccgctcagatgagaagtccaaggatcgctcaaaagataaaggggccaccaaggagtcgagtgagaaggatcgcggccgggacaaaacccgaaagaggcgcagcgcttccagtggtagcagcagtaccaggtctcggtccagctcgacttccagctcaggctccagcaccagcactggctcaagcagtggctccagctcttcctcagcatccagccgctcaggaagctccagcacctcccgcagctccagctctagcagctcttctggctctccaagtccttctcggcgcagacacgacaacaggaggcgctcccgctccaaatccaaaccacctaaaagagatgaaaaggagaggaaaaggcggagcccatctcctaagcccaccaaagtgcacattgggagactcacccggaatgtgacaaaggatcacatcatggagatattttccacctatgggaaaattaaaatgattgacatgcccgtggaaaggatgcatccccatctgtccaaaggctatgcgtacgtagagtttgagaatccagatgaagccgagaaggcgctgaagcacatggatggaggtcccgctccccgaggcgcaggtcccccgtgcgccggagatcacggtccccgggccgccgccgccacaggagccgctccagctccaactcctcccgataaacaggccactgaagctctcgcccctgtaacttataccccacccagctcagttttgtcacttttctagccaaaggaagaccagtaggaaagcaaacccttgactctggc

SEQ ID NO: 177893 - DNA, 479 bp, Homo sapiens
  Payload ID: 14905
  Gene Symbol: RNPS1
  Gene Name: RNA binding protein S1, serine-rich domain
  ENST ID: ENST00000565333
  CDS Start-End: 225-479
tgaagatttgtgccgaaacgccctctcctcgagatttaactaattgttctctcctctctctggctgttggacgcgcacctttccggaggatgggggaggtaaccgaggctgctctttggcgtaaattgcaatcgattagggatcgtttctcagaatcaagttagaagtgagagttcagataagtgaggccgccattgctgctttgaacacctcagaaggggagaatggatttatcaggagtgaaaaagaagagcttgctaggagtcaaagaaaataataaaaagtccagcactagggctccttcacctaccaaacgcaaagaccgctcagatgagaagtccaaggatcgctcaaaagataaaggggccaccaaggagtcgagtgagaaggatcgcggccgggacaaaacccgaaagaggcgcagcgcttccagtggtagcagcagtaccaggtctcggtccagctcgacttccagctca

SEQ ID NO: 177894 - DNA, 870 bp, Homo sapiens
  Payload ID: 14905
  Gene Symbol: RNPS1
  Gene Name: RNA binding protein S1, serine-rich domain
  ENST ID: ENST00000564311
  CDS Start-End: 155-625
tgaggaaagcaggaggaggtggcggcggcgggaagatgctgctctttggcgtaaattgcaatcgattagggatcgtttctcagaatcaagttagaagtgagagttcagataagtgaggccgccattgctgctttgaacacctcagaaggggagaatggatttatcaggagtgaaaaagaagagcttgctaggagtcaaagaaaataataaaaagtccagcactagggctccttcacctaccaaacgcaaagaccgctcagatgagaagtccaaggatcgctcaaaagataaaggggccaccaaggagtcgagtgagaaggatcgcggccgggacaaaacccgaaagaggcgcagcgcttccagtggtagcagcagtaccaggtctcggtccagctcgacttccagctcaggctccagcaccagcactggctcaagcagtggctccagctcttcctcagcatccagccgctcaggaagctccagcacctcccgcagctccagctctagcagctcttctggctctccaaatccaaaccacctaaaagagatgaaaaggagaggaaaaggcggagcccatctcctaagcccaccaaagtgcacattgggagactcacccggaatgtgacaaaggatcacatcatggagatattttccacctatgggaaaattaaaatgattgacatgcccgtggaaaggatgcatccccatctgtccaaaggctatgcgtacgtagagtttgagaatccagatgaagccgagaaggcgctgaagcacatggatggaggacaaattgatggccaggagatcactgccaccgccgtgctggccccctggcctaggccaccccccaggagattcagccctcccagg

SEQ ID NO: 177895 - DNA, 574 bp, Homo sapiens
  Payload ID: 14905
  Gene Symbol: RNPS1
  Gene Name: RNA binding protein S1, serine-rich domain
  ENST ID: ENST00000569709
  CDS Start-End: 281-574
tgaaatgtacttttaaatggggaaggtgctctgaagatttgtgccgaaacgccctctcctcgagatttaactaattgttctctcctctctctggctgttggacgcgcacctttccggaggatgggggaggtaaccgaggtcctgagccggtacctgaacttgggctgctctttggcgtaaattgcaatcgattagggatcgtttctcagaatcaagttagaagtgagagttcagataagtgaggccgccattgctgctttgaacacctcagaaggggagaatggatttatcaggagtgaaaaagaagagcttgctaggagtcaaagaaaataataaaaagtccagcactagggctccttcacctaccaaacgcaaagaccgctcagatgagaagtccaaggatcgctcaaaagataaaggggccaccaaggagtcgagtgagaaggatcgcggccgggacaaaacccgaaagaggcgcagcgcttccagtggtagcagcagtctcggtccagctcgacttccagctcaggctccagcaccagcactggctcaagcagtggctccagctcttcct

SEQ ID NO: 177896 - DNA, 1806 bp, Homo sapiens
  Payload ID: 14905
  Gene Symbol: RNPS1
  Gene Name: RNA binding protein S1, serine-rich domain
  ENST ID: ENST00000561718
  CDS Start-End: 595-981
cggcgggaagatgtaagttggggcggaatccgactgcatccgtgtttcgggggctgcccggcaggcccggcaggacgcctcgtgaagccggtccactcctcagccccgcagtgcggcggtggcctggcagcgcgggctccttcacctaccaaacgcaaagaccgctcagatgagaagtccaaggatcgctcaaaagataaaggggccaccaaggagtcgagtgagaaggatcgcggccgggacaaaacccgaaagaggcgcagcgcttccagtggtagcagcagtaccaggtctcggtccagctcgacttccagctcaggctccagcaccagcactggctcaagcagtggctccagctcttcctcagcatccagccgctcaggaagctccagcacctcccgcagctccagctctagcagctcttctggctctccaagtccttctcggcgcagacacgacaacaggaggcgctcccgctccaaatccaaaccacctaaaagagatgaaaaggagaggaaaaggcggagcccatctcctaagcccaccaaagtgcacattgggagactcacccggaatgtgacaaaggatcacatcatggagatattttccacctatgggaaaattaaaatgattgacatgcccgtggaaaggatgcatccccatctgtccaaaggctatgcgtacgtagagtttgagaatccagatgaagccgagaaggcgctgaagcacatggatggaggacaaattgatggccaggagatcactgccaccgccgtgctggccccctggcctaggccaccccccaggagattcagccctcccaggagaatgttgccaccaccgcctatgtggcgcaggtctcccccacggatgaggagaaggtcccgctccccgaggcgcaggtcccccgtgcgccggagatcacggtccccgggccgccgccgccacaggagccgctccagctccaactcctcccgataaacaggccactgaagctctcgcccctgtaacttataccccacccagctcagttttgtcacttttctagccaaaggaagaccagtaggaaagcaaacccttgactctggcaggatttgcaggcagcaggcagcacccctctgccagccgggccccggctgcagaagtgctgttggtttggatgctgtgtgcctgtcaagattccctccggttttctggctagaaagctcatccgtttccggtttctaagagtcagttcagtggcagagccaccagggaaaagtgaggctcttgggggtggtttgaccctgcttacctgggagcacacttttcccttccccgatgacctgggatggtggccaggccgtgcccttgctgttgctgggcagtgtccttttggaaagggagctgccccaggctttagtgcagctgccaaccctgttaggcctggcctctcgaggcctcttctgacctcaagggtcacaccccctcaaagatcctctcacccatggtagttgctgctcgtggttctgtctgtccgtgcaccgatgcacacaccgcaccccaccactgtactctgaaattggcgagtgagtggagagccagctctgcggagtcatcacgcagccatggttgtgcctgccgttcatggtggtctttcaggttatcttggcaacatgtacattgcttttattttttttcttttttgctttcattgtacagtcagtactataaaatttctcttttgagttttatacctttgtagcattttagatgacattgtgtttgtactttgttgtgtagagtggaagaattgtgttgaataaa

SEQ ID NO: 177897 - DNA, 1685 bp, Homo sapiens
  Payload ID: 14905
  Gene Symbol: RNPS1
  Gene Name: RNA binding protein S1, serine-rich domain
  ENST ID: ENST00000566397
  CDS Start-End: 461-847
ggctccttcacctaccaaacgcaaagaccgctcagatgagaagtccaaggatcgctcaaaagataaaggggccaccaaggagtcgagtgagaaggatcgcggccgggacaaaacccgaaagaggcgcagcgcttccagtggtagcagcagtaccaggtctcggtccagctcgacttccagctcaggctccagcaccagcactggctcaagcagtggctccagctcttcctcagcatccagccgctcaggaagctccagcacctcccgcagctccagctctagcagctcttctggctctccaagtccttctcggcgcagacacgacaacaggaggcgctcccgctccaaatccaaaccacctaaaagagatgaaaaggagaggaaaaggcggagcccatctcctaagcccaccaaagtgcacattgggagactcacccggaatgtgacaaaggatcacatcatggagatattttccacctatgggaaaattaaaatgattgacatgcccgtggaaaggatgcatccccatctgtccaaaggctatgcgtacgtagagtttgagaatccagatgaagccgagaaggcgctgaagcacatggatggaggacaaattgatggccaggagatcactgccaccgccgtgctggccccctggcctaggccaccccccaggagattcagccctcccaggagaatgttgccaccaccgcctatgtggcgcaggtctcccccacggatgaggagaaggtcccgctccccgaggcgcaggtcccccgtgcgccggagatcacggtccccgggccgccgccgccacaggagccgctccagctccaactcctcccgataaacaggccactgaagctctcgcccctgtaacttataccccacccagctcagttttgtcacttttctagccaaaggaagaccagtaggaaagcaaacccttgactctggcaggatttgcaggcagcaggcagcacccctctgccagccgggccccggctgcagaagtgctgttggtttggatgctgtgtgcctgtcaagattccctccggttttctggctagaaagctcatccgtttccggtttctaagagtcagttcagtggcagagccaccagggaaaagtgaggctcttgggggtggtttgaccctgcttacctgggagcacacttttcccttccccgatgacctgggatggtggccaggccgtgcccttgctgttgctgggcagtgtccttttggaaagggagctgccccaggctttagtgcagctgccaaccctgttaggcctggcctctcgaggcctcttctgacctcaagggtcacaccccctcaaagatcctctcacccatggtagttgctgctcgtggttctgtctgtccgtgcaccgatgcacacaccgcaccccaccactgtactctgaaattggcgagtgagtggagagccagctctgcggagtcatcacgcagccatggttgtgcctgccgttcatggtggtctttcaggttatcttggcaacatgtacattgcttttattttttttcttttttgctttcattgtacagtcagtactataaaatttctcttttgagttttatacctttgtagcattttagatgacattgtgtttgtactttgttgtgtagagtggaagaattgtgttgaataaacccaagatcggaa

SEQ ID NO: 177898 - DNA, 314 bp, Homo sapiens
  Payload ID: 14905
  Gene Symbol: RNPS1
  Gene Name: RNA binding protein S1, serine-rich domain
  ENST ID: ENST00000564822
  CDS Start-End: 227-314
agagcggcgccggcctcggcggctgaggaaagcaggaggaggtggcggcggcgggaagatgacgcgcacctttccggaggatgggggaggtaaccgaggtcctgagccggctgctctttggcgtaaattgcaatcgattagggatcgtttctcagaatcaagttagaagtgagagttcagataagtgaggccgccattgctgctttgaacacctcagaaggggagaatggatttatcaggagtgaaaaagaagagcttgctaggagtcaaagaaaataataaaaagtccagcactagggctccttcacctacca

SEQ ID NO: 177899 - DNA, 2037 bp, Homo sapiens
  Payload ID: 14905
  Gene Symbol: RNPS1
  Gene Name: RNA binding protein S1, serine-rich domain
  Uniprot ID: Q15287
  ENST ID: ENST00000566458
  CDS Start-End: 342-1190
acgggcgcgttaacaccctccgcgccggaggacgagcctcggtcatcgcgctgccctcccaggttcaacaggctacccatgtgcccgctccagtaagcgtgcaaccagcccggtcagtcccagggactttaccggctaggagacaccttgaacgtccccagcgcgactcccacaaactgccttgactctttaacgcttcctcgctggcgcccattgggccaggcgtttacgtcatcgctgcgcgccgggcggcggcgacttcccgctccttgactctgacgtcagagcggcgccggcctcggcggctgaggaaagcaggaggaggtggcggcggcgggaagatggctccttcacctaccaaacgcaaagaccgctcagatgagaagtccaaggatcgctcaaaagataaaggggccaccaaggagtcgagtgagaaggatcgcggccgggacaaaacccgaaagaggcgcagcgcttccagtggtagcagcagtaccaggtctcggtccagctcgacttccagctcaggctccagcaccagcactggctcaagcagtggctccagctcttcctcagcatccagccgctcaggaagctccagcacctcccgcagctccagctctagcagctcttctggctctccaagtccttctcggcgcagacacgacaacaggaggcgctcccgctccaaatccaaaccacctaaaagagatgaaaaggagaggaaaaggcggagcccatctcctaagcccaccaaagtgcacattgggagactcacccggaatgtgacaaaggatcacatcatggagatattttccacctatgggaaaattaaaatgattgacatgcccgtggaaaggatgcatccccatctgtccaaaggctatgcgtacgtagagtttgagaatccagatgaagccgagaaggcgctgaagcacatggatggaggacaaattgatggccaggagatcactgccaccgccgtgctggccccctggcctaggccaccccccaggagattcagccctcccaggagaatgttgccaccaccgcctatgtggcgcaggtctcccccacggatgaggagaaggtcccgctccccgaggcgcaggtcccccgtgcgccggagatcacggtccccgggccgccgccgccacaggagccgctccagctccaactcctcccgataaacaggccactgaagctctcgcccctgtaacttataccccacccagctcagttttgtcacttttctagccaaaggaagaccagtaggaaagcaaacccttgactctggcaggatttgcaggcagcaggcagcacccctctgccagccgggccccggctgcagaagtgctgttggtttggatgctgtgtgcctgtcaagattccctccggttttctggctagaaagctcatccgtttccggtttctaagagtcagttcagtggcagagccaccagggaaaagtgaggctcttgggggtggtttgaccctgcttacctgggagcacacttttcccttccccgatgacctgggatggtggccaggccgtgcccttgctgttgctgggcagtgtccttttggaaagggagctgccccaggctttagtgcagctgccaaccctgttaggcctggcctctcgaggcctcttctgacctcaagggtcacaccccctcaaagatcctctcacccatggtagttgctgctcgtggttctgtctgtccgtgcaccgatgcacacaccgcaccccaccactgtactctgaaattggcgagtgagtggagagccagctctgcggagtcatcacgcagccatggttgtgcctgccgttcatggtggtctttcaggttatcttggcaacatgtacattgcttttattttttttcttttttgctttcattgtacagtcagtactataaaatttctcttttgagttttatacctttgtagcattttagatgacattgtgtttgtactttgttgtgtagagtggaagaattgtgttgaataaacccaagatcggaatgcaaatct

SEQ ID NO: 177900 - DNA, 1514 bp, Homo sapiens
  Payload ID: 14905
  Gene Symbol: RNPS1
  Gene Name: RNA binding protein S1, serine-rich domain
  ENST ID: ENST00000565870
  CDS Start-End: 608-1514
gtgttttgatgctggtaccagtcgcttttgaaatgatttttgcttccagtcacatccagtgtatcctaaggggaaattgcaataaaacaggagatctaatcctatctggagaccacccttgagttaggtttttctctgttctgcatgtgaatgtggtgctgtggcattttgaaaggactgcaggggctcatcaaacttgtgggtgaaaactgaattgttcagcctgtaaaataacagtgatggtctccaccatctccattttttaagaaaaagatacgctggggcgacagttgtacctgtgcctcctctgcggggtagagacgcctccaggagcacatggggactgtccctatgtgttcctgactgtgtggacacttattgcttaccgtgctcccttgctgcctttttgtgtgctcagcttttgactgcaaagtagacttgttgccttgccaattcgttcactctttaaacccttttatcttgttattaggctgctctttggcgtaaattgcaatcgattagggatcgtttctcagaatcaagttagaagtgagagttcagataagtgaggccgccattgctgctttgaacacctcagaaggggagaatggatttatcaggagtgaaaaagaagagcttgctaggagtcaaagaaaataataaaaagtccagcactagggctccttcacctaccaaacgcaaagaccgctcagatgagaagtccaaggatcgctcaaaagataaaggggccaccaaggagtcgagtgagaaggatcgcggccgggacaaaacccgaaagaggcgcagcgcttccagtggtagcagcagtaccaggtctcggtccagctcgacttccagctcaggctccagcaccagcactggctcaagcagtggctccagctcttcctcagcatccagccgctcaggaagctccagcacctcccgcagctccagctctagcagctcttctggctctccaagtccttctcggcgcagacacgacaacaggaggcgctcccgctccaaatccaaaccacctaaaagagatgaaaaggagaggaaaaggcggagcccatctcctaagcccaccaaagtgcacattgggagactcacccggaatgtgacaaaggatcacatcatggagatattttccacctatgggaaaattaaaatgattgacatgcccgtggaaaggatgcatccccatctgtccaaaggctatgcgtacgtagagtttgagaatccagatgaagccgagaaggcgctgaagcacatggatggaggacaaattgatggccaggagatcactgccaccgccgtgctggccccctggcctaggccaccccccaggagattcagccctcccaggagaatgttgccaccaccgcctatgtggcgcaggtctcccccacggatgaggagaaggtcccgctccccgaggcgcaggtcccccgtgcgccggagatcacggtccccgggccgccgccgccacaggagccgctccagctccaact

SEQ ID NO: 177901 - DNA, 582 bp, Homo sapiens
  Payload ID: 14905
  Gene Symbol: RNPS1
  Gene Name: RNA binding protein S1, serine-rich domain
  ENST ID: ENST00000562690
  CDS Start-End: 202-582
ggctgaggaaagcaggaggaggtggcggcggcgggaagatgatgggggaggtaaccgaggtcctgagccggtacctgaacttgggctgctctttggcgtaaattgcaatcgattagggatcgtttctcagaatcaagttagaagtgagagttcagataagtgaggccgccattgctgctttgaacacctcagaaggggagaatggatttatcaggagtgaaaaagaagagcttgctaggagtcaaagaaaataataaaaagtccagcactagggctccttcacctaccaaacgcaaagaccgctcagatgagaagtccaaggatcgctcaaaagataaaggggccaccaaggagtcgagtgagaaggatcgcggccgggacaaaacccgaaagaggcgcagcgcttccagtggtagcagcagtaccaggtctcggtccagctcgacttccagctcaggctccagcaccagcactggctcaagcagtggctccagctcttcctcagcatccagccgctcaggaagctccagcacctcccgcagctccagctctagcagctcttctggctctccaagtccttct

SEQ ID NO: 177902 - DNA, 666 bp, Homo sapiens
  Payload ID: 14905
  Gene Symbol: RNPS1
  Gene Name: RNA binding protein S1, serine-rich domain
  ENST ID: ENST00000565589
  CDS Start-End: 532-666
taattgtcaccatattgatgatgagaaacttgagaaaggataagtgacttgtctaaaatcacacagtaaaacctcaaatcaaacccaggccctctggctccagactctaaattatactctgaatgatactcactgattgtccgaggacacaaagagtgtcgaggcactatctgctgggtgtctgcagaaccttactgttctaaagcaaaacattttacccctggacaagagcagcaaaggtggcgttcggccctccttggctctcatttgactgttcaaagccaggtgcttttctttcttgggtcagaacgtattttcagcagcattttgaagcacccctggcgtgcactgcacagggaaaccaggaccacattggtgtgctgtgtcctccttaccaactggctcttggagaaggctgctctttggcgtaaattgcaatcgattagggatcgtttctcagaatcaagttagaagtgagagttcagataagtgaggccgccattgctgctttgaacacctcagaaggggagaatggatttatcaggagtgaaaaagaagagcttgctaggagtcaaagaaaataataaaaagtccagcactagggctccttcacctaccaaacgcaaagaccgctcagatgagaagtccaaggatcgctcaaaagat

SEQ ID NO: 177903 - DNA, 639 bp, Homo sapiens
  Payload ID: 14905
  Gene Symbol: RNPS1
  Gene Name: RNA binding protein S1, serine-rich domain
  ENST ID: ENST00000564764
  CDS Start-End: 190-639
tggctgttggacgcgcacctttccggaggatgggggaggtaaccgaggtcctgagccggtacctgaacttgggctgctctttggcgtaaattgcaatcgattagggatcgtttctcagaatcaagttagaagtgagagttcagataagtgaggccgccattgctgctttgaacacctcagaaggggagaatggatttatcaggagtgaaaaagaagagcttgctaggagtcaaagaaaataataaaaagtccagcactagggctccttcacctaccaaacgcaaagaccgctcagatgagaagtccaaggatcgctcaaaagataaaggggccaccaaggagtcgagtgagaaggatcgcggccgggacaaaacccgaaagaggcgcagcgcttccagtggtagcagcagtaccaggtctcggtccagctcgacttccagctcaggctccagcaccagcactggctcaagcagtggctccagctcttcctcagcatccagccgctcaggaagctccagcacctcccgcagctccagctctagcagctcttctggctctccaagtccttctcggcgcagacacgacaacaggaggcgctcccgctccaaatccaaaccacctaaaagagatgaaaaggag

SEQ ID NO: 177904 - DNA, 814 bp, Homo sapiens
  Payload ID: 14905
  Gene Symbol: RNPS1
  Gene Name: RNA binding protein S1, serine-rich domain
  ENST ID: ENST00000566180
  CDS Start-End: 396-814
gcgcctgtgcttcgtccgctcggcggtggcccagccaggcccgcgggactcagaccagcggggagcgcggcctccgcccttggggccctcccgccgggccggagacccaagcccccaacgccaggccctgccctggaagcgctcgcggcccggcgcctggacgggggagttaacgtattttcagcagcattttgaagcacccctggcgtgcactgcacagggaaaccaggaccacattggtgtgctgtgtcctccttaccaactggctcttggagaaggctgctctttggcgtaaattgcaatcgattagggatcgtttctcagaatcaagttagaagtgagagttcagataagtgaggccgccattgctgctttgaacacctcagaaggggagaatggatttatcaggagtgaaaaagaagagcttgctaggagtcaaagaaaataataaaaagtccagcactagggctccttcacctaccaaacgcaaagaccgctcagatgagaagtccaaggatcgctcaaaagataaaggggccaccaaggagtcgagtgagaaggatcgcggccgggacaaaacccgaaagaggcgcagcgcttccagtggtagcagcagtaccaggtctcggtccagctcgacttccagctcaggctccagcaccagcactggctcaagcagtggctccagctcttcctcagcatccagccgctcaggaagctccagcacctcccgcagctccagctctagcagctcttctggctctccaagtccttctcggcgcagacacgacaacaggaggcgctcccgctccaa

SEQ ID NO: 177905 - DNA, 903 bp, Homo sapiens
  Payload ID: 14905
  Gene Symbol: RNPS1
  Gene Name: RNA binding protein S1, serine-rich domain
  ENST ID: ENST00000564601
  CDS Start-End: 396-903
ggccgctgcggacggaagggcgcctgtgcttcgtccgctcggcggtggcccagccaggcccgcgggactcagaccagcggggagcgcggcctccgcccttggggccctcccgccgggccggagacccaagcccccaacgccaggccctgccctggaagcgctcgcggcccggcgcctggacgggggagttgtgagtgaacgcggacgggtagcggcgaggtcggcgtgtcgggccggtgtcggcgggcgcggagtttctttgtgggatgcggtggaaggctgctctttggcgtaaattgcaatcgattagggatcgtttctcagaatcaagttagaagtgagagttcagataagtgaggccgccattgctgctttgaacacctcagaaggggagaatggatttatcaggagtgaaaaagaagagcttgctaggagtcaaagaaaataataaaaagtccagcactagggctccttcacctaccaaacgcaaagaccgctcagatgagaagtccaaggatcgctcaaaagataaaggggccaccaaggagtcgagtgagaaggatcgcggccgggacaaaacccgaaagaggcgcagcgcttccagtggtagcagcagtaccaggtctcggtccagctcgacttccagctcaggctccagcaccagcactggctcaagcagtggctccagctcttcctcagcatccagccgctcaggaagctccagcacctcccgcagctccagctctagcagctcttctggctctccaagtccttctcggcgcagacacgacaacaggaggcgctcccgctccaaatccaaaccacctaaaagagatgaaaaggagaggaaaaggcggagcccatctcctaagcccaccaaagtgcacattgggagactcaccc

SEQ ID NO: 177906 - DNA, 2298 bp, Homo sapiens
  Payload ID: 14905
  Gene Symbol: RNPS1
  Gene Name: RNA binding protein S1, serine-rich domain
  Uniprot ID: Q15287
  ENST ID: ENST00000565678
  CDS Start-End: 547-1464
cggagtttctttgtgggatgcggtggaaggtcggccgatccccccttcggagtcattaattcaaacgtgtactccgcgaacgtttcccggactcccgtgtgcaattatcggcgctaggccgtggggatacggcccactatggaccgagcacggtggccgagctcagtttgatgggttaccccagaggggcggatacgggaaggttaagtttgttggaggagaaacgtggagtaggctttttgtcttgattccgcatgaactgtgcctgaaatgtacttttaaatggggaaggtgctctgaagatttgtgccgaaacgccctctcctcgagatttaactaattgttctctcctctctctggctgttggacgcgcacctttccggaggatgggggaggtaaccgaggtcctgagccggtacctgaacttgggctgctctttggcgtaaattgcaatcgattagggatcgtttctcagaatcaagttagaagtgagagttcagataagtgaggccgccattgctgctttgaacacctcagaaggggagaatggatttatcaggagtgaaaaagaagagcttgctaggagtcaaagaaaataataaaaagtccagcactagggctccttcacctaccaaacgcaaagaccgctcagatgagaagtccaaggatcgctcaaaagataaaggggccaccaaggagtcgagtgagaaggatcgcggccgggacaaaacccgaaagaggcgcagcgcttccagtggtagcagcagtaccaggtctcggtccagctcgacttccagctcaggctccagcaccagcactggctcaagcagtggctccagctcttcctcagcatccagccgctcaggaagctccagcacctcccgcagctccagctctagcagctcttctggctctccaagtccttctcggcgcagacacgacaacaggaggcgctcccgctccaaatccaaaccacctaaaagagatgaaaaggagaggaaaaggcggagcccatctcctaagcccaccaaagtgcacattgggagactcacccggaatgtgacaaaggatcacatcatggagatattttccacctatgggaaaattaaaatgattgacatgcccgtggaaaggatgcatccccatctgtccaaaggctatgcgtacgtagagtttgagaatccagatgaagccgagaaggcgctgaagcacatggatggaggacaaattgatggccaggagatcactgccaccgccgtgctggccccctggcctaggccaccccccaggagattcagccctcccaggagaatgttgccaccaccgcctatgtggcgcaggtctcccccacggatgaggagaaggtcccgctccccgaggcgcaggtcccccgtgcgccggagatcacggtccccgggccgccgccgccacaggagccgctccagctccaactcctcccgataaacaggccactgaagctctcgcccctgtaacttataccccacccagctcagttttgtcacttttctagccaaaggaagaccagtaggaaagcaaacccttgactctggcaggatttgcaggcagcaggcagcacccctctgccagccgggccccggctgcagaagtgctgttggtttggatgctgtgtgcctgtcaagattccctccggttttctggctagaaagctcatccgtttccggtttctaagagtcagttcagtggcagagccaccagggaaaagtgaggctcttgggggtggtttgaccctgcttacctgggagcacacttttcccttccccgatgacctgggatggtggccaggccgtgcccttgctgttgctgggcagtgtccttttggaaagggagctgccccaggctttagtgcagctgccaaccctgttaggcctggcctctcgaggcctcttctgacctcaagggtcacaccccctcaaagatcctctcacccatggtagttgctgctcgtggttctgtctgtccgtgcaccgatgcacacaccgcaccccaccactgtactctgaaattggcgagtgagtggagagccagctctgcggagtcatcacgcagccatggttgtgcctgccgttcatggtggtctttcaggttatcttggcaacatgtacattgcttttattttttttcttttttgctttcattgtacagtcagtactataaaatttctcttttgagttttatacctttgtagcattttagatgacattgtgtttgtactttgttgtgtagagtggaagaattgtgttgaataaacccaagatc

SEQ ID NO: 177907 - DNA, 1792 bp, Homo sapiens
  Payload ID: 14905
  Gene Symbol: RNPS1
  Gene Name: RNA binding protein S1, serine-rich domain
  Uniprot ID: Q15287
  ENST ID: ENST00000568631
  CDS Start-End: 739-1656
ctgtgcttcgtccgctcggcggtggcccagccaggcccgcgggactcagaccagcggggagcgcggcctccgcccttggggccctcccgccgggccggagacccaagcccccaacgccaggccctgccctggaagcgctcgcggcccggcgcctggacgggggagttgtgagtgaacgcggacgggtagcggcgaggtcggcgtgtcgggccggtgtcggcgggcgcggagtttctttgtgggatgcggtggaaggtcggccgatccccccttcggagtcattaattcaaacgtgtactccgcgaacgtttcccggactcccgtgtgcaattatcggcgctaggccgtggggatacggcccactatggaccgagcacggtggccgagctcagtttgatgggttaccccagaggggcggatacgggaaggttaagtttgttggaggagaaacgtggagtaggctttttgtcttgattccgcatgaactgtgcctgaaatgtacttttaaatggggaaggtgctctgaagatttgtgccgaaacgccctctcctcgagatttaactaattgttctctcctctctctggctgttggacgcgcacctttccggaggatgggggaggctgctctttggcgtaaattgcaatcgattagggatcgtttctcagaatcaagttagaagtgagagttcagataagtgaggccgccattgctgctttgaacacctcagaaggggagaatggatttatcaggagtgaaaaagaagagcttgctaggagtcaaagaaaataataaaaagtccagcactagggctccttcacctaccaaacgcaaagaccgctcagatgagaagtccaaggatcgctcaaaagataaaggggccaccaaggagtcgagtgagaaggatcgcggccgggacaaaacccgaaagaggcgcagcgcttccagtggtagcagcagtaccaggtctcggtccagctcgacttccagctcaggctccagcaccagcactggctcaagcagtggctccagctcttcctcagcatccagccgctcaggaagctccagcacctcccgcagctccagctctagcagctcttctggctctccaagtccttctcggcgcagacacgacaacaggaggcgctcccgctccaaatccaaaccacctaaaagagatgaaaaggagaggaaaaggcggagcccatctcctaagcccaccaaagtgcacattgggagactcacccggaatgtgacaaaggatcacatcatggagatattttccacctatgggaaaattaaaatgattgacatgcccgtggaaaggatgcatccccatctgtccaaaggctatgcgtacgtagagtttgagaatccagatgaagccgagaaggcgctgaagcacatggatggaggacaaattgatggccaggagatcactgccaccgccgtgctggccccctggcctaggccaccccccaggagattcagccctcccaggagaatgttgccaccaccgcctatgtggcgcaggtctcccccacggatgaggagaaggtcccgctccccgaggcgcaggtcccccgtgcgccggagatcacggtccccgggccgccgccgccacaggagccgctccagctccaactcctcccgataaacaggccactgaagctctcgcccctgtaacttataccccacccagctcagttttgtcacttttctagccaaaggaagaccagtaggaaagcaaacccttgactctggcaggatttgcaggcagcaggcagcacccc

SEQ ID NO: 177908 - DNA, 918 bp, Homo sapiens
  Payload ID: 14905
  Gene Symbol: RNPS1
  Gene Name: RNA binding protein S1, serine-rich domain
  ENST ID: ENST00000569598
  CDS Start-End: 159-794
cggctgaggaaagcaggaggaggtggcggcggcgggaagatgctgctctttggcgtaaattgcaatcgattagggatcgtttctcagaatcaagttagaagtgagagttcagataagtgaggccgccattgctgctttgaacacctcagaaggggagaatggatttatcaggagtgaaaaagaagagcttgctaggagtcaaagaaaataataaaaagtccagcactagcagctcttctggctctccaagtccttctcggcgcagacacgacaacaggaggcgctcccgctccaaatccaaaccacctaaaagagatgaaaaggagaggaaaaggcggagcccatctcctaagcccaccaaagtgcacattgggagactcacccggaatgtgacaaaggatcacatcatggagatattttccacctatgggaaaattaaaatgattgacatgcccgtggaaaggatgcatccccatctgtccaaaggctatgcgtacgtagagtttgagaatccagatgaagccgagaaggcgctgaagcacatggatggaggacaaattgatggccaggagatcactgccaccgccgtgctggccccctggcctaggccaccccccaggagattcagccctcccaggagaatgttgccaccaccgcctatgtggcgcaggtctcccccacggatgaggagaaggtcccgctccccgaggcgcaggtcccccgtgcgccggagatcacggtccccgggccgccgccgccacaggagccgctccagctccaactcctcccgataaacaggccactgaagctctcgcccctgtaacttataccccacccagctcagttttgtcacttttctagccaaaggaagaccagtaggaaagcaaacccttgactctggcaggatttgcaggcagc

SEQ ID NO: 177909 - DNA, 2974 bp, Homo sapiens
  Payload ID: 14906
  Gene Symbol: RBPMS
  Gene Name: RNA binding protein with multiple splicing
  Uniprot ID: Q93062
  ENST ID: ENST00000287771
  CDS Start-End: 567-1181
atcccggacttcccagagcctgcctggagcgcgtactcagcggctctcgggtcccagcgtcccagccgcggcccgcgctcctccgccccgctcctcctcctcctcttcctcctcctcctcctctctaggcacccccgtcccctccttccagcggctgcagcccccagccccaactctccgcgcttactcctgggacgcgcgtcctcgccccatcctttgcttccttccttccttccttcttccttcctcccctggctcccgccctccctctccaggtcgccctcccggggcccgattgtctcggtgccccgctcccggcccgcgccctgccccgtctctcccttgcacttcctgagtcgcccgccgccgccgtcgcagactcgccgcgggagccccagcccaacccgagcccgacagccactgccccggctccagctccagccccacagcccgcggcgcccgcccgagggagccccggcgcccggggaaggctccagtgggctagcgcgccctcgcccagccccgcgccccagccctgcccggcccggcgaggaaggaccgggaagatgaacaacggcggcaaagccgagaaggagaacaccccgagcgaggccaaccttcaggaggaggaggtccggaccctatttgtcagtggccttcctctggatatcaaacctcgggagctctatctgcttttcagaccatttaagggctatgagggttctcttataaagctcacatctaaacagcctgtaggttttgtcagttttgacagtcgctcagaagcagaggctgcaaagaatgctttgaatggcatccgcttcgatcctgaaattccgcaaacactacgactagagtttgctaaggcaaacacgaagatggccaagaacaaactcgtagggactccaaaccccagtactcctctgcccaacactgtacctcagttcattgccagagagccatatgagctcacagtgcctgcactttaccccagtagccctgaagtgtgggccccgtaccctctgtacccagcggagttagcgcctgctctacctcctcctgctttcacctatcccgcttcactgcatgcccagctctgtgaaggtcagactgtgaggagaagccaccccttgagcgctccgtctcctgatagtgccagcctggcctggtttcctgtttgatgcgctggctccctccctccgaggctacttctcagggctggaagtcccgtcagttctgctgaatactatgtcccaggtgtgtgatggcggctgcaatctgtcttgtgggtattaatgcaatcttcagtggtggctactgttctctagctgttctacaaaactggagcatgctggcttgaaaaacccttgcccagttttgatcccttcaagactttgtcacagcctctatcacacatctgtttttctcgaagaaaaaaatataattaataaaaatgttttactcttttacactgtataattgtaagaaatagcgtattatttgtgaatgcatggtctgaaatttctgtacagtttggagatattttcaaacgaaacgtaagagaagtcaacaataaaaccaagaaaagtgagtatttttataccaaacattttaagtatgctgggatggacgatcttacactggtttggatcacagtttttgttcttgacttttgaatgcttgtaattaaaaatatctatttttttcctctgaagtaagttgcatgtttgaggcatgtttccaaatattatcaaaatatcctgaattgtattgtgaatatatagaaatctgtgcctggccggagtccagggtaaattagtagcatggtgttagatgttagaaacagaactgttatttgcagtgttaggtctaggatcccagttctagtaggacagccctgcaagacaatcaaccagaagcctccaggagcttctacctatggcttattcacaactgggcaagaaaacatcattggtaagaactgctgagtgtgcccttagaaagccctagtagctccagctgtgactatatcaactgtgtgccaagtgtgactttgtacagttttatgtttccactctcctgtatgtgtagccactcgatgcctaacctaccttccacaagccagccccgcatccctgctcccgcagtgtaagtgcagagcctgcctcactggtaagggaaaaccttggcttgggaggccagccctggcccttgaaggggttggctgtgcccagcccacctggctgcagtgggcagctcatgtctgtatctccaaagtgatgtttgtttgcaaaacaccggctgaactgagctggtgttgccaactcttggcagcactgggccaaaccgaccacataccatgagctcccaaatggcgtgtgctcactgtgagacgtcctgccacaccccacaggagacggaggcagtgggcatttggaaccaattctattcagacttcgtcaaagccaaagtcagtctggtgttgtcagttgacacatctccagagttcatgacagctcaacctctccccttgtacagaagccatttttgtaaaaccacactgacctaaattcagctgccaaacacagtctttcctattgatccgctcggcttatgttgaaaatttcaatgtcatgattacctggttggtttgggtttttgttttgttattttccattagaaatataaagatgtcaagaagcttttaaaggtcaacacaaaaaaccaaggccaggagtgaggggctctttcttaccgtaaataaggggaaaaggcagttagctcaaggacttgtgacggatccactttggtgttcaaggacctgcttatgccctcagtgccaatcggctcttggtgagatgactgtactcctaaggaaaatagccacttctgcagtctattatgcttttataactgtttaaaggtacttttctattgtcatttttaaaaaataaagtgcttattccagctgtca

SEQ ID NO: 177910 - DNA, 3110 bp, Homo sapiens
  Payload ID: 14906
  Gene Symbol: RBPMS
  Gene Name: RNA binding protein with multiple splicing
  Uniprot ID: Q93062
  ENST ID: ENST00000320203
  CDS Start-End: 583-1173
aaagggagctgcttccatcccggacttcccagagcctgcctggagcgcgtactcagcggctctcgggtcccagcgtcccagccgcggcccgcgctcctccgccccgctcctcctcctcctcttcctcctcctcctcctctctaggcacccccgtcccctccttccagcggctgcagcccccagccccaactctccgcgcttactcctgggacgcgcgtcctcgccccatcctttgcttccttccttccttccttcttccttcctcccctggctcccgccctccctctccaggtcgccctcccggggcccgattgtctcggtgccccgctcccggcccgcgccctgccccgtctctcccttgcacttcctgagtcgcccgccgccgccgtcgcagactcgccgcgggagccccagcccaacccgagcccgacagccactgccccggctccagctccagccccacagcccgcggcgcccgcccgagggagccccggcgcccggggaaggctccagtgggctagcgcgccctcgcccagccccgcgccccagccctgcccggcccggcgaggaaggaccgggaagatgaacaacggcggcaaagccgagaaggagaacaccccgagcgaggccaaccttcaggaggaggaggtccggaccctatttgtcagtggccttcctctggatatcaaacctcgggagctctatctgcttttcagaccatttaagggctatgagggttctcttataaagctcacatctaaacagcctgtaggttttgtcagttttgacagtcgctcagaagcagaggctgcaaagaatgctttgaatggcatccgcttcgatcctgaaattccgcaaacactacgactagagtttgctaaggcaaacacgaagatggccaagaacaaactcgtagggactccaaaccccagtactcctctgcccaacactgtacctcagttcattgccagagagccatatgagctcacagtgcctgcactttaccccagtagccctgaagtgtgggccccgtaccctctgtacccagcggagttagcgcctgctctacctcctcctgctttcacctatcccgcttcactgcatgcccagatgcgctggctccctccctccgaggctacttctcagggctggaagtcccgtcagttctgctgaatactatacccttcagcaatggctactagaaggacgaacaattgccctcctttggaagtacggctaatagaagccctagatccgaataagatccgaataagaatatgtaatggaccaggcgcagtgcctcacgcctgtcatcccagcactttgggaggctgaggcaggcggatcacttgatgccagaagtttgagaccagcccagccaacatggtcccaggtgtgtgatggcggctgcaatctgtcttgtgggtattaatgcaatcttcagtggtggctactgttctctagctgttctacaaaactggagcatgctggcttgaaaaacccttgcccagttttgatcccttcaagactttgtcacagcctctatcacacatctgtttttctcgaagaaaaaaatataattaataaaaatgttttactcttttacactgtataattgtaagaaatagcgtattatttgtgaatgcatggtctgaaatttctgtacagtttggagatattttcaaacgaaacgtaagagaagtcaacaataaaaccaagaaaagtgagtatttttataccaaacattttaagtatgctgggatggacgatcttacactggtttggatcacagtttttgttcttgacttttgaatgcttgtaattaaaaatatctatttttttcctctgaagtaagttgcatgtttgaggcatgtttccaaatattatcaaaatatcctgaattgtattgtgaatatatagaaatctgtgcctggccggagtccagggtaaattagtagcatggtgttagatgttagaaacagaactgttatttgcagtgttaggtctaggatcccagttctagtaggacagccctgcaagacaatcaaccagaagcctccaggagcttctacctatggcttattcacaactgggcaagaaaacatcattggtaagaactgctgagtgtgcccttagaaagccctagtagctccagctgtgactatatcaactgtgtgccaagtgtgactttgtacagttttatgtttccactctcctgtatgtgtagccactcgatgcctaacctaccttccacaagccagccccgcatccctgctcccgcagtgtaagtgcagagcctgcctcactggtaagggaaaaccttggcttgggaggccagccctggcccttgaaggggttggctgtgcccagcccacctggctgcagtgggcagctcatgtctgtatctccaaagtgatgtttgtttgcaaaacaccggctgaactgagctggtgttgccaactcttggcagcactgggccaaaccgaccacataccatgagctcccaaatggcgtgtgctcactgtgagacgtcctgccacaccccacaggagacggaggcagtgggcatttggaaccaattctattcagacttcgtcaaagccaaagtcagtctggtgttgtcagttgacacatctccagagttcatgacagctcaacctctccccttgtacagaagccatttttgtaaaaccacactgacctaaattcagctgccaaacacagtctttcctattgatccgctcggcttatgttgaaaatttcaatgtcatgattacctggttggtttgggtttttgttttgttattttccattagaaatataaagatgtcaagaagcttttaaaggtcaacacaaaaaaccaaggccaggagtgaggggctctttcttaccgtaaataaggggaaaaggcagttagctcaaggacttgtgacggatccactttggtgttcaaggacctgcttatgccctcagtgccaatcggctcttggtgagatgactgtactcctaaggaaaatagccacttctgcagtctattatgcttttataactgtttaaaggtacttttctattgtcatttttaaaaaataaagtgcttattccagctgtca

SEQ ID NO: 177911 - DNA, 1341 bp, Homo sapiens
  Payload ID: 14906
  Gene Symbol: RBPMS
  Gene Name: RNA binding protein with multiple splicing
  Uniprot ID: Q93062
  ENST ID: ENST00000339877
  CDS Start-End: 583-1242
aaagggagctgcttccatcccggacttcccagagcctgcctggagcgcgtactcagcggctctcgggtcccagcgtcccagccgcggcccgcgctcctccgccccgctcctcctcctcctcttcctcctcctcctcctctctaggcacccccgtcccctccttccagcggctgcagcccccagccccaactctccgcgcttactcctgggacgcgcgtcctcgccccatcctttgcttccttccttccttccttcttccttcctcccctggctcccgccctccctctccaggtcgccctcccggggcccgattgtctcggtgccccgctcccggcccgcgccctgccccgtctctcccttgcacttcctgagtcgcccgccgccgccgtcgcagactcgccgcgggagccccagcccaacccgagcccgacagccactgccccggctccagctccagccccacagcccgcggcgcccgcccgagggagccccggcgcccggggaaggctccagtgggctagcgcgccctcgcccagccccgcgccccagccctgcccggcccggcgaggaaggaccgggaagatgaacaacggcggcaaagccgagaaggagaacaccccgagcgaggccaaccttcaggaggaggaggtccggaccctatttgtcagtggccttcctctggatatcaaacctcgggagctctatctgcttttcagaccatttaagggctatgagggttctcttataaagctcacatctaaacagcctgtaggttttgtcagttttgacagtcgctcagaagcagaggctgcaaagaatgctttgaatggcatccgcttcgatcctgaaattccgcaaacactacgactagagtttgctaaggcaaacacgaagatggccaagaacaaactcgtagggactccaaaccccagtactcctctgcccaacactgtacctcagttcattgccagagagccatatgagctcacagtgcctgcactttaccccagtagccctgaagtgtgggccccgtaccctctgtacccagcggagttagcgcctgctctacctcctcctgctttcacctatcccgcttcactgcatgcccagtgtttctctcctgaggcaaagcccaacacacctgtcttttgtccacttctccagcaaattagatttgtctctgggaatgtgtttgtaacataccaacctactgcagaccagcagagggagctcccatgttgaatttgtttgttagctattttcccccctttcacaaaaactatttcttgacgacctttgagagatttcaataaaaattttaatcagagcaaaaatgaactc

SEQ ID NO: 177912 - DNA, 2941 bp, Homo sapiens
  Payload ID: 14906
  Gene Symbol: RBPMS
  Gene Name: RNA binding protein with multiple splicing
  Uniprot ID: Q93062
  ENST ID: ENST00000397323
  CDS Start-End: 615-1205
gggaggggagaggggagggaggaaggcgagagaaagggagctgcttccatcccggacttcccagagcctgcctggagcgcgtactcagcggctctcgggtcccagcgtcccagccgcggcccgcgctcctccgccccgctcctcctcctcctcttcctcctcctcctcctctctaggcacccccgtcccctccttccagcggctgcagcccccagccccaactctccgcgcttactcctgggacgcgcgtcctcgccccatcctttgcttccttccttccttccttcttccttcctcccctggctcccgccctccctctccaggtcgccctcccggggcccgattgtctcggtgccccgctcccggcccgcgccctgccccgtctctcccttgcacttcctgagtcgcccgccgccgccgtcgcagactcgccgcgggagccccagcccaacccgagcccgacagccactgccccggctccagctccagccccacagcccgcggcgcccgcccgagggagccccggcgcccggggaaggctccagtgggctagcgcgccctcgcccagccccgcgccccagccctgcccggcccggcgaggaaggaccgggaagatgaacaacggcggcaaagccgagaaggagaacaccccgagcgaggccaaccttcaggaggaggaggtccggaccctatttgtcagtggccttcctctggatatcaaacctcgggagctctatctgcttttcagaccatttaagggctatgagggttctcttataaagctcacatctaaacagcctgtaggttttgtcagttttgacagtcgctcagaagcagaggctgcaaagaatgctttgaatggcatccgcttcgatcctgaaattccgcaaacactacgactagagtttgctaaggcaaacacgaagatggccaagaacaaactcgtagggactccaaaccccagtactcctctgcccaacactgtacctcagttcattgccagagagccatatgagctcacagtgcctgcactttaccccagtagccctgaagtgtgggccccgtaccctctgtacccagcggagttagcgcctgctctacctcctcctgctttcacctatcccgcttcactgcatgcccagatgcgctggctccctccctccgaggctacttctcagggctggaagtcccgtcagttctgctgaatactatgtcccaggtgtgtgatggcggctgcaatctgtcttgtgggtattaatgcaatcttcagtggtggctactgttctctagctgttctacaaaactggagcatgctggcttgaaaaacccttgcccagttttgatcccttcaagactttgtcacagcctctatcacacatctgtttttctcgaagaaaaaaatataattaataaaaatgttttactcttttacactgtataattgtaagaaatagcgtattatttgtgaatgcatggtctgaaatttctgtacagtttggagatattttcaaacgaaacgtaagagaagtcaacaataaaaccaagaaaagtgagtatttttataccaaacattttaagtatgctgggatggacgatcttacactggtttggatcacagtttttgttcttgacttttgaatgcttgtaattaaaaatatctatttttttcctctgaagtaagttgcatgtttgaggcatgtttccaaatattatcaaaatatcctgaattgtattgtgaatatatagaaatctgtgcctggccggagtccagggtaaattagtagcatggtgttagatgttagaaacagaactgttatttgcagtgttaggtctaggatcccagttctagtaggacagccctgcaagacaatcaaccagaagcctccaggagcttctacctatggcttattcacaactgggcaagaaaacatcattggtaagaactgctgagtgtgcccttagaaagccctagtagctccagctgtgactatatcaactgtgtgccaagtgtgactttgtacagttttatgtttccactctcctgtatgtgtagccactcgatgcctaacctaccttccacaagccagccccgcatccctgctcccgcagtgtaagtgcagagcctgcctcactggtaagggaaaaccttggcttgggaggccagccctggcccttgaaggggttggctgtgcccagcccacctggctgcagtgggcagctcatgtctgtatctccaaagtgatgtttgtttgcaaaacaccggctgaactgagctggtgttgccaactcttggcagcactgggccaaaccgaccacataccatgagctcccaaatggcgtgtgctcactgtgagacgtcctgccacaccccacaggagacggaggcagtgggcatttggaaccaattctattcagacttcgtcaaagccaaagtcagtctggtgttgtcagttgacacatctccagagttcatgacagctcaacctctccccttgtacagaagccatttttgtaaaaccacactgacctaaattcagctgccaaacacagtctttcctattgatccgctcggcttatgttgaaaatttcaatgtcatgattacctggttggtttgggtttttgttttgttattttccattagaaatataaagatgtcaagaagcttttaaaggtcaacacaaaaaaccaaggccaggagtgaggggctctttcttaccgtaaataaggggaaaaggcagttagctcaaggacttgtgacggatccactttggtgttcaaggacctgcttatgccctcagtgccaatcggctcttggtgagatgactgtactcctaaggaaaatagccacttctgcagtctattatgcttttataactgtttaaaggtacttttctattgtcatttttaaaaaataaagtgcttattccagctgtcacacca

SEQ ID NO: 177913 - DNA, 842 bp, Homo sapiens
  Payload ID: 14906
  Gene Symbol: RBPMS
  Gene Name: RNA binding protein with multiple splicing
  ENST ID: ENST00000520161
  CDS Start-End: 435-782
gtgcgggcggccggcggggcgcgggcccggggcgcggcggtggaagaaggttcaggcatggcccgtgccccggacgcagccccacagtgtggcccggggagggtggatctcgggagcgtgtgtttttgtgtccacgcgcgtctgcgggccccaaattgcgtaactccaaggacttttcggagacttttgtccggaccctatttgtcagtggccttcctctggatatcaaacctcgggagctctatctgcttttcagaccatttaagggctatgagggttctcttataaagctcacatctaaacagcctgtaggttttgtcagttttgacagtcgctcagaagcagaggctgcaaagaatgctttgaatggcatccgcttcgatcctgaaattccgcaaacactacgactagagtttgctaaggcaaacacgaagatggccaagaacaaactcgtagggactccaaaccccagtactcctctgcccaacactgtacctcagttcattgccagagagccatatgagctcacagtgcctgcactttaccccagtagccctgaagtgtgggccccgtaccctctgtacccagcggagttagcgcctgctctacctcctcctgctttcacctatcccgcttcactgcatgcccagtgtttctctcctgaggcaaagcccaacacacctgtcttttgtccacttctccagcaaattagatttgtctctgggaatgtgtttgtaacataccaacctactgcagaccagcagagggagctcccatgttgaatttgtttgttagctattttcccccctttcacaaaaactatttcttgacgacctttgaga

SEQ ID NO: 177914 - DNA, 1076 bp, Homo sapiens
  Payload ID: 14906
  Gene Symbol: RBPMS
  Gene Name: RNA binding protein with multiple splicing
  ENST ID: ENST00000517860
  CDS Start-End: 9-683
ccgggaagatgaacaacggcggcaaagccgagaaggagaacaccccgagcgaggccaaccttcaggaggaggaggtccggaccctatttgtcagtggccttcctctggatatcaaacctcgggagctctatctgcttttcagaccatttaagggctatgagggttctcttataaagctcacatctaaacagcctgtaggttttgtcagttttgacagtcgctcagaagcagaggctgcaaagaatgctttgaatggcatccgcttcgatcctgaaattccgcaaacactacgactagagtttgctaaggcaaacacgaagatggccaagaacaaactcgtagggactccaaaccccagtactcctctgcccaacactgtacctcagttcattgccagagagccatatgagctcacagtgcctgcactttaccccagtagccctgaagtgtgggccccgtaccctctgtacccagcggagttagcgcctgctctacctcctcctgctttcacctatcccgcttcactgcatgcccaggtaattgatacccatcggccaggacttcactcacttcaccaccagtcctttcaaacttggttcccgagagcacaccatacaactaacacctatccagctaacagatccaccctcaagagattaatgatcccctctaaatcaagctgacactccttcaggactgacgaggatcgtctgacagcaatgatatcacccactgcctgatgtttgccccaaatgacacctctctcttccttaatgatctcacctcatatcgcacatgagagaccggggcaggtttatccacctggctcccagctagctagagggcatcaccagagtgtatacgtgtgtgccttgtgtggaagggctgcagaggaaggtgtgtgctaggagaaggggatatgtgcgtctgtgcgtgtttctgtgtgttgagagttttccactctcgtgtacggtgagaagaatctctgaccaaagggaaagcttccaggggggaaggctgtactttcttaaatatgttacaggaaagattaagggttccttctctccattttcagg

SEQ ID NO: 177915 - DNA, 449 bp, Homo sapiens
  Payload ID: 14906
  Gene Symbol: RBPMS
  Gene Name: RNA binding protein with multiple splicing
  ENST ID: ENST00000523115
  CDS Start-End: 302-449
gcagtacagttgctgcctcttacttgtcctgttatctgacagcgttccttttcaggtccggaccctatttgtcagtggccttcctctggatatcaaacctcgggagctctatctgcttttcagaccatttaagggctatgagggttctcttataaagctcacatctaaacagcctgtaggttttgtcagttttgacagtcgctcagaagcagaggctgcaaagaatgctttgaatggcatccgcttcgatcctgaaattccgcaaacactacgactagagtttgctaaggcaaacacgaagatggccaagaacaaactcgtagggactccaaaccccagtactcctctgcccaacactgtacctcagttcattgccagagagccatatgagctcacagtgcctgcactttaccccagtagccctgaagtgtgggccccgtaccctctgt

SEQ ID NO: 177916 - DNA, 780 bp, Homo sapiens
  Payload ID: 14906
  Gene Symbol: RBPMS
  Gene Name: RNA binding protein with multiple splicing
  ENST ID: ENST00000519647
  CDS Start-End: 364-711
agaacccaagttgtccaagagagatgtcgtgtacaaaacagttaagaccgtgaagagaggggggtttataatgtcagaaattgaggaaaagaaactaaggtggcctgaatgatccaggtccggaccctatttgtcagtggccttcctctggatatcaaacctcgggagctctatctgcttttcagaccatttaagggctatgagggttctcttataaagctcacatctaaacagcctgtaggttttgtcagttttgacagtcgctcagaagcagaggctgcaaagaatgctttgaatggcatccgcttcgatcctgaaattccgcaaacactacgactagagtttgctaaggcaaacacgaagatggccaagaacaaactcgtagggactccaaaccccagtactcctctgcccaacactgtacctcagttcattgccagagagccatatgagctcacagtgcctgcactttaccccagtagccctgaagtgtgggccccgtaccctctgtacccagcggagttagcgcctgctctacctcctcctgctttcacctatcccgcttcactgcatgcccagtgtttctctcctgaggcaaagcccaacacacctgtcttttgtccacttctccagcaaattagatttgtctctgggaatgtgtttgtaacataccaacctactgcagaccagcagagggagctcccatgttgaatttgtttgttagctattttcccccctttcacaaaaactatttcttgacgacctttgagagatttcaat

SEQ ID NO: 177917 - DNA, 839 bp, Homo sapiens
  Payload ID: 14906
  Gene Symbol: RBPMS
  Gene Name: RNA binding protein with multiple splicing
  ENST ID: ENST00000519359
  CDS Start-End: 1-359
ccctatttgtcagtggccttcctctggatatcaaacctcgggagctctatctgcttttcagaccatttaagggctatgagggttctcttataaagctcacatctaaacagcctgtaggttttgtcagttttgacagtcgctcagaagcagaggctgcaaagaatgctttgaatggcatccgcttcgatcctgaaattccgcaaacactacgactagagtttgctaaggcaaacacgaagatggccaagaacaaactcgtagggactccaaaccccagtactcctctgcccaacactgtacctcagttcattgccagagagccattaggtggagctaatgaacatggagagaggcagtgaagtgcagaagtgaagggtctggactcatgatcttgattgattcacatcctggctctgtgagagtcgttgggctggatatttaacctcgctgtgtctcagctttctcataagatgagctcacagtgcctgcactttaccccagtagccctgaagtgtgggccccgtaccctctgtacccagcggagttagcgcctgctctacctcctcctgctttcacctatcccgcttcactgcatgcccagatgcgctggctccctccctccgaggctacttctcagggctggaagtcccgtcagttctgctgaatactatgtcccaggtgtgtgatggcggctgcaatctgtcttgtgggtattaatgcaatcttcagtggtggctactgttctctagctgttctacaaaactggagcatgctggcttgaaaaacccttgcccagttttgatcccttcaagactttgtcacagcctctatcacacatc

SEQ ID NO: 177918 - DNA, 1613 bp, Homo sapiens
  Payload ID: 14906
  Gene Symbol: RBPMS
  Gene Name: RNA binding protein with multiple splicing
  ENST ID: ENST00000520191
  CDS Start-End: 431-793
gtttgccttcgtctggctgagccgggctggtgcgctgagctctaggtgcaggcggaagctgggtcaggtgcgcggccgcacttctggttgcgcggcccacactggccgccattgtggtggaagtcggagcgagtctcctgggcccgaaccggctgttggaagtgcgagggcaccgagagccacggtccggaccctatttgtcagtggccttcctctggatatcaaacctcgggagctctatctgcttttcagaccatttaagggctatgagggttctcttataaagctcacatctaaacagcctgtaggttttgtcagttttgacagtcgctcagaagcagaggctgcaaagaatgctttgaatggcatccgcttcgatcctgaaattccgcaaacactacgactagagtttgctaaggcaaacacgaagatggccaagaacaaactcgtagggactccaaaccccagtactcctctgcccaacactgtacctcagttcattgccagagagccatatgagctcacagtgcctgcactttaccccagtagccctgaagtgtgggccccgtaccctctgtacccagcggagttagcgcctgctctacctcctcctgctttcacctatcccgcttcactgcatgcccaggtaattgatacccatcggccaggacttcactcacttcaccaccagtcctttcaaacttggttcccgagagcacaccatacaactaacacctatccagctaacagatccaccctcaagagattaatgatcccctctaaatcaagctgacactccttcaggactgacgaggatcgtctgacagcaatgatatcacccactgcctgatgtttgccccaaatgacacctctctcttccttaatgatctcacctcatatcgcacatgagagaccggggcaggtttatccacctggctcccagctagctagagggcatcaccagagtgtatacgtgtgtgccttgtgtggaagggctgcagaggaaggtgtgtgctaggagaaggggatatgtgcgtctgtgcgtgtttctgtgtgttgagagttttccactctcgtgtacggtgagaagaatctctgaccaaagggaaagcttccaggggggaaggctgtactttcttaaatatgttacaggaaagattaagggttccttctctccattttcaggaaaccctgtagaaaaggagatacaagatagtgtctaagatggaattacaggtcaaggtagagatctctattctgaccagctttctttcttagttaaaaatagcctgatttttataaacaaacttcctgtttctccgcaaagattactgtctacatactaacacttcctctccccttggagaaaatatttctcttagcttcgcttttagtgcaagtggtagtaatcagtgtaaagattcacctctggagatcaccactcattctttggcctgcaaagattgatgaccagtaacaaatagaaagtacgtacgtaggtttcatttgtctttctgcatgtgtaattcagcctttaaattttaaatttttaaaaattattaggctggacaggcagagttttcgtttgcctgttttgctcagtgtttgtttac

SEQ ID NO: 177919 - DNA, 613 bp, Homo sapiens
  Payload ID: 14906
  Gene Symbol: RBPMS
  Gene Name: RNA binding protein with multiple splicing
  ENST ID: ENST00000522694
  CDS Start-End: 1-342
agttttgacagtcgctcagaagcagaggctgcaaagaatgctttgaatggcatccgcttcgatcctgaaattccgcaaacactacgactagagtttgctaaggcaaacacgaagatggccaagaacaaactcgtagggactccaaaccccagtactcctctgcccaacactgtacctcagttcattgccagagagccatatgagctcacagtgcctgcactttaccccagtagccctgaagtgtgggccccgtaccctctgtacccagcggagttagcgcctgctctacctcctcctgctttcacctatcccgcttcactgcatgcccaggaaaccctgtagaaaaggagatacaagatagtgtctaagatggaattacaggtcaagtgtttctctcctgaggcaaagcccaacacacctgtcttttgtccacttctccagcaaattagatttgtctctgggaatgtgtttgtaacataccaacctactgcagaccagcagagggagctcccatgttgaatttgtttgttagctattttcccccctttcacaaaaactatttcttgacgacctttgagagatttcaataaaaattttaatcagagcaaaaatg

SEQ ID NO: 177920 - DNA, 2008 bp, Homo sapiens
  Payload ID: 14907
  Gene Symbol: RBPMS2
  Gene Name: RNA binding protein with multiple splicing 2
  Uniprot ID: Q6ZRY4
  ENST ID: ENST00000300069
  CDS Start-End: 269-898
actcgccggtcgcagtgaaaaggcggaggcggcggcccctccggctcccactgcctcccccgccgcaccccctccccaccttccgcacccgccaaacttgatgtgaccctggcccgacgcggaggctgcccctctcactgccccgtgggtcccccgccacccgctccgcacccgcgagcgcaccgctccccgcgccccttcccacttcccgcggggccggcgccgcgctcgccctcgcgttccttcccgccgccccctcccccgcaccatgagcaacctgaagccggacggcgagcacggcggcagcaccggcaccggctccggcgcgggctccggcggcgccctggaggaggaggtccggacactgtttgtcagcggcctccctgtggacattaaacccagagaactctacttgctcttccggccgttcaaggggtatgaagggtccctgatcaagctcactgcaagacagcctgttggttttgtgatctttgacagccgtgcaggagcagaagcggccaagaatgcgctgaacggtattcgctttgatcccgaaaatccacagactctgaggctagagtttgccaaagccaacaccaagatggccaagagcaagctaatggcaactccaaatcccagcaacgtgcaccccgccctaggagcacacttcatcgcacgggacccctatgacctgatgggggctgctctgatccctgcatccccagaggcctgggccccctaccctttgtacaccacagagctgaccccagccatctcccatgctgcgttcacctacccaactgccactgccgctgccgccgccctccacgctcaggtgcgctggtacccttcctctgacaccacccagcaaggatggaagtaccgtcagttctgttagtttttcagtctggtcaccggggaggtggttctggtaatctgtggtggtgccgggacaggcgccccgagttcccactgcccccgggcggcctgcacagagctgctgccctccagagactgtgaatcccaagcctgactcagtggactgcttcctgttcccctccctcctcttcctcaccttgttctgcaccctcaagcctttctccaatgcctcccaggaggatttggggactttctccctggggcgcccagatccagctcggaggcctcactgggacctggcaaggcctgacctcccgcccaaacttgcttctgtagctccccctcgaggaagtgaggtgtttaattttgcatgttttctggcatgaattaagacacttatacttgtatatatgagtgtacagtttgttctcacactgtcaccatagcgacaggtcctggctcccagtggttcatcctgcctgcccctctctcctcgccccgcccctgcacccaccccgcttcagggaggcccaagttccgtggccccacacgcttccaggctcagctcccacctccacccaacagatagatggggtttgctttttcatttcacatggggctcctccgctcctgccttctcggatgggccaacagtcgtaagaaagccctctctgcccgttctgttcacctctccacagcgcaccccgcccgccgctgctcctcattctttccaaacctcgaaaccaaccaaaacgtgagaagtatttttgtaccctgtgtaacaaaatatttatgcatcataaaggatttttcatgtgcgtaccattaattattaaagcgacctcgttcgccctgtcagataagtttaatgtttagtttgaggcatgaagaagaaaagggtttccattcttcagcagtacgcctttgtgtctggcatttgtttaagaaaatgaaatgaaggaaacactgtgcaatgttttttgttttgagcatatcagtgctttactgtcagccgcagctgtgaccgtctggccatttcagacttgggagatgaggcggctgttgtcattgctgatcctgtgagaatgtgaaactggataatatatgaaatgcaaaataaaacaaaacc

SEQ ID NO: 177921 - DNA, 1746 bp, Homo sapiens
  Payload ID: 14907
  Gene Symbol: RBPMS2
  Gene Name: RNA binding protein with multiple splicing 2
  Uniprot ID: Q6ZRY4
  ENST ID: ENST00000560606
  CDS Start-End: 334-630
gttttccatcgggatgacaccgggagagctcgctcgaagcagtgggtaggggactgctgaagcacgtgcattcgttacttgaacattgtccggacactgtttgtcagcggcctccctgtggacattaaacccagagaactctacttgctcttccggccgttcaaggggtatgaagggtccctgatcaagctcactgcaagacagcctgttggttttgtgatctttgacagccgtgcaggagcagaagcggccaagaatgcgctgaacggtattcgctttgatcccgaaaatccacagactctgaggctagagtttgccaaagccaacaccaagatggccaagagcaagctaatggcaactccaaatcccagcaacgtgcaccccgccctaggagcacacttcatcgcacgggacccctatgacctgatgggggctgctctgatccctgcatccccagaggcctgggccccctaccctttgtacaccacagagctgaccccagccatctcccatgctgcgttcacctacccaactgccactgccgctgccgccgccctccacgctcaggtgcgctggtacccttcctctgacaccacccagcaaggatggaagtaccgtcagttctgttagtttttcagtctggtcaccggggaggtggttctggtaatctgtggtggtgccgggacaggcgccccgagttcccactgcccccgggcggcctgcacagagctgctgccctccagagactgtgaatcccaagcctgactcagtggactgcttcctgttcccctccctcctcttcctcaccttgttctgcaccctcaagcctttctccaatgcctcccaggaggatttggggactttctccctggggcgcccagatccagctcggaggcctcactgggacctggcaaggcctgacctcccgcccaaacttgcttctgtagctccccctcgaggaagtgaggtgtttaattttgcatgttttctggcatgaattaagacacttatacttgtatatatgagtgtacagtttgttctcacactgtcaccatagcgacaggtcctggctcccagtggttcatcctgcctgcccctctctcctcgccccgcccctgcacccaccccgcttcagggaggcccaagttccgtggccccacacgcttccaggctcagctcccacctccacccaacagatagatggggtttgctttttcatttcacatggggctcctccgctcctgccttctcggatgggccaacagtcgtaagaaagccctctctgcccgttctgttcacctctccacagcgcaccccgcccgccgctgctcctcattctttccaaacctcgaaaccaaccaaaacgtgagaagtatttttgtaccctgtgtaacaaaatatttatgcatcataaaggatttttcatgtgcgtaccattaattattaaagcgacctcgttcgccctgtcagataagtttaatgtttagtttgaggcatgaagaagaaaagggtttccattcttcagcagtacgcctttgtgtctggcatttgtttaagaaaatgaaatgaaggaaacactgtgcaatgttttttgttttgagcatatcagtgctttactgtcagccgcagctgtgaccgtctggccatttcagacttgggagatgaggcggctgttgtcattgctgatcctgtgagaatgtgaaactggataatatatgaaatgcaaaataaaacaaaaccaaaatg

SEQ ID NO: 177922 - DNA, 3268 bp, Homo sapiens
  Payload ID: 14908
  Gene Symbol: RBFOX1
  Gene Name: RNA binding protein, fox-1 homolog (C. elegans) 1
  Uniprot ID: Q9NWB1
  ENST ID: ENST00000311745
  CDS Start-End: 253-1509
accttccattttggtagcttcaactttgcagctgctgtgtctcttcgtcgtctgggaagaaaactttcacattaagagttgctgatgcggattttctttctttcctctcccggcgttgatgagtgcttggctcctgacagaagggatttggctcccagctttgtagttcggaagaagttgggtctatagatttccccctaactctccattgatgtgttgagcttcagagggaataataactctacgtaaagcatgctggcgtctcaaggagttctcctgcatccttatggcgtgcctatgattgtaccggcagctccttaccttcctggactgattcagggtaatcaggaagcagccgctgcccctgacacaatggctcagccttacgcttcggcccagtttgctcccccgcagaacggtatccccgcggaatacacggcccctcatccccaccccgcgccagagtacacaggccagaccacggttcccgagcacacattaaacctgtaccctcccgcccagacgcactccgagcagagcccggcggacacgagcgctcagaccgtctctggcaccgccacacagacagatgacgcagcaccgacggatggccagccccagacacaaccttctgaaaacacggaaaacaagtctcagcccaagcggctgcatgtctccaatatccccttcaggttccgggatccggacctcagacaaatgtttggtcaatttggtaaaatcttagatgttgaaattatttttaatgagcgaggctcaaagggatttggtttcgtaactttcgaaaatagtgccgatgcggacagggcgagggagaaattacacggcaccgtggtagagggccgtaaaatcgaggtaaataatgccacagcacgtgtaatgacaaataaaaagaccgtcaacccttatacaaatggctggaaattgaatccagttgtgggtgcagtctacagtcccgaattctatgcaggcacggtcctgttgtgccaggccaaccaggagggatcttccatgtacagtgcccccagttcacttgtatatacttctgcaatgccaggcttcccgtatccagcagccaccgccgcggccgcctaccgaggggcgcacctgcgaggccgcggtcgcaccgtgtacaacaccttcagggccgcggcgcccccgcccccgatcccggcctacggcggagtagtgtatcaagagcctgtgtatggcaataaattgctgcagggtggttatgctgcataccgctacgcccagcctacccctgccactgccgctgcctacagtgacagttacggacgagtttatgctgccgacccctaccaccacgcacttgctccagcccccacctacggcgttggtgccatgaatgcttttgcacctttgactgatgccaagactaggagccatgctgatgatgtgggtctcgttctttcttcattgcaggctagtatataccgagggggatacaaccgttttgctccatactaaatgacaaaaccataaaaaccttccaatgtggggagaaaggaagctttccgaggcctgagtattgcaatacatgcagtagtacatcattttagcaactctaaaaaaaaaaaaaatacaaataaaaaggaaaaaaaattacattttttatcttatacctcagatattttgttctgtgtattttaatattgtgggtctttaatttctgaaggttccgtagtttggttgctggctgtaggagtttttgtggttgatctagacagatgctagataatgaataaaaactggtttagggccatatccagagtgctatattatgtaaatgaattatatatgctgaatattaagctactggggttatcagctatttgggaagagtgtaagtgactacagtagtcatttttttctgcacctgcattattttattttgcgaaaggggaggttgggaggggcttaggggattggaactggggtttggctgaaagaaaaaaaaaaaaatgtaactgatgaatctaaacgacccactgcaccaacaatcatttatcaatggttctaagttactcattgccagttcaagccaaaggtcatgttgttaagggggtgcttctagtagcacttgtgcatctgagttgaatgaagctgtgcaaacccaccctttaaaccattccacccggcagtattcagcttcttaaccagtcgctatttaggaaaaaaaacccactagttaggccatcaacaagcattctttttatatttcttccagtataataaattattgatatcactgctgacttttatattatgggagggaaaaaataacattaataaaaaggtgataaaaaagcactgtttctatttttttctttttttccaaaaaaagaaagtaataaaaacttaaattctttgtaccagttaaaaaaaatgtataaaatttacatctgtgcagtggagttgttaagttctagaaacagtctatgaagctttagttttagcctagtagaacaactgttagagacagacgtataatttttatggaattacatgataatcatattcggatttatagaagcattttacaagtattgcaatcattgagtagagataatcatggtattttcatcagcttggtactttttgaaacgtgactgcgttgtgtgaacaatctgcaatttttcagtccgtgagatcctgcccttccacctctttcccatacccccaaggattatctcaaaatgatctctttagttctgtctccaaggcccaggacacttgtcagaaggatgcaaaaaaagaaaaaagtacatccaccctcttaatcccaaaagaacaaagtctccccacctttctcggatgcagggccagagtgacacagccgaaaaattgcagtttgtctgtacttctgtttgaactttccacgttgtcctgtttacaagttaacttaagttggggtatccgtcacgggtcttcctgttttgtatttaaataaaaacaacagcagcaggctgtccctgagtagttttgctgccataggttaagtcctcatgtgtacagtgcaggccctgtggcccgcacttcagtaagttatcaactctcaccgctgtgaacctgccaatccgctgtaacaactctgctttaaaacaaaaccaaacaaaactttaaaaaaaaatgtgtgatccagctttctcttgccatcctatgtgcatgccgtaagatcagttggatattaaaccatcaataaagtttcacaagatttgaaaacaaa

SEQ ID NO: 177923 - DNA, 4099 bp, Homo sapiens
  Payload ID: 14908
  Gene Symbol: RBFOX1
  Gene Name: RNA binding protein, fox-1 homolog (C. elegans) 1
  ENST ID: ENST00000340209
  CDS Start-End: 298-1506
accttccattttggtagcttcaactttgcagctgctgtgtctcttcgtcgtctgggaagaaaactttcacattaagagttgctgatgcggattttctttctttcctctcccggcgttgatgagtgcttggctcctgacagaagggatttggctcccagctttgtagttcggaagaagttgggtctatagatttccccctaactctccattgatgtgttgagcttcagagggaataataactctacgtaaagcatgctggcgtctcaaggagttctcctgcatccttatggcgtgcctatgattgtaccggcagctccttaccttcctggactgattcagggtaatcaggaagcagccgctgcccctgacacaatggctcagccttacgcttcggcccagtttgctcccccgcagaacggtatccccgcggaatacacggcccctcatccccaccccgcgccagagtacacaggccagaccacggttcccgagcacacattaaacctgtaccctcccgcccagacgcactccgagcagagcccggcggacacgagcgctcagaccgtctctggcaccgccacacagacagatgacgcagcaccgacggatggccagccccagacacaaccttctgaaaacacggaaaacaagtctcagcccaagcggctgcatgtctccaatatccccttcaggttccgggatccggacctcagacaaatgtttggtcaatttggtaaaatcttagatgttgaaattatttttaatgagcgaggctcaaagggatttggtttcgtaactttcgaaaatagtgccgatgcggacagggcgagggagaaattacacggcaccgtggtagagggccgtaaaatcgaggtaaataatgccacagcacgtgtaatgacaaataaaaagaccgtcaacccttatacaaatggctggaaattgaatccagttgtgggtgcagtctacagtcccgaattctatgcaggcacggtcctgttgtgccaggccaaccaggagggatcttccatgtacagtgcccccagttcacttgtatatacttctgcaatgccaggcttcccgtatccagcagccaccgccgcggccgcctaccgaggggcgcacctgcgaggccgcggtcgcaccgtgtacaacaccttcagggccgcggcgcccccgcccccgatcccggcctacggcggtgttgtttaccaggatggattttatggtgcagacatttatggtggttatgctgcataccgctacgcccagcctacccctgccactgccgctgcctacagtgacagttacggacgagtttatgctgccgacccctaccaccacgcacttgctccagcccccacctacggcgttggtgccatgaatgcttttgcacctttgactgatgccaagactaggagccatgctgatgatgtgggtctcgttctttcttcattgcaggctagtatataccgagggggatacaaccgttttgctccatactaaatgacaaaaccataaaaaccttccaatgtggggagaaaggaagctttccgaggcctgagtattgcaatacatgcagtagtacatcattttagcaactctaaaaaaaaaaaaaatacaaataaaaaggaaaaaaaattacattttttatcttatacctcagatattttgttctgtgtattttaatattgtgggtctttaatttctgaaggttccgtagtttggttgctggctgtaggagtttttgtggttgatctagacagatgctagataatgaataaaaactggtttagggccatatccagagtgctatattatgtaaatgaattatatatgctgaatattaagctactggggttatcagctatttgggaagagtgtaagtgactacagtagtcatttttttctgcacctgcattattttattttgcgaaaggggaggttgggaggggcttaggggattggaactggggtttggctgaaagaaaaaaaaaaaaatgtaactgatgaatctaaacgacccactgcaccaacaatcatttatcaatggttctaagttactcattgccagttcaagccaaaggtcatgttgttaagggggtgcttctagtagcacttgtgcatctgagttgaatgaagctgtgcaaacccaccctttaaaccattccacccggcagtattcagcttcttaaccagtcgctatttaggaaaaaaaacccactagttaggccatcaacaagcattctttttatatttcttccagtataataaattattgatatcactgctgacttttatattatgggagggaaaaaataacattaataaaaaggtgataaaaaagcactgtttctatttttttctttttttccaaaaaaagaaagtaataaaaacttaaattctttgtaccagttaaaaaaaatgtataaaatttacatctgtgcagtggagttgttaagttctagaaacagtctatgaagctttagttttagcctagtagaacaactgttagagacagacgtataatttttatggaattacatgataatcatattcggatttatagaagcattttacaagtattgcaatcattgagtagagataatcatggtattttcatcagcttggtactttttgaaacgtgactgcgttgtgtgaacaatctgcaatttttcagtccgtgagatcctgcccttccacctctttcccatacccccaaggattatctcaaaatgatctctttagttctgtctccaaggcccaggacacttgtcagaaggatgcaaaaaaagaaaaaagtacatccaccctcttaatcccaaaagaacaaagtctccccacctttctcggatgcagggccagagtgacacagccgaaaaattgcagtttgtctgtacttctgtttgaactttccacgttgtcctgtttacaagttaacttaagttggggtatccgtcacgggtcttcctgttttgtatttaaataaaaacaacagcagcaggctgtccctgagtagttttgctgccataggttaagtcctcatgtgtacagtgcaggccctgtggcccgcacttcagtaagttatcaactctcaccgctgtgaacctgccaatccgctgtaacaactctgctttaaaacaaaaccaaacaaaactttaaaaaaaaatgtgtgatccagctttctcttgccatcctatgtgcatgccgtaagatcagttggatattaaaccatcaataaagtttcacaagatttgaaaacaaagtttctgtagcttcgatacctaagacagacgatagtgatcttgaaaagagaaaagggggaggggggagctacttatcagccaaaagcatataaagtgttcttttcaccagacttctttgggtgggtgaggggaggggcaagagggtgttttatagcatcactaagacattctcattcccccacctggaaaacagtgttatggcaatgggtgcctggttgatgttcttaaaggaaacgaattattaaaacactatgacatcctccagagggaagaaagagtaggagcagggggctatggagaataaatttctcccaattgccgcctcagatttcaaaatccagaatttgtattgtgtttcgaatcacaaacatagaattcttactgtgttggttaaagtaaaattcatttgcagttttgattttcatcaatgagctgtactttcccccatgactgtatgtagttttaataaaatcatttagagtgagtgagtgccaaccgatgttgcagaatcttttgtctaggcactccaagatgccaataagtcattttaaaatgtatgtcagagatgtaaacaaacattttggattttttttaaacagtatttatttggaatgttttcatttatctaaataactattgctattatgaattatggaaaattaatattatgtgtggcatatagtgacttcttaacacacacatcacgcaatctgcaaacccagaaaatgtgtatatctgtctttagaaattagtgtttatatcacttacagtggtttgtgaataaagaaaactggtttgtaatatcaaaaaaataaaagcttagtctgaaaagg

SEQ ID NO: 177924 - DNA, 3321 bp, Homo sapiens
  Payload ID: 14908
  Gene Symbol: RBFOX1
  Gene Name: RNA binding protein, fox-1 homolog (C. elegans) 1
  Uniprot ID: Q9NWB1
  ENST ID: ENST00000355637
  CDS Start-End: 253-1440
accttccattttggtagcttcaactttgcagctgctgtgtctcttcgtcgtctgggaagaaaactttcacattaagagttgctgatgcggattttctttctttcctctcccggcgttgatgagtgcttggctcctgacagaagggatttggctcccagctttgtagttcggaagaagttgggtctatagatttccccctaactctccattgatgtgttgagcttcagagggaataataactctacgtaaagcatgctggcgtctcaaggagttctcctgcatccttatggcgtgcctatgattgtaccggcagctccttaccttcctggactgattcagggtaatcaggaagcagccgctgcccctgacacaatggctcagccttacgcttcggcccagtttgctcccccgcagaacggtatccccgcggaatacacggcccctcatccccaccccgcgccagagtacacaggccagaccacggttcccgagcacacattaaacctgtaccctcccgcccagacgcactccgagcagagcccggcggacacgagcgctcagaccgtctctggcaccgccacacagacagatgacgcagcaccgacggatggccagccccagacacaaccttctgaaaacacggaaaacaagtctcagcccaagcggctgcatgtctccaatatccccttcaggttccgggatccggacctcagacaaatgtttggtcaatttggtaaaatcttagatgttgaaattatttttaatgagcgaggctcaaagggatttggtttcgtaactttcgaaaatagtgccgatgcggacagggcgagggagaaattacacggcaccgtggtagagggccgtaaaatcgaggtaaataatgccacagcacgtgtaatgacaaataaaaagaccgtcaacccttatacaaatggctggaaattgaatccagttgtgggtgcagtctacagtcccgaattctatgcaggcacggtcctgttgtgccaggccaaccaggagggatcttccatgtacagtgcccccagttcacttgtatatacttctgcaatgccaggcttcccgtatccagcagccaccgccgcggccgcctaccgaggggcgcacctgcgaggccgcggtcgcaccgtgtacaacaccttcagggccgcggcgcccccgcccccgatcccggcctacggcggagtagtgtatcaagagcctgtgtatggcaataaattgctgcagggtggttatgctgcataccgctacgcccagcctacccctgccactgccgctgcctacagtgacagaaatcagttcgtcttcgttgcagcagatgaaatttcttgtaacacctctgcagttacggacgagtttatgctgccgacccctaccaccacgcacttgctccagcccccacctacggcgttggtgccatgaatgcttttgcacctttgactgatgccaagactaggagccatgctgatgatgtgggtctcgttctttcttcattgcaggctagtatataccgagggggatacaaccgttttgctccatactaaatgacaaaaccataaaaaccttccaatgtggggagaaaggaagctttccgaggcctgagtattgcaatacatgcagtagtacatcattttagcaactctaaaaaaaaaaaaaatacaaataaaaaggaaaaaaaattacattttttatcttatacctcagatattttgttctgtgtattttaatattgtgggtctttaatttctgaaggttccgtagtttggttgctggctgtaggagtttttgtggttgatctagacagatgctagataatgaataaaaactggtttagggccatatccagagtgctatattatgtaaatgaattatatatgctgaatattaagctactggggttatcagctatttgggaagagtgtaagtgactacagtagtcatttttttctgcacctgcattattttattttgcgaaaggggaggttgggaggggcttaggggattggaactggggtttggctgaaagaaaaaaaaaaaaatgtaactgatgaatctaaacgacccactgcaccaacaatcatttatcaatggttctaagttactcattgccagttcaagccaaaggtcatgttgttaagggggtgcttctagtagcacttgtgcatctgagttgaatgaagctgtgcaaacccaccctttaaaccattccacccggcagtattcagcttcttaaccagtcgctatttaggaaaaaaaacccactagttaggccatcaacaagcattctttttatatttcttccagtataataaattattgatatcactgctgacttttatattatgggagggaaaaaataacattaataaaaaggtgataaaaaagcactgtttctatttttttctttttttccaaaaaaagaaagtaataaaaacttaaattctttgtaccagttaaaaaaaatgtataaaatttacatctgtgcagtggagttgttaagttctagaaacagtctatgaagctttagttttagcctagtagaacaactgttagagacagacgtataatttttatggaattacatgataatcatattcggatttatagaagcattttacaagtattgcaatcattgagtagagataatcatggtattttcatcagcttggtactttttgaaacgtgactgcgttgtgtgaacaatctgcaatttttcagtccgtgagatcctgcccttccacctctttcccatacccccaaggattatctcaaaatgatctctttagttctgtctccaaggcccaggacacttgtcagaaggatgcaaaaaaagaaaaaagtacatccaccctcttaatcccaaaagaacaaagtctccccacctttctcggatgcagggccagagtgacacagccgaaaaattgcagtttgtctgtacttctgtttgaactttccacgttgtcctgtttacaagttaacttaagttggggtatccgtcacgggtcttcctgttttgtatttaaataaaaacaacagcagcaggctgtccctgagtagttttgctgccataggttaagtcctcatgtgtacagtgcaggccctgtggcccgcacttcagtaagttatcaactctcaccgctgtgaacctgccaatccgctgtaacaactctgctttaaaacaaaaccaaacaaaactttaaaaaaaaatgtgtgatccagctttctcttgccatcctatgtgcatgccgtaagatcagttggatattaaaccatcaataaagtttcacaagatttgaaaacaaa

SEQ ID NO: 177925 - DNA, 1684 bp, Homo sapiens
  Payload ID: 14908
  Gene Symbol: RBFOX1
  Gene Name: RNA binding protein, fox-1 homolog (C. elegans) 1
  ENST ID: ENST00000422070
  CDS Start-End: 197-1474
agagagagcaggagcggaccgcgcgcccgggattgagagtccttgcgctccagacccccacccagtggccgccagggtccccgcctgtccggaccctcgccgcgcccaggcaggcgcgccagggcggggctgacctgcccgcgaagttgcggacagtgcgtgagaaaccagcacccccttccgccgcctccagcttatggaaactggtcaaagaactcatgcaagtggaacttacagcttccttgatcggactcagcattcagatatcaaagcagactgcaatacctgcgtggaaatagaagacagaaaggtttcaagacaacagatgaattgtgaaagagagcagctaaggggtaatcaggaagcagccgctgcccctgacacaatggctcagccttacgcttcggcccagtttgctcccccgcagaacggtatccccgcggaatacacggcccctcatccccaccccgcgccagagtacacaggccagaccacggttcccgagcacacattaaacctgtaccctcccgcccagacgcactccgagcagagcccggcggacacgagcgctcagaccgtctctggcaccgccacacagacagatgacgcagcaccgacggatggccagccccagacacaaccttctgaaaacacggaaaacaagtctcagcccaagcggctgcatgtctccaatatccccttcaggttccgggatccggacctcagacaaatgtttggtcaatttggtaaaatcttagatgttgaaattatttttaatgagcgaggctcaaagggatttggtttcgtaactttcgaaaatagtgccgatgcggacagggcgagggagaaattacacggcaccgtggtagagggccgtaaaatcgaggtaaataatgccacagcacgtgtaatgacaaataaaaagaccgtcaacccttatacaaatggctggaaattgaatccagttgtgggtgcagtctacagtcccgaattctatgcaggcacggtcctgttgtgccaggccaaccaggagggatcttccatgtacagtgcccccagttcacttgtatatacttctgcaatgccaggcttcccgtatccagcagccaccgccgcggccgcctaccgaggggcgcacctgcgaggccgcggtcgcaccgtgtacaacaccttcagggccgcggcgcccccgcccccgatcccggcctacggcggtgttgtttaccaggatggattttatggtgcagacatttatggtggttatgctgcataccgctacgcccagcctacccctgccactgccgctgcctacagtgacagttacggacgagtttatgctgccgacccctaccaccacgcacttgctccagcccccacctacggcgttggtgccatgccccaaggttccagccccagcacagacttcagaggagctaagctgcacacttccaggcctctgctgtcaggcagctgagaatctgactgcctctcctcccctattacaattcatgtttaaagtcatagtcgcccaggaaagaaaatagagaggggcacactttgtgtgtgtacctagtacataagaaagtagaaggaatcagctgggtttgggggttgccttttgttttggggcaggtctgggtttttgttttgggagggggtggggggagggtaaaaaatgggaggt

SEQ ID NO: 177926 - DNA, 1530 bp, Homo sapiens
  Payload ID: 14908
  Gene Symbol: RBFOX1
  Gene Name: RNA binding protein, fox-1 homolog (C. elegans) 1
  Uniprot ID: Q9NWB1
  ENST ID: ENST00000436368
  CDS Start-End: 253-1431
accttccattttggtagcttcaactttgcagctgctgtgtctcttcgtcgtctgggaagaaaactttcacattaagagttgctgatgcggattttctttctttcctctcccggcgttgatgagtgcttggctcctgacagaagggatttggctcccagctttgtagttcggaagaagttgggtctatagatttccccctaactctccattgatgtgttgagcttcagagggaataataactctacgtaaagcatgctggcgtctcaaggagttctcctgcatccttatggcgtgcctatgattgtaccggcagctccttaccttcctggactgattcagggtaatcaggaagcagccgctgcccctgacacaatggctcagccttacgcttcggcccagtttgctcccccgcagaacggtatccccgcggaatacacggcccctcatccccaccccgcgccagagtacacaggccagaccacggttcccgagcacacattaaacctgtaccctcccgcccagacgcactccgagcagagcccggcggacacgagcgctcagaccgtctctggcaccgccacacagacagatgacgcagcaccgacggatggccagccccagacacaaccttctgaaaacacggaaaacaagtctcagcccaagcggctgcatgtctccaatatccccttcaggttccgggatccggacctcagacaaatgtttggtcaatttggtaaaatcttagatgttgaaattatttttaatgagcgaggctcaaagggatttggtttcgtaactttcgaaaatagtgccgatgcggacagggcgagggagaaattacacggcaccgtggtagagggccgtaaaatcgaggtaaataatgccacagcacgtgtaatgacaaataaaaagaccgtcaacccttatacaaatggctggaaattgaatccagttgtgggtgcagtctacagtcccgaattctatgcaggcacggtcctgttgtgccaggccaaccaggagggatcttccatgtacagtgcccccagttcacttgtatatacttctgcaatgccaggcttcccgtatccagcagccaccgccgcggccgcctaccgaggggcgcacctgcgaggccgcggtcgcaccgtgtacaacaccttcagggccgcggcgcccccgcccccgatcccggcctacggcggagtagtgtatcaagagcctgtgtatggcaataaattgctgcagggtggttatgctgcataccgctacgcccagcctacccctgccactgccgctgcctacagtgacagttacggacgagtttatgctgccgacccctaccaccacgcacttgctccagcccccacctacggcgttggtgccatggctagtatataccgagggggatacaaccgttttgctccatactaaatgacaaaaccataaaaaccttccaatgtggggagaaaggaagctttccgaggcctgagtattgcaatacatgcagtagtacatcattttagcaactct

SEQ ID NO: 177927 - DNA, 1599 bp, Homo sapiens
  Payload ID: 14908
  Gene Symbol: RBFOX1
  Gene Name: RNA binding protein, fox-1 homolog (C. elegans) 1
  ENST ID: ENST00000535565
  CDS Start-End: 322-1464
gttttggcgcggacagaggccgaggccggccggggaagccggacccgggccctggcgccgccgtggcctccctttgtgcgcgcccgggtgttgattgcctccttgcacgggctgctcgctctcgcgcccgcgcgctcggggcgttctgcacctgctggcggtcgtgccaggcagcccgggcgagcgaaggcgcgcggcgcgcacgacagatgactggagtcatttacattgctagcacgtgggtgccgtttgctgttgcctcggacttctcccgtgctgtgttttcccggtgaggaaacaggaggcactttgcagccgacaatgaaatcttggcagctaattgcagtcgtgggagatgcccttcaggatatcaaagcagactgcaatacctgcgtggaaatagaagacagaaaggtttcaagacaacagatgaattgtgaaagagagcagctaaggggtaatcaggaagcagccgctgcccctgacacaatggctcagccttacgcttcggcccagtttgctcccccgcagaacggtatccccgcggaatacacggcccctcatccccaccccgcgccagagtacacaggccagaccacggttcccgagcacacattaaacctgtaccctcccgcccagacgcactccgagcagagcccggcggacacgagcgctcagaccgtctctggcaccgccacacaatttggtaaaatcttagatgttgaaattatttttaatgagcgaggctcaaaggtaaataatgccacagcacgtgtaatgacaaataaaaagaccgtcaacccttatacaaatggctggaaattgaatccagttgtgggtgcagtctacagtcccgaattctatgcaggcacggtcctgttgtgccaggccaaccaggagggatcttccatgtacagtgcccccagttcacttgtatatacttctgcaatgccaggcttcccgtatccagcagccaccgccgcggccgcctaccgaggggcgcacctgcgaggccgcggtcgcaccgtgtacaacaccttcagggccgcggcgcccccgcccccgatcccggcctacggcggtgttgtttaccaggatggattttatggtgcagacatttatggtggttatgctgcataccgctacgcccagcctacccctgccactgccgctgcctacagtgacagaaatcagttcgtcttcgttgcagcagatgaaatttcttgtaacacctctgcagttacggacgagtttatgctgccgacccctaccaccacgcacttgctccagcccccacctacggcgttggtgccatgccccaaggttccagccccagcacagacttcagaggagctaagctgcacacttccaggcctctgctgtcaggcagctgagaatctgactgcctctcctcccctattacaattcatgtttaaagtcatagtcgcccaggaaagaaaatagagaggggcacactttgtgtgtgtacctagtacataagaaagtagaaggaatcagctgggtttgggggttgccttttgttttggggcaggtctgggtttttgttttgggagggggtggggggagggtaaaaaatgg

SEQ ID NO: 177928 - DNA, 3524 bp, Homo sapiens
  Payload ID: 14908
  Gene Symbol: RBFOX1
  Gene Name: RNA binding protein, fox-1 homolog (C. elegans) 1
  ENST ID: ENST00000547372
  CDS Start-End: 307-1707
aagaaggaaggagtgagccgagccgagcaccccacatctggaggggacagccagccgtgggccccgccccggcgtccggagcaggagaactccgagcttcttgcccaggcagagagagcaggagcggaccgcgcgcccgggattgagagtccttgcgctccagacccccacccagtggccgccagggtccccgcctgtccggaccctcgccgcgcccaggcaggcgcgccagggcggggctgacctgcccgcgaagttgcggacagtgcgtgagaaaccagcacccccttccgccgcctccagcttatggaaactggtcaaagaactcatgcaagtggaacttacagcttccttgatcggactcagcattcagatatcaaagcagactgcaatacctgcgtggaaatagaagacagaaaggtttcaagacaacagatgaattgtgaaagagagcagctaaggggtaatcaggaagcagccgctgcccctgacacaatggctcagccttacgcttcggcccagtttgctcccccgcagaacggtatccccgcggaatacacggcccctcatccccaccccgcgccagagtacacaggccagaccacggttcccgagcacacattaaacctgtaccctcccgcccagacgcactccgagcagagcccggcggacacgagcgctcagaccgtctctggcaccgccacacagacagatgacgcagcaccgacggatggccagccccagacacaaccttctgaaaacacggaaaacaagtctcagcccaagcggctgcatgtctccaatatccccttcaggttccgggatccggacctcagacaaatgtttggtcaatttggtaaaatcttagatgttgaaattatttttaatgagcgaggctcaaagggatttggtttcgtaactttcgaaaatagtgccgatgcggacagggcgagggagaaattacacggcaccgtggtagagggccgtaaaatcgaggtaaataatgccacagcacgtgtaatgacaaataaaaagaccgtcaacccttatacaaatggctggaaattgaatccagttgtgggtgcagtctacagtcccgaattctatgcaggcacggtcctgttgtgccaggccaaccaggagggatcttccatgtacagtgcccccagttcacttgtatatacttctgcaatgccaggcttcccgtatccagcagccaccgccgcggccgcctaccgaggggcgcacctgcgaggccgcggtcgcaccgtgtacaacaccttcagggccgcggcgcccccgcccccgatcccggcctacggcggtgttgtttaccaggatggattttatggtgcagacatttatggtggttatgctgcataccgctacgcccagcctacccctgccactgccgctgcctacagtgacagaaatcagttcgtcttcgttgcagcagatgaaatttcttgtaacacctctgcagttacggacgagtttatgctgccgacccctaccaccacgcacttgctccagcccccacctacggcgttggtgccatgccccaaggttccagccccagcacagacttcagaggagctaagctgcacacttccaggcctctgctgtcaggcagctgagaatctgactgcctctcctcccctattacaattcatgtttaaagtcatagtcgcccaggaaagaaaatagagaggggcacactttgtgtgtgtacctagtacataagaaagtagaaggaatcagctgggtttgggggttgccttttgttttggggcaggtctgggtttttgttttgggagggggtggggggagggtaaaaaatgggaggtaagggtggggtgaacttgcctgtacttgttcaaacttctatgcactgaaactcttgagtacagtaagacgtgcccatcacgtgagagcatatgcaatcattacaaagctttggcatgcagttttctgcttggatcaagaatatcagtccttaccctaaaaatgaatccccataggcattcatttgaattgccaatacttttagaaaaaggaaatcgttaagtgccaccttgtagccattaaaaccatggccggacagttcactgaagctcagtcatagaaattcagccatgatttggaagcattgttttgcacaagcttaattacatcaagcaattcatctgtacaactccacaactcccttctcaagatcagattccatacagcttacagagccaagttaagtaagaagtaggttgagattttcatcccaattctgcattcaacaactctgcttcaacacctagtccacatgaggaatgtgttggagagttgaattacattcaacaactggtccaaattcaacctcaagtgcagattattctgttataaaaaaatgagacagtgaaaatccttccattgtccagcttataatagagtccttttagctaagaggactggctgacagaatttggttttgcagggaatttctttaggaggagctattggggaaggtcaggaatggccctatctttagttctccaagaatgacctgggatgggtagggggtgcctccatttcggttggttttgagtgtctatttttcacattagtctttttgatgatccacatgttgcaaaaggaaaatgtaaaaaacacacccctcaaattgctttgtttcagaatgcttttgcacctttgactgatgccaagactaggagccatgctgatgatgtgggtctcgttctttcttcattgcaggctagtatataccgagggggatacaaccgttttgctccatactaaatgacaaaaccataaaaaccttccaatgtggggagaaaggaagctttccgaggcctgagtattgcaatacatgcagtagtacatcattttagcaactctaaaaaaaaaaaaaatacaaataaaaaggaaaaaaaattacattttttatcttatacctcagatattttgttctgtgtattttaatattgtgggtctttaatttctgaaggttccgtagtttggttgctggctgtaggagtttttgtggttgatctagacagatgctagataatgaataaaaactggtttagggccatatccagagtgctatattatgtaaatgaattatatatgctgaatattaagctactggggttatcagctatttgggaagagtgtaagtgactacagtagtcatttttttctgcacctgcattattttattttgcgaaaggggaggttgggaggggcttaggggattggaactggggtttggctgaaagaaaaaaaaaaaaatgtaactgatgaatctaaacgacccactgcaccaacaatcatttatcaatggttctaagttactcattgccagttcaagccaaaggtcatgttgttaagggggtgcttctagtagcacttgtgcatctgagttgaatgaagctgtgcaaacccaccctttaaaccattccacccggcagtattcagcttcttaaccagtcgctatttaggaaaaaaaa

SEQ ID NO: 177929 - DNA, 974 bp, Homo sapiens
  Payload ID: 14908
  Gene Symbol: RBFOX1
  Gene Name: RNA binding protein, fox-1 homolog (C. elegans) 1
  ENST ID: ENST00000551752
  CDS Start-End: 186-974
gcggcgtgtgcgcctccggggctgctgattagaataggggacttggccgtggatggaatccgggaaacccaaaccggagatggaaggatgaggctgcgtttgcagcgcgtgaatgggacgcggatatcaaagcagactgcaatacctgcgtggaaatagaagacagaaaggtttcaagacaacagatgaattgtgaaagagagcagctaaggggtaatcaggaagcagccgctgcccctgacacaatggctcagccttacgcttcggcccagtttgctcccccgcagaacggtatccccgcggaatacacggcccctcatccccaccccgcgccagagtacacaggccagaccacggttcccgagcacacattaaacctgtaccctcccgcccagacgcactccgagcagagcccggcggacacgagcgctcagaccgtctctggcaccgccacacagacagatgacgcagcaccgacggatggccagccccagacacaaccttctgaaaacacggaaaacaagtctcagcccaagcggctgcatgtctccaatatccccttcaggttccgggatccggacctcagacaaatgtttggtcaatttggtaaaatcttagatgttgaaattatttttaatgagcgaggctcaaagggatttggtttcgtaactttcgaaaatagtgccgatgcggacagggcgagggagaaattacacggcaccgtggtagagggccgtaaaatcgaggtaaataatgccacagcacgtgtaatgacaaataaaaagaccgtcaacccttatacaaatggctggaaattgaatccagttgtgggtgcagtctacagtcccgaattctatgcaggcacggtcctgttgtgccaggccaaccaggagggatcttccatgtacagtgcccccagttcacttgtatatacttctgcaatgccaggcttcccgtatccagcagccaccgcc

SEQ ID NO: 177930 - DNA, 1513 bp, Homo sapiens
  Payload ID: 14908
  Gene Symbol: RBFOX1
  Gene Name: RNA binding protein, fox-1 homolog (C. elegans) 1
  Uniprot ID: Q9NWB1
  ENST ID: ENST00000547338
  CDS Start-End: 221-1414
gtgcatttgtgttgtgggggcatggggtgcatttgtgtgtatatatgtgtggatgtagggtgcgtttgtctgtgtgtatttgtgtgggcatggagtgcatttgcgttgcgggggtgtggagtgtgtttgtgtgtgtgcacacgcacatggttctcatggtcctcccgttttcaactgaacctgtaattagctcctcagagaccaggtttcaagacaacagatgaattgtgaaagagagcagctaaggggtaatcaggaagcagccgctgcccctgacacaatggctcagccttacgcttcggcccagtttgctcccccgcagaacggtatccccgcggaatacacggcccctcatccccaccccgcgccagagtacacaggccagaccacggttcccgagcacacattaaacctgtaccctcccgcccagacgcactccgagcagagcccggcggacacgagcgctcagaccgtctctggcaccgccacacagacagatgacgcagcaccgacggatggccagccccagacacaaccttctgaaaacacggaaaacaagtctcagcccaagcggctgcatgtctccaatatccccttcaggttccgggatccggacctcagacaaatgtttggtcaatttggtaaaatcttagatgttgaaattatttttaatgagcgaggctcaaagggatttggtttcgtaactttcgaaaatagtgccgatgcggacagggcgagggagaaattacacggcaccgtggtagagggccgtaaaatcgaggtaaataatgccacagcacgtgtaatgacaaataaaaagaccgtcaacccttatacaaatggctggaaattgaatccagttgtgggtgcagtctacagtcccgaattctatgcaggcacggtcctgttgtgccaggccaaccaggagggatcttccatgtacagtgcccccagttcacttgtatatacttctgcaatgccaggcttcccgtatccagcagccaccgccgcggccgcctaccgaggggcgcacctgcgaggccgcggtcgcaccgtgtacaacaccttcagggccgcggcgcccccgcccccgatcccggcctacggcggtgttgtttaccaggatggattttatggtgcagacatttatggtggttatgctgcataccgctacgcccagcctacccctgccactgccgctgcctacagtgacagttacggacgagtttatgctgccgacccctaccaccacgcacttgctccagcccccacctacggcgttggtgccatgaatgcttttgcacctttgactgatgccaagactaggagccatgctgatgatgtgggtctcgttctttcttcattgcaggctagtatataccgagggggatacaaccgttttgctccatactaaatgacaaaaccataaaaaccttccaatgtggggagaaaggaagctttccgaggcctgagtattgcaatacatgcagtagtacatcattttagcaactct

SEQ ID NO: 177931 - DNA, 2196 bp, Homo sapiens
  Payload ID: 14908
  Gene Symbol: RBFOX1
  Gene Name: RNA binding protein, fox-1 homolog (C. elegans) 1
  Uniprot ID: Q9NWB1
  ENST ID: ENST00000553186
  CDS Start-End: 989-2101
tccggctctcctttgtttattttctaatctatatttttactggaagatttcctctttattctctcccgccctcctacaagcgctcttgctggccgtctgggtgcacacaccgctccctcgatcaccccagcccccttcctggtctcccgagcgcggggtttgaaggtcacctcctttccagtccccgtgcgagccgcgctgccgccgcctcctccagccagagtcggtgggactggctgcgctgccctgaagtggttctccaagcagcgcggagggtggcggacggcggacggagcccaggggccgcgtcgggtggggaaacccgaactcgcggaggggaatccctccccctccgccccagccccccagcagcacccgcggtggggcgggggcgctctgccagccccgggaacagcagaggcggcggcactggctggacccacgcgcgcgcctccggggctgaagaaggaaggagtgagccgagccgagcaccccacatctggaggggacagccagccgtgggccccgccccggcgtccggagcaggagaactccgagcttcttgcccaggcagagagagcaggagcggaccgcgcgcccgggattgagagtccttgcgctccagacccccacccagtggccgccagggtccccgcctgtccggaccctcgccgcgcccaggcaggcgcgccagggcggggctgacctgcccgcgaagttgcggacagtgcgtgagaaaccagcacccccttccgccgcctccagcttatggtgagtgtggctgggggtgcagagagcgcacgggaattcgggggtctggggccgagaacgtgaccgcagccgggctcgccgggagttctaggaaactggtcaaagaactcatgcaagtggaacttacagcttccttgatcggactcagcattcagatatcaaagcagactgcaatacctgcgtggaaatagaagacagaaaggtttcaagacaacagatgaattgtgaaagagagcagctaaggggtaatcaggaagcagccgctgcccctgacacaatggctcagccttacgcttcggcccagtttgctcccccgcagaacggtatccccgcggaatacacggcccctcatccccaccccgcgccagagtacacaggccagaccacggttcccgagcacacattaaacctgtaccctcccgcccagacgcactccgagcagagcccggcggacacgagcgctcagaccgtctctggcaccgccacacagacagatgacgcagcaccgacggatggccagccccagacacaaccttctgaaaacacggaaaacaagtctcagcccaagcggctgcatgtctccaatatccccttcaggttccgggatccggacctcagacaaatgtttggtcaatttggtaaaatcttagatgttgaaattatttttaatgagcgaggctcaaagggatttggtttcgtaactttcgaaaatagtgccgatgcggacagggcgagggagaaattacacggcaccgtggtagagggccgtaaaatcgaggtaaataatgccacagcacgtgtaatgacaaataaaaagaccgtcaacccttatacaaatggctggaaattgaatccagttgtgggtgcagtctacagtcccgaattctatgcagtgccaggcttcccgtatccagcagccaccgccgcggccgcctaccgaggggcgcacctgcgaggccgcggtcgcaccgtgtacaacaccttcagggccgcggcgcccccgcccccgatcccggcctacggcggtgttgtttaccaggatggattttatggtgcagacatttatggtggttatgctgcataccgctacgcccagcctacccctgccactgccgctgcctacagtgacagttacggacgagtttatgctgccgacccctaccaccacgcacttgctccagcccccacctacggcgttggtgccatgaatgcttttgcacctttgactgatgccaagactaggagccatgctgatgatgtgggtctcgttctttcttcattgcaggctagtatataccgagggggatacaaccgttttgctccatactaaatgacaaaaccataaaaaccttccaatgtggggagaaaggaagctttccgaggcctgagtattgcaatacatgcagtagtacatcattttagcaa

SEQ ID NO: 177932 - DNA, 1430 bp, Homo sapiens
  Payload ID: 14908
  Gene Symbol: RBFOX1
  Gene Name: RNA binding protein, fox-1 homolog (C. elegans) 1
  ENST ID: ENST00000552089
  CDS Start-End: 115-1290
agatgactggagtcatttacattgctagcacgtgggtgccgtttgctgttgcctcggacttctcccgtgctgtgttttcccggtgaggaaacaggaggcactttgcagccgacaatgaaatcttggcagctaattgcagtcgtgggagatgcccttcaggatatcaaagcagactgcaatacctgcgtggaaatagaagacagaaaggtttcaagacaacagatgaattgtgaaagagagcagctaaggggtaatcaggaagcagccgctgcccctgacacaatggctcagccttacgcttcggcccagtttgctcccccgcagaacggtatccccgcggaatacacggcccctcatccccaccccgcgccagagtacacaggccagaccacggttcccgagcacacattaaacctgtaccctcccgcccagacgcactccgagcagagcccggcggacacgagcgctcagaccgtctctggcaccgccacaacagatgacgcagcaccgacggatggccagccccagacacaaccttctgaaaacacggaaaacaagtctcagcccaagcggctgcatgtctccaatatccccttcaggttccgggatccggacctcagacaaatgtttggtggatttggtttcgtaactttcgaaaatagtgccgatgcggacagggcgagggagaaattacacggcaccgtggtagagggccgtaaaatcgaggtaaataatgccacagcacgtgtaatgacaaataaaaagaccgtcaacccttatacaaatggctggaaattgaatccagttgtgggtgcagtctacagtcccgaattctatgcaggcacggtcctgttgtgccaggccaaccaggagggatcttccatgtacagtgcccccagttcacttgtatatacttctgcaatgccaggcttcccgtatccagcagccaccgccgcggccgcctaccgaggggcgcacctgcgaggccgcggtcgcaccgtgtacaacaccttcagggccgcggcgcccccgcccccgatcccggcctacggcggtgttgtttaccaggatggattttatggtgcagacatttatggtggttatgctgcataccgctacgcccagcctacccctgccactgccgctgcctacagtgacagaaatcagttcgtcttcgttgcagcagatgaaatttcttgtaacacctctgcagttacggacgagtttatgctgccgacccctaccaccacgcacttgctccagcccccacctacggcgttggtgccatgaatgcttttgcacctttgactgatgccaagactaggagccatgctgatgatgtgggtctcgttctttcttcattgcaggctagtatataccgagggggatacaaccgttttgctccatactaaatgacaaaaccataaaaa

SEQ ID NO: 177933 - DNA, 4775 bp, Homo sapiens
  Payload ID: 14908
  Gene Symbol: RBFOX1
  Gene Name: RNA binding protein, fox-1 homolog (C. elegans) 1
  Uniprot ID: Q9NWB1
  ENST ID: ENST00000550418
  CDS Start-End: 989-2182
tccggctctcctttgtttattttctaatctatatttttactggaagatttcctctttattctctcccgccctcctacaagcgctcttgctggccgtctgggtgcacacaccgctccctcgatcaccccagcccccttcctggtctcccgagcgcggggtttgaaggtcacctcctttccagtccccgtgcgagccgcgctgccgccgcctcctccagccagagtcggtgggactggctgcgctgccctgaagtggttctccaagcagcgcggagggtggcggacggcggacggagcccaggggccgcgtcgggtggggaaacccgaactcgcggaggggaatccctccccctccgccccagccccccagcagcacccgcggtggggcgggggcgctctgccagccccgggaacagcagaggcggcggcactggctggacccacgcgcgcgcctccggggctgaagaaggaaggagtgagccgagccgagcaccccacatctggaggggacagccagccgtgggccccgccccggcgtccggagcaggagaactccgagcttcttgcccaggcagagagagcaggagcggaccgcgcgcccgggattgagagtccttgcgctccagacccccacccagtggccgccagggtccccgcctgtccggaccctcgccgcgcccaggcaggcgcgccagggcggggctgacctgcccgcgaagttgcggacagtgcgtgagaaaccagcacccccttccgccgcctccagcttatggtgagtgtggctgggggtgcagagagcgcacgggaattcgggggtctggggccgagaacgtgaccgcagccgggctcgccgggagttctaggaaactggtcaaagaactcatgcaagtggaacttacagcttccttgatcggactcagcattcagatatcaaagcagactgcaatacctgcgtggaaatagaagacagaaaggtttcaagacaacagatgaattgtgaaagagagcagctaaggggtaatcaggaagcagccgctgcccctgacacaatggctcagccttacgcttcggcccagtttgctcccccgcagaacggtatccccgcggaatacacggcccctcatccccaccccgcgccagagtacacaggccagaccacggttcccgagcacacattaaacctgtaccctcccgcccagacgcactccgagcagagcccggcggacacgagcgctcagaccgtctctggcaccgccacacagacagatgacgcagcaccgacggatggccagccccagacacaaccttctgaaaacacggaaaacaagtctcagcccaagcggctgcatgtctccaatatccccttcaggttccgggatccggacctcagacaaatgtttggtcaatttggtaaaatcttagatgttgaaattatttttaatgagcgaggctcaaagggatttggtttcgtaactttcgaaaatagtgccgatgcggacagggcgagggagaaattacacggcaccgtggtagagggccgtaaaatcgaggtaaataatgccacagcacgtgtaatgacaaataaaaagaccgtcaacccttatacaaatggctggaaattgaatccagttgtgggtgcagtctacagtcccgaattctatgcaggcacggtcctgttgtgccaggccaaccaggagggatcttccatgtacagtgcccccagttcacttgtatatacttctgcaatgccaggcttcccgtatccagcagccaccgccgcggccgcctaccgaggggcgcacctgcgaggccgcggtcgcaccgtgtacaacaccttcagggccgcggcgcccccgcccccgatcccggcctacggcggtgttgtttaccaggatggattttatggtgcagacatttatggtggttatgctgcataccgctacgcccagcctacccctgccactgccgctgcctacagtgacagttacggacgagtttatgctgccgacccctaccaccacgcacttgctccagcccccacctacggcgttggtgccatgaatgcttttgcacctttgactgatgccaagactaggagccatgctgatgatgtgggtctcgttctttcttcattgcaggctagtatataccgagggggatacaaccgttttgctccatactaaatgacaaaaccataaaaaccttccaatgtggggagaaaggaagctttccgaggcctgagtattgcaatacatgcagtagtacatcattttagcaactctaaaaaaaaaaaaaatacaaataaaaaggaaaaaaaattacattttttatcttatacctcagatattttgttctgtgtattttaatattgtgggtctttaatttctgaaggttccgtagtttggttgctggctgtaggagtttttgtggttgatctagacagatgctagataatgaataaaaactggtttagggccatatccagagtgctatattatgtaaatgaattatatatgctgaatattaagctactggggttatcagctatttgggaagagtgtaagtgactacagtagtcatttttttctgcacctgcattattttattttgcgaaaggggaggttgggaggggcttaggggattggaactggggtttggctgaaagaaaaaaaaaaaaatgtaactgatgaatctaaacgacccactgcaccaacaatcatttatcaatggttctaagttactcattgccagttcaagccaaaggtcatgttgttaagggggtgcttctagtagcacttgtgcatctgagttgaatgaagctgtgcaaacccaccctttaaaccattccacccggcagtattcagcttcttaaccagtcgctatttaggaaaaaaaacccactagttaggccatcaacaagcattctttttatatttcttccagtataataaattattgatatcactgctgacttttatattatgggagggaaaaaataacattaataaaaaggtgataaaaaagcactgtttctatttttttctttttttccaaaaaaagaaagtaataaaaacttaaattctttgtaccagttaaaaaaaatgtataaaatttacatctgtgcagtggagttgttaagttctagaaacagtctatgaagctttagttttagcctagtagaacaactgttagagacagacgtataatttttatggaattacatgataatcatattcggatttatagaagcattttacaagtattgcaatcattgagtagagataatcatggtattttcatcagcttggtactttttgaaacgtgactgcgttgtgtgaacaatctgcaatttttcagtccgtgagatcctgcccttccacctctttcccatacccccaaggattatctcaaaatgatctctttagttctgtctccaaggcccaggacacttgtcagaaggatgcaaaaaaagaaaaaagtacatccaccctcttaatcccaaaagaacaaagtctccccacctttctcggatgcagggccagagtgacacagccgaaaaattgcagtttgtctgtacttctgtttgaactttccacgttgtcctgtttacaagttaacttaagttggggtatccgtcacgggtcttcctgttttgtatttaaataaaaacaacagcagcaggctgtccctgagtagttttgctgccataggttaagtcctcatgtgtacagtgcaggccctgtggcccgcacttcagtaagttatcaactctcaccgctgtgaacctgccaatccgctgtaacaactctgctttaaaacaaaaccaaacaaaactttaaaaaaaaatgtgtgatccagctttctcttgccatcctatgtgcatgccgtaagatcagttggatattaaaccatcaataaagtttcacaagatttgaaaacaaagtttctgtagcttcgatacctaagacagacgatagtgatcttgaaaagagaaaagggggaggggggagctacttatcagccaaaagcatataaagtgttcttttcaccagacttctttgggtgggtgaggggaggggcaagagggtgttttatagcatcactaagacattctcattcccccacctggaaaacagtgttatggcaatgggtgcctggttgatgttcttaaaggaaacgaattattaaaacactatgacatcctccagagggaagaaagagtaggagcagggggctatggagaataaatttctcccaattgccgcctcagatttcaaaatccagaatttgtattgtgtttcgaatcacaaacatagaattcttactgtgttggttaaagtaaaattcatttgcagttttgattttcatcaatgagctgtactttcccccatgactgtatgtagttttaataaaatcatttagagtgagtgagtgccaaccgatgttgcagaatcttttgtctaggcactccaagatgccaataagtcattttaaaatgtatgtcagagatgtaaacaaacattttggattttttttaaacagtatttatttggaatgttttcatttatctaaataactattgctattatgaattatggaaaattaatattatgtgtggcatatagtgacttcttaacacacacatcacgcaatctgcaaacccagaaaatgtgtatatctgtctttagaaattagtgtttatatcacttacagtggtttgtgaataaagaaaactggtttgtaatatcaaaaaaataaaagcttagtctgaaaagg

SEQ ID NO: 177934 - DNA, 1811 bp, Homo sapiens
  Payload ID: 14908
  Gene Symbol: RBFOX1
  Gene Name: RNA binding protein, fox-1 homolog (C. elegans) 1
  ENST ID: ENST00000547605
  CDS Start-End: 1026-1811
cgcacacacacacatgcacacattttctcgcgctctctccggctctcctttgtttattttctaatctatatttttactggaagatttcctctttattctctcccgccctcctacaagcgctcttgctggccgtctgggtgcacacaccgctccctcgatcaccccagcccccttcctggtctcccgagcgcggggtttgaaggtcacctcctttccagtccccgtgcgagccgcgctgccgccgcctcctccagccagagtcggtgggactggctgcgctgccctgaagtggttctccaagcagcgcggagggtggcggacggcggacggagcccaggggccgcgtcgggtggggaaacccgaactcgcggaggggaatccctccccctccgccccagccccccagcagcacccgcggtggggcgggggcgctctgccagccccgggaacagcagaggcggcggcactggctggacccacgcgcgcgcctccggggctgaagaaggaaggagtgagccgagccgagcaccccacatctggaggggacagccagccgtgggccccgccccggcgtccggagcaggagaactccgagcttcttgcccaggcagagagagcaggagcggaccgcgcgcccgggattgagagtccttgcgctccagacccccacccagtggccgccagggtccccgcctgtccggaccctcgccgcgcccaggcaggcgcgccagggcggggctgacctgcccgcgaagttgcggacagtgcgtgagaaaccagcacccccttccgccgcctccagcttatggtgagtgtggctgggggtgcagagagcgcacgggaattcgggggtctggggccgagaacgtgaccgcagccgggctcgccgggagttctaggaaactggtcaaagaactcatgcaagtggaacttacagcttccttgatcggactcagcattcagatatcaaagcagactgcaatacctgcgtggaaatagaagacagaaaggtttcaagacaacagatgaattgtgaaagagagcagctaaggggtaatcaggaagcagccgctgcccctgacacaatggctcagccttacgcttcggcccagtttgctcccccgcagaacggtatccccgcggaatacacggcccctcatccccaccccgcgccagagtacacaggccagaccacggttcccgagcacacattaaacctgtaccctcccgcccagacgcactccgagcagagcccggcggacacgagcgctcagaccgtctctggcaccgccacaacagatgacgcagcaccgacggatggccagccccagacacaaccttctgaaaacacggaaaacaagtctcagcccaagcggctgcatgtctccaatatccccttcaggttccgggatccggacctcagacaaatgtttggtcaatttggtaaaatcttagatgttgaaattatttttaatgagcgaggctcaaagggatttggtttcgtaactttcgaaaatagtgccgatgcggacagggcgagggagaaattacacggcaccgtggtagagggccgtaaaatcgaggtaaataatgccacagcacgtgtaatgacaaataaaaagaccgtcaacccttatacaaatggctggaaattgaatccagttgtgggtgcagtctacagtcccgaattctatgcaggcacggtcctgttgtgccaggccaaccaggagggatcttccatgtacagtgcccccagttcacttgtatatacttctgcaatgccaggcttcccgtatccagcagccaccgcc

SEQ ID NO: 177935 - DNA, 420 bp, Homo sapiens
  Payload ID: 14908
  Gene Symbol: RBFOX1
  Gene Name: RNA binding protein, fox-1 homolog (C. elegans) 1
  ENST ID: ENST00000567470
  CDS Start-End: 1-224
cgcacctgcgaggccgcggtcgcaccgtgtacaacaccttcagggccgcggcgcccccgcccccgatcccggcctacggcggggtggttatgctgcataccgctacgcccagcctacccctgccactgccgctgcctacagtgacagttacggacgagtttatgctgccgacccctaccaccacgcacttgctccagcccccacctacggcgttggtgccatgaatgcttttgcacctttgactgatgccaagactaggagccatgctgatgatgtgggtctcgttctttcttcattgcaggctagtatataccgagggggatacaaccgttttgctccatactaaatgacaaaaccataaaaaccttccaatgtggggagaaaggaagctttccgaggcctgagtattgcaatacatgc

SEQ ID NO: 177936 - DNA, 725 bp, Homo sapiens
  Payload ID: 14908
  Gene Symbol: RBFOX1
  Gene Name: RNA binding protein, fox-1 homolog (C. elegans) 1
  ENST ID: ENST00000570626
  CDS Start-End: 159-725
agatgttgagggggaggtcagccaggcggcctcagccccccaccttcctcaacaccccgatcatccacacattgcacagcgcgcacaccctcgctcgtaattgaggcgtgcttggggcagatgctttgtggtgtgggacaagaacagctgctaagtttatggaggagaaaggaagcaggatggtgcagcagggtaatcaggaagcagccgctgcccctgacacaatggctcagccttacgcttcggcccagtttgctcccccgcagaacggtatccccgcggaatacacggcccctcatccccaccccgcgccagagtacacaggccagaccacggttcccgagcacacattaaacctgtaccctcccgcccagacgcactccgagcagagcccggcggacacgagcgctcagaccgtctctggcaccgccacacagacagatgacgcagcaccgacggatggccagccccagacacaaccttctgaaaacacggaaaacaagtctcagcccaagcggctgcatgtctccaatatccccttcaggttccgggatccggacctcagacaaatgtttggtcaatttggtaaaatcttagatgttgaaattatttttaatgagcgaggctcaaagggatttggtttcgtaactttcgaaaatagtgccgatgcggacagggcgagggagaaattacacggcaccgtggtagagggccgtaaaatcgag

SEQ ID NO: 177937 - DNA, 4018 bp, Homo sapiens
  Payload ID: 14908
  Gene Symbol: RBFOX1
  Gene Name: RNA binding protein, fox-1 homolog (C. elegans) 1
  ENST ID: ENST00000620507
  CDS Start-End: 298-1425
accttccattttggtagcttcaactttgcagctgctgtgtctcttcgtcgtctgggaagaaaactttcacattaagagttgctgatgcggattttctttctttcctctcccggcgttgatgagtgcttggctcctgacagaagggatttggctcccagctttgtagttcggaagaagttgggtctatagatttccccctaactctccattgatgtgttgagcttcagagggaataataactctacgtaaagcatgctggcgtctcaaggagttctcctgcatccttatggcgtgcctatgattgtaccggcagctccttaccttcctggactgattcagggtaatcaggaagcagccgctgcccctgacacaatggctcagccttacgcttcggcccagtttgctcccccgcagaacggtatccccgcggaatacacggcccctcatccccaccccgcgccagagtacacaggccagaccacggttcccgagcacacattaaacctgtaccctcccgcccagacgcactccgagcagagcccggcggacacgagcgctcagaccgtctctggcaccgccacacagacagatgacgcagcaccgacggatggccagccccagacacaaccttctgaaaacacggaaaacaagtctcagcccaagcggctgcatgtctccaatatccccttcaggttccgggatccggacctcagacaaatgtttggtcaatttggtaaaatcttagatgttgaaattatttttaatgagcgaggctcaaagggatttggtttcgtaactttcgaaaatagtgccgatgcggacagggcgagggagaaattacacggcaccgtggtagagggccgtaaaatcgaggtaaataatgccacagcacgtgtaatgacaaataaaaagaccgtcaacccttatacaaatggctggaaattgaatccagttgtgggtgcagtctacagtcccgaattctatgcagtgccaggcttcccgtatccagcagccaccgccgcggccgcctaccgaggggcgcacctgcgaggccgcggtcgcaccgtgtacaacaccttcagggccgcggcgcccccgcccccgatcccggcctacggcggtgttgtttaccaggatggattttatggtgcagacatttatggtggttatgctgcataccgctacgcccagcctacccctgccactgccgctgcctacagtgacagttacggacgagtttatgctgccgacccctaccaccacgcacttgctccagcccccacctacggcgttggtgccatgaatgcttttgcacctttgactgatgccaagactaggagccatgctgatgatgtgggtctcgttctttcttcattgcaggctagtatataccgagggggatacaaccgttttgctccatactaaatgacaaaaccataaaaaccttccaatgtggggagaaaggaagctttccgaggcctgagtattgcaatacatgcagtagtacatcattttagcaactctaaaaaaaaaaaaaatacaaataaaaaggaaaaaaaattacattttttatcttatacctcagatattttgttctgtgtattttaatattgtgggtctttaatttctgaaggttccgtagtttggttgctggctgtaggagtttttgtggttgatctagacagatgctagataatgaataaaaactggtttagggccatatccagagtgctatattatgtaaatgaattatatatgctgaatattaagctactggggttatcagctatttgggaagagtgtaagtgactacagtagtcatttttttctgcacctgcattattttattttgcgaaaggggaggttgggaggggcttaggggattggaactggggtttggctgaaagaaaaaaaaaaaaatgtaactgatgaatctaaacgacccactgcaccaacaatcatttatcaatggttctaagttactcattgccagttcaagccaaaggtcatgttgttaagggggtgcttctagtagcacttgtgcatctgagttgaatgaagctgtgcaaacccaccctttaaaccattccacccggcagtattcagcttcttaaccagtcgctatttaggaaaaaaaacccactagttaggccatcaacaagcattctttttatatttcttccagtataataaattattgatatcactgctgacttttatattatgggagggaaaaaataacattaataaaaaggtgataaaaaagcactgtttctatttttttctttttttccaaaaaaagaaagtaataaaaacttaaattctttgtaccagttaaaaaaaatgtataaaatttacatctgtgcagtggagttgttaagttctagaaacagtctatgaagctttagttttagcctagtagaacaactgttagagacagacgtataatttttatggaattacatgataatcatattcggatttatagaagcattttacaagtattgcaatcattgagtagagataatcatggtattttcatcagcttggtactttttgaaacgtgactgcgttgtgtgaacaatctgcaatttttcagtccgtgagatcctgcccttccacctctttcccatacccccaaggattatctcaaaatgatctctttagttctgtctccaaggcccaggacacttgtcagaaggatgcaaaaaaagaaaaaagtacatccaccctcttaatcccaaaagaacaaagtctccccacctttctcggatgcagggccagagtgacacagccgaaaaattgcagtttgtctgtacttctgtttgaactttccacgttgtcctgtttacaagttaacttaagttggggtatccgtcacgggtcttcctgttttgtatttaaataaaaacaacagcagcaggctgtccctgagtagttttgctgccataggttaagtcctcatgtgtacagtgcaggccctgtggcccgcacttcagtaagttatcaactctcaccgctgtgaacctgccaatccgctgtaacaactctgctttaaaacaaaaccaaacaaaactttaaaaaaaaatgtgtgatccagctttctcttgccatcctatgtgcatgccgtaagatcagttggatattaaaccatcaataaagtttcacaagatttgaaaacaaagtttctgtagcttcgatacctaagacagacgatagtgatcttgaaaagagaaaagggggaggggggagctacttatcagccaaaagcatataaagtgttcttttcaccagacttctttgggtgggtgaggggaggggcaagagggtgttttatagcatcactaagacattctcattcccccacctggaaaacagtgttatggcaatgggtgcctggttgatgttcttaaaggaaacgaattattaaaacactatgacatcctccagagggaagaaagagtaggagcagggggctatggagaataaatttctcccaattgccgcctcagatttcaaaatccagaatttgtattgtgtttcgaatcacaaacatagaattcttactgtgttggttaaagtaaaattcatttgcagttttgattttcatcaatgagctgtactttcccccatgactgtatgtagttttaataaaatcatttagagtgagtgagtgccaaccgatgttgcagaatcttttgtctaggcactccaagatgccaataagtcattttaaaatgtatgtcagagatgtaaacaaacattttggattttttttaaacagtatttatttggaatgttttcatttatctaaataactattgctattatgaattatggaaaattaatattatgtgtggcatatagtgacttcttaacacacacatcacgcaatctgcaaacccagaaaatgtgtatatctgtctttagaaattagtgtttatatcacttacagtggtttgtgaataaagaaaactggtttgtaatatcaaaaaaataaaagcttagtctgaaaagg

SEQ ID NO: 177938 - DNA, 1538 bp, Homo sapiens
  Payload ID: 14909
  Gene Symbol: RBFOX2
  Gene Name: RNA binding protein, fox-1 homolog (C. elegans) 2
  Uniprot ID: O43251
  ENST ID: ENST00000262829
  CDS Start-End: 190-1266
ctgccagagaggaagagaaaagaaaggaagaaacattagaaagaaaaaggaaggaaaacggtataaagagagatcaattacccacccttaaatagctagattggggggggaggggggtggaaaagaaagctgtggaggtgtgccccagcacggctgctttgaaaggtttatcatctatccgtttggtttatggagaaaaagaaaatggtaactcagggtaaccaggagccgacaacaactcctgacgcaatggttcagccttttactaccatcccatttccaccacctccgcagaatggaattcccacagagtatggggtgccacacactcaagactatgccggccagaccggtgagcataacctgacactctacggaagtacgcaagcccacggggagcagagcagcaactcacccagcacacaaaatggatctcttacgacagaaggtggagcacagacagacggccagcagtcacagacacaaagtagtgaaaattcagagagtaaatctaccccgaaacggctgcatgtctctaatattcctttccgcttccgggaccctgacctccggcagatgtttgggggattcgggttcgtaactttcgagaatagtgctgatgcagacagggccagggagaaattacacggcaccgtggtagagggccgtaaaatcgaggtgaataatgctacagcacgtgtaatgaccaataagaagatggtcacaccatatgcaaatggttggaaattaagcccagtagttggagctgtatatggtccggagttatatgcagcatccagctttcaagcagatgtgtccctaggcaatgatgcagcagtgcccctatcaggaagagggggtatcaacacttacattcctttaatcattcctggcttcccttaccctactgcagccaccacggcagccgctttcagaggagcccatttgaggggcagagggcggacagtatatggtgcagtccgagcggtacctccaacagccatccccgcctatccaggtgtggtttaccaggacggattttacggtgctgacctctatggtggatatgcagcctacagatatgcacagcctgctactgcaaccgcagccaccgctgctgcagccgctgcagccgcttacagtgacggttatggcagggtgtacacagccgacccctaccatgcccttgcccctgccgctagctatggagttggcgctgtggcgagtttataccgaggtggctacagccgatttgccccctactgaagtgacgtgagacccctgcaaatgggacagccccccagttcatgaggcctggctattgcaatatttactagtagaggaactctatagcaagatgaagaggaaaaacaaacaaacaaacaaaaaaaaacacaaaaaaagaaagaatacttttttatacctcactatgttctttgaatatgtatttttcctttaaatttctgcctttaattcttttgttccaaagattgtgcatttttttctttttttttttaaactgtggtaaaaaaaaaaaa

SEQ ID NO: 177939 - DNA, 1409 bp, Homo sapiens
  Payload ID: 14909
  Gene Symbol: RBFOX2
  Gene Name: RNA binding protein, fox-1 homolog (C. elegans) 2
  ENST ID: ENST00000359369
  CDS Start-End: 85-1197
aacgagcctctgactccaggttatcatggattcccagcgcgggacagccagggtaaccaggagccgacaacaactcctgacgcaatggttcagccttttactaccatcccatttccaccacctccgcagaatggaattcccacagagtatggggtgccacacactcaagactatgccggccagaccggtgagcataacctgacactctacggaagtacgcaagcccacggggagcagagcagcaactcacccagcacacaaaatggatctcttacgacagaaggtggagcacagacagacggccagcagtcacagacacaaagtagtgaaaattcagagagtaaatctaccccgaaacggctgcatgtctctaatattcctttccgcttccgggaccctgacctccggcagatgtttgggcagtttggcaaaatcctagatgtagaaataatctttaatgaacgtggctctaagggattcgggttcgtaactttcgagaatagtgctgatgcagacagggccagggagaaattacacggcaccgtggtagagggccgtaaaatcgaggtgaataatgctacagcacgtgtaatgaccaataagaagatggtcacaccatatgcaaatggttggaaattaagcccagtagttggagctgtatatggtccggagttatatgcagcatccagctttcaagcagatgtgtccctaggcaatgatgcagcagtgcccctatcaggaagagggggtatcaacacttacattcctttaatcattcctggcttcccttaccctactgcagccaccacggcagccgctttcagaggagcccatttgaggggcagagggcggacagtatatggtgcagtccgagcggtacctccaacagccatccccgcctatccaggtgtggtttaccaggacggattttacggtgctgacctctatatagaatctgcaaactgcttcagatcaaacagggtggatatgcagcctacagatatgcacagcctgctactgcaaccgcagccaccgctgctgcagccgctgcagccgcttacagtgacggttatggcagggtgtacacagccgacccctaccatgcccttgcccctgccgctagctatggagttggcgctgtggcgagtttataccgaggtggctacagccgatttgccccctactgaagtgacgtgagacccctgcaaatgggacagccccccagttcatgaggcctggctattgcaatatttactagtagaggaactctatagcaagatgaagaggaaaaacaaacaaacaaacaaaaaaaaacacaaaaaaagaaagaatacttttttatacctcactatgttctttgaatatgtatttttcctttaaatttctgcctttaattcttttgttccaaa

SEQ ID NO: 177940 - DNA, 1354 bp, Homo sapiens
  Payload ID: 14909
  Gene Symbol: RBFOX2
  Gene Name: RNA binding protein, fox-1 homolog (C. elegans) 2
  ENST ID: ENST00000397303
  CDS Start-End: 34-1107
ggtaaccaggagccgacaacaactcctgacgcaatggttcagccttttactaccatcccatttccaccacctccgcagaatggaattcccacagagtatggggtgccacacactcaagactatgccggccagaccggtgagcataacctgacactctacggaagtacgcaagcccacggggagcagagcagcaactcacccagcacacaaaatggatctcttacgcagacagaaggtggagcacagacagacggccagcagtcacagacacaaagtagtgaaaattcagagagtaaatctaccccgaaacggctgcatgtctctaatattcctttccgcttccgggaccctgacctccggcagatgtttgggcagtttggcaaaatcctagatgtagaaataatctttaatgaacgtggctctaagggattcgggttcgtaactttcgagaatagtgctgatgcagacagggccagggagaaattacacggcaccgtggtagagggccgtaaaatcgaggtgaataatgctacagcacgtgtaatgaccaataagaagatggtcacaccatatgcaaatggttggaaattaagcccagtagttggagctgtatatggtccggagttatatgcagcatccagctttcaagcagatgtgtccctaggcaatgatgcagcagtgcccctatcaggaagagggggtatcaacacttacattcctttaatcattcctggcttcccttaccctactgcagccaccacggcagccgctttcagaggagcccatttgaggggcagagggcggacagtatatggtgcagtccgagcggtacctccaacagccatccccgcctatccaggtgtggtttaccaggacggattttacggtgctgacctctatggtggatatgcagcctacagatatgcacagcctgctactgcaaccgcagccaccgctgctgcagccgctgcagccgcttacagtgacggttatggcagggtgtacacagccgacccctaccatgcccttgcccctgccgctagctatggagttggcgctgtggcgagtttataccgaggtggctacagccgatttgccccctactgaagtgacgtgagacccctgcaaatgggacagccccccagttcatgaggcctggctattgcaatatttactagtagaggaactctatagcaagatgaagaggaaaaacaaacaaacaaacaaaaaaaaacacaaaaaaagaaagaatacttttttatacctcactatgttctttgaatatgtatttttcctttaaatttctgcctttaattcttttgttccaaagattgtgcatttttttctttttttt

SEQ ID NO: 177941 - DNA, 759 bp, Homo sapiens
  Payload ID: 14909
  Gene Symbol: RBFOX2
  Gene Name: RNA binding protein, fox-1 homolog (C. elegans) 2
  ENST ID: ENST00000397305
  CDS Start-End: 376-759
gagagactgccagagaggaagagaaaagaaaggaagaaacattagaaagaaaaaggaaggaaaacggtataaagagagatcaattacccacccttaaatagctagattggggggggaggggggtggaaaagaaagctgtggaggtgtgccccagcacggctgctttgaaaggtttatcatctatccgtttggtttatggagaaaaagaaaatggtaactcagctggaaggctgaagtctttcacctgagctgctgccagttcgctcttctgttcctgggtggttgggagaagagaagagggagggtattttatgctttaattaaagacagataagagagcagggtaaccaggagccgacaacaactcctgacgcaatggttcagccttttactaccatcccatttccaccacctccgcagaatggaattcccacagagtatggggtgccacacactcaagactatgccggccagaccggtgagcataacctgacactctacggaagtacgcaagcccacggggagcagagcagcaactcacccagcacacaaaatggatctcttacgacagaaggtggagcacagacagacggccagcagtcacagacacaaagtagtgaaaattcagagagtaaatctaccccgaaacggctgcatgtctctaatattcctttccgcttccgggaccctgacctccggcagatgtttgggtttggcaaaatcctagatgtagaaataatctttaatgaacgtggctct

SEQ ID NO: 177942 - DNA, 6932 bp, Homo sapiens
  Payload ID: 14909
  Gene Symbol: RBFOX2
  Gene Name: RNA binding protein, fox-1 homolog (C. elegans) 2
  Uniprot ID: O43251
  ENST ID: ENST00000405409
  CDS Start-End: 370-1473
attctccagcaggcctgcttctggagttgggagatgtcagcctgctgggagggggtggggggaggaggaagaggtggggctctactctgattaattaccttaggcattcaggggtggggcttccttcagccatctgcctgagatatgggagggagctggagaaagaaggagggggagagactgccagagaggaagagaaaagaaaggaagaaacattagaaagaaaaaggaaggaaaacggtataaagagagatcaattacccacccttaaatagctagattggggggggaggggggtggaaaagaaagctgtggaggtgtgccccagcacggctgctttgaaaggtttatcatctatccgtttggtttatggagaaaaagaaaatggtaactcagggtaaccaggagccgacaacaactcctgacgcaatggttcagccttttactaccatcccatttccaccacctccgcagaatggaattcccacagagtatggggtgccacacactcaagactatgccggccagaccggtgagcataacctgacactctacggaagtacgcaagcccacggggagcagagcagcaactcacccagcacacaaaatggatctcttacgcagacagaaggtggagcacagacagacggccagcagtcacagacacaaagtagtgaaaattcagagagtaaatctaccccgaaacggctgcatgtctctaatattcctttccgcttccgggaccctgacctccggcagatgtttgggcagtttggcaaaatcctagatgtagaaataatctttaatgaacgtggctctaagggattcgggttcgtaactttcgagaatagtgctgatgcagacagggccagggagaaattacacggcaccgtggtagagggccgtaaaatcgaggtgaataatgctacagcacgtgtaatgaccaataagaagatggtcacaccatatgcaaatggttggaaattaagcccagtagttggagctgtatatggtccggagttatatgcagcatccagctttcaagcagatgtgtccctaggcaatgatgcagcagtgcccctatcaggaagagggggtatcaacacttacattcctttaatcattcctggcttcccttaccctactgcagccaccacggcagccgctttcagaggagcccatttgaggggcagagggcggacagtatatggtgcagtccgagcggtacctccaacagccatccccgcctatccaggggtggatatgcagcctacagatatgcacagcctgctactgcaaccgcagccaccgctgctgcagccgctgcagccgcttacagtgacggttatggcagggtgtacacagccgacccctaccatgcccttgcccctgccgctagctatggagttggcgctgtggcgagtttataccgaggtggctacagccgatttgccccctactgaagtgacgtgagacccctgcaaatgggacagccccccagttcatgaggcctggctattgcaatatttactagtagaggaactctatagcaagatgaagaggaaaaacaaacaaacaaacaaaaaaaaacacaaaaaaagaaagaatacttttttatacctcactatgttctttgaatatgtatttttcctttaaatttctgcctttaattcttttgttccaaagattgtgcatttttttctttttttttttaaactgtggtaaaaaaaaaaaaaataatgcatttccatgtctgtatgtccgtgcttagcttattctatcaatcacggaagaggcagtcaaggaggaaggagagacattaggagccgataaatgcatctgatcagaaatcagcagacagaattaccaaagtgtatctggtgctgaatgactgggggacaagcagaagtggaagagatctttctgcaacaggatattcttctagtcttctgagtttctggtctttgacaggcaattctggttggctgtggctggaatccacatgctgatagataggaatttgtgcttacaaagcaggagaattaaaaagacgctttcctctcctcttccctcctgtcttctccgttctttttacaatcatcttacacgcacagcctgagacagctggcatagtttttggaattatagtattgatatttccaaacgtgctctcagacagtggataataaacacctcattaggaaaccgatctcagaatgaactctggagtatgaaaaagatcatttctttttgttcctgtaacctagcattccttctaggcttcttctcctttaattgaaccacagcttagctcatgtattcttttattaacaccctgctctcatgtccataagattcaggaatttaggacccagggacagaaaagtgaataagccagtgaccagatttcccccagatgtcttgaggattagaagtacaaattgttgacagccattaaagagggtgaggaagggaaaaggaatattagaagatctggtatttcttacttttttcttgcctcagaaagtacaaagtttaaaaaatagaataaagaatctgctggggaaagatagagtaccaggtcctaggtcagtagtccctggaagttttggtgatgaggacatggaagggcaggcagaggcactttgtacttgctccaaagccataggaattttcatcttccagagcctttatgagtcacttctctatccacagtcttgagcctgtggctatcccgctgagcttctcactgtcctccaaaaacaccccgctgagcacccggaccactttgtacacattaacactacaggacataaaatgcagaggccctgagattgctgccctcccatattggaaggagggtctgcgatggcaagggtcttctatatcaccagaaagagtcgcgcagtgagtcactgccgttgccatctggctgtaattttctatgttatcaaggtaggagggagtgtttctcttctagctgttagatagaactgataaaagcaagtgtcctacagcatttcccaaatgaaggcattaggaaatagaaaagcacggtctttttggctccctggtctagtcacattggtactagggtgacctttcacccaagggacagctgctaaagggagtaattcagagacatggagcttctggttatgggtttgttttgggtttgtttttaactcctgcctccacacatgttcttgactgataactgactcatgtccctgaattaaaatgactgacctatgacagcatcaagcattctttgtaagcagagtgatatatctgagagggcgttgacctgttgtgtagaatacatatcctttcccccttcagaatcctgtctcgcctcgtaactgggagagaggctgtgcctgaaactaggggcgatgtcaaggaagctagaggcctcgatgcaattattactgactctggggaggaagacagagaataaggggacaccaactgcccagtccactggccatttttaagggtccccccaccccaagccaaagtttggtttgttgctgttaagacaatttttgttgtatgtatataaatattttagttagaggagcggggaatgggatgcgggctttcacagttctagggaatgggggcagggaggattttgcttttgcttttgctttgagggagaactttagctgactaaaaaaacagaagtttggggtcatgatcacaaaggggccattcccaaaagatggcaagccacgtattcagtggagactaggccaaattctaaatggttttatccatagcaggggagaataggagaatgagtttaagagtttttctcttcttttttcctagaaagaggtaaggataatgggaaaggtagagaaggcggctcccacagaccttttaagagaggcagaatcttgagcttgaggcaccttgagtgcatctcagttcagctggttctggctgaggcctccaaaggcaagctctgtgctttccagtggtttctgctgcatttccagggatggtgtttaacaccgcttcctccagctcccttttctaagaaagaataaatggagttctgctttttatgaaagggtctttggttttcagtgtcaacactgagaattggggctcttgcaagcatctggatttcacagtatcaacctccccgtcaccttttgaactttgagactccgtacggtcaacttcaccagaggcaggttgctcgaagcagcactgcttgtctgttcctgactctggttctcactgtattaaaaaagagagtcagaggagtctggcatttcgtgagtttgttagaggatgctggctgataattccagaaaacttactgatgctaaatcacagtacatgcatgattctttttcagctttactatagttcatgacctggactttctgtactcttggaagctgggctccttaaaggaggcctctagtgaacacctttatctccatgtccctcttagagcccagagagctgcccataggcattttccagaattcctcatgtcacctagttcaatttccattaactcagatcagccattgtgattcaccatttgtcaggctctcaggtttaacaaaacctactatcaccatcatccttcaacagccacagtctgaattgagccaacatttttttttctttgagaaagaagtggactggggcacaacttttagtctgaggggagctagtggaaatctagacaatagaagtcatcgatagcagcttttcctcaaatgtgtgactcctcaggggctaaactgctcttagcttagaattatgctttactagagatctagcagataagtgggttaatcactaccatcctgtaactagttatatagcttccagacatgagggagacatcaaacagggatggaagcaaccccaaggatatgcaagaagggcatgatgaacccccttccctctggcaggagaacaaggccaaccaagggacagactggaaagcacttagatgtttaaggaggagaaaggggaagctttgaccagtccttgccttttgccaagttcagccagttctccgctgcttgcaacctctagcgcagtaacatttgcagaattgcagattttcccccagatactaggaggaaagggactttggggggtggggaaggggtcgtggtgttttaaaagcataagttacctgtttgcactgttttaagataggaaaaaaaaatagtgggcaaggtgaacatcagacgtaaatttgtgtgtttttattttgtcatgctcttgaaaatgtttgaccatttgtagtatacacagtgaaacttgattctctgttgcataaaacactatatttttttggaaatgttactgtccaaaagcctcttccctccctttccttttcctatgtacttccttcatacttgctttactgatcagccaggcaatagccatccaagagctagagcatgaaacagggccctttccaagtaggctctgggtgtcctaagccagcgtgtgccctctggtttagtgagtgtaatagagtccctggcacctttctttgcaaatgaggctaacagaccagactgcagcaagttatcagattcctcaatcagatgcactaggagtgaggagcccagggatggagggggttcctgaagtattgcagttggctgtagtagctgagttcttttccatgttaccgaaactgtagccagttacagtttactcaggaaaacggtagatcaattcagccatggtagtgctggttggcagggattggtaacggagagaactgctcatcagccaaaactcaagccttgccttttaggaggccaccagcagagggacttggtcctccttgtctggtacttgtgtacatgccggtgacctgaggactccactcacactggcgagcaaaaagggagcagtgattctcttttctctccccaccccctgccctttgttaccaacaccagtttcccagggggtacatgagtttctgaatttttaaaaaatgtttttggtttggtttttctggggactgataagtgctttaagcaatgtccataccccgtcaagactcccagcttagtcattttcttgtatttttctgttcacagtatttgtgtgtgtgcttgttttggcagctcattttggctgtattatatattgagtgatgaattgatcctcttttttccctaagggatatgaattgtttttcttgtgttatattctgcttgtgaatagctggagcaaacctggggctgacacgcgtaagctagggctgcaaagcgagaagagagccggtggagtgtacttgtccctgacaggctgacctacctgagtctctgagcttttcagtccaaatctttgcaaggctcaaaatgccacagaacctctcctcttctccccactccccatggcagggaccggaccatccctacatgcaacatgctgttcctccagcccctcccattgccatggcaaaacaggtacctttggggcatgggggcattacatgggatgcttgtgtaatcgaccacctagccttctctctcccctcccgtcctcccccagaatcacttcctaggacacccgagctgcttgcccagggtcctgtttccctgctaactccagagaagcatcccagggctttgtgacagtctctaattcccttcccttctcgttaagaatcatattgtatagtagctttcagaccatacagtattcattgggttactcctattattatcaagtagctggaattgtgaaggtcggagtagttagatctttagcttttattccttatttttttgtattactctccatgtgtataaattattgatcatgttgctggcttttataaactctaagcgaaggaggagcactgcctcagcctttgcacatggtaatgaagcactgtttttaaataaaagagagaaacacca

SEQ ID NO: 177943 - DNA, 663 bp, Homo sapiens
  Payload ID: 14909
  Gene Symbol: RBFOX2
  Gene Name: RNA binding protein, fox-1 homolog (C. elegans) 2
  ENST ID: ENST00000408983
  CDS Start-End: 63-663
atggtagctgtgtgcaaggggagagcagcagggtttagaattccaggaaggaagagagagtgatgtcatcagattccatggaccagcccaggaacccctgtgagaacgagcctctgactccaggttatcatggattcccagcgcgggacagccagggtaaccaggagccgacaacaactcctgacgcaatggttcagccttttactaccatcccatttccaccacctccgcagaatggaattcccacagagtatggggtgccacacactcaagactatgccggccagaccggtgagcataacctgacactctacggaagtacgcaagcccacggggagcagagcagcaactcacccagcacacaaaatggatctcttacgcagacagaaggtggagcacagacagacggccagcagtcacagacacaaagtagtgaaaattcagagagtaaatctaccccgaaacggctgcatgtctctaatattcctttccgcttccgggaccctgacctccggcagatgtttgggcagtttggcaaaatcctagatgtagaaataatctttaatgaacgtggctctaagggattcgggttcgtaactttcgagaatagtgctgatgcagacagggccagggagaaattacacggcaccgtggtagagggcc

SEQ ID NO: 177944 - DNA, 1935 bp, Homo sapiens
  Payload ID: 14909
  Gene Symbol: RBFOX2
  Gene Name: RNA binding protein, fox-1 homolog (C. elegans) 2
  Uniprot ID: O43251
  ENST ID: ENST00000449924
  CDS Start-End: 190-1332
ctgccagagaggaagagaaaagaaaggaagaaacattagaaagaaaaaggaaggaaaacggtataaagagagatcaattacccacccttaaatagctagattggggggggaggggggtggaaaagaaagctgtggaggtgtgccccagcacggctgctttgaaaggtttatcatctatccgtttggtttatggagaaaaagaaaatggtaactcagggtaaccaggagccgacaacaactcctgacgcaatggttcagccttttactaccatcccatttccaccacctccgcagaatggaattcccacagagtatggggtgccacacactcaagactatgccggccagaccggtgagcataacctgacactctacggaagtacgcaagcccacggggagcagagcagcaactcacccagcacacaaaatggatctcttacgacagaaggtggagcacagacagacggccagcagtcacagacacaaagtagtgaaaattcagagagtaaatctaccccgaaacggctgcatgtctctaatattcctttccgcttccgggaccctgacctccggcagatgtttgggcagtttggcaaaatcctagatgtagaaataatctttaatgaacgtggctctaagggattcgggttcgtaactttcgagaatagtgctgatgcagacagggccagggagaaattacacggcaccgtggtagagggccgtaaaatcgaggtgaataatgctacagcacgtgtaatgaccaataagaagatggtcacaccatatgcaaatggttggaaattaagcccagtagttggagctgtatatggtccggagttatatgcagcatccagctttcaagcagatgtgtccctaggcaatgatgcagcagtgcccctatcaggaagagggggtatcaacacttacattcctttaatcagtctccctttagttcctggcttcccttaccctactgcagccaccacggcagccgctttcagaggagcccatttgaggggcagagggcggacagtatatggtgcagtccgagcggtacctccaacagccatccccgcctatccaggtgtggtttaccaggacggattttacggtgctgacctctatggtggatatgcagcctacagatatgcacagcctgctactgcaaccgcagccaccgctgctgcagccgctgcagccgcttacagtgacggttatggcagggtgtacacagccgacccctaccatgcccttgcccctgccgctagctatggagttggcgctgtggcgagtttataccgaggtggctacagccgatttgccccctactgaagtgacgtgagacccctgcaaatgggacagccccccagttcatgaggcctggctattgcaatatttactagtagaggaactctatagcaagatgaagaggaaaaacaaacaaacaaacaaaaaaaaacacaaaaaaagaaagaatacttttttatacctcactatgttctttgaatatgtatttttcctttaaatttctgcctttaattcttttgttccaaagattgtgcatttttttctttttttttttaaactgtggtaaaaaaaaaaaaaataatgcatttccatgtctgtatgtccgtgcttagcttattctatcaatcacggaagaggcagtcaaggaggaaggagagacattaggagccgataaatgcatctgatcagaaatcagcagacagaattaccaaagtgtatctggtgctgaatgactgggggacaagcagaagtggaagagatctttctgcaacaggatattcttctagtcttctgagtttctggtctttgacaggcaattctggttggctgtggctggaatccacatgctgatagataggaatttgtgcttacaaagcaggagaattaaaaagacgctttcctctcctc

SEQ ID NO: 177945 - DNA, 1254 bp, Homo sapiens
  Payload ID: 14909
  Gene Symbol: RBFOX2
  Gene Name: RNA binding protein, fox-1 homolog (C. elegans) 2
  Uniprot ID: O43251
  ENST ID: ENST00000416721
  CDS Start-End: 67-1197
agaaagctgtggaggtgtgccccagcacggctgctttgaaaggtttatcatctatccgtttggtttatggagaaaaagaaaatggtaactcagggtaaccaggagccgacaacaactcctgacgcaatggttcagccttttactaccatcccatttccaccacctccgcagaatggaattcccacagagtatggggtgccacacactcaagactatgccggccagaccggtgagcataacctgacactctacggaagtacgcaagcccacggggagcagagcagcaactcacccagcacacaaaatggatctcttacgacagaaggtggagcacagacagacggccagcagtcacagacacaaagtagtgaaaattcagagagtaaatctaccccgaaacggctgcatgtctctaatattcctttccgcttccgggaccctgacctccggcagatgtttgggcagtttggcaaaatcctagatgtagaaataatctttaatgaacgtggctctaagggattcgggttcgtaactttcgagaatagtgctgatgcagacagggccagggagaaattacacggcaccgtggtagagggccgtaaaatcgaggtgaataatgctacagcacgtgtaatgaccaataagaagatggtcacaccatatgcaaatggttggaaattaagcccagtagttggagctgtatatggtccggagttatatgcagcatccagctttcaagcagatgtgtccctaggcaatgatgcagcagtgcccctatcaggaagagggggtatcaacacttacattcctttaatcattcctggcttcccttaccctactgcagccaccacggcagccgctttcagaggagcccatttgaggggcagagggcggacagtatatggtgcagtccgagcggtacctccaacagccatccccgcctatccaggtgtggtttaccaggacggattttacggtgctgacctctatggtggatatgcagcctacagatatgcacagcctgctactgcaaccgcagccaccgctgctgcagccgctgcagccgcttacagtgacggttatggcagggtgtacacagccgacccctaccatgcccttgcccctgccgctagctatggagttggcgctgtggcgagtttataccgaggtggctacagccgatttgccccctactgaagtgacgtgagacccctgcaaatgggacagccccccagttcatgaggcctggctatt

SEQ ID NO: 177946 - DNA, 1706 bp, Homo sapiens
  Payload ID: 14909
  Gene Symbol: RBFOX2
  Gene Name: RNA binding protein, fox-1 homolog (C. elegans) 2
  Uniprot ID: O43251
  ENST ID: ENST00000414461
  CDS Start-End: 1-1113
atggagaaaaagaaaatggtaactcagggtaaccaggagccgacaacaactcctgacgcaatggttcagccttttactaccatcccatttccaccacctccgcagaatggaattcccacagagtatggggtgccacacactcaagactatgccggccagaccggtgagcataacctgacactctacggaagtacgcaagcccacggggagcagagcagcaactcacccagcacacaaaatggatctcttacgacagaaggtggagcacagacagacggccagcagtcacagacacaaagtagtgaaaattcagagagtaaatctaccccgaaacggctgcatgtctctaatattcctttccgcttccgggaccctgacctccggcagatgtttgggcagtttggcaaaatcctagatgtagaaataatctttaatgaacgtggctctaagggattcgggttcgtaactttcgagaatagtgctgatgcagacagggccagggagaaattacacggcaccgtggtagagggccgtaaaatcgaggtgaataatgctacagcacgtgtaatgaccaataagaagatggtcacaccatatgcaaatggttggaaattaagcccagtagttggagctgtatatggtccggagttatatgcagcatccagctttcaagcagatgtgtccctaggcaatgatgcagcagtgcccctatcaggaagagggggtatcaacacttacattcctttaatcagtctccctttagttcctggcttcccttaccctactgcagccaccacggcagccgctttcagaggagcccatttgaggggcagagggcggacagtatatggtgcagtccgagcggtacctccaacagccatccccgcctatccaggggtggatatgcagcctacagatatgcacagcctgctactgcaaccgcagccaccgctgctgcagccgctgcagccgcttacagtgacggttatggcagggtgtacacagccgacccctaccatgcccttgcccctgccgctagctatggagttggcgctgtggcgagtttataccgaggtggctacagccgatttgccccctactgaagtgacgtgagacccctgcaaatgggacagccccccagttcatgaggcctggctattgcaatatttactagtagaggaactctatagcaagatgaagaggaaaaacaaacaaacaaacaaaaaaaaacacaaaaaaagaaagaatacttttttatacctcactatgttctttgaatatgtatttttcctttaaatttctgcctttaattcttttgttccaaagattgtgcatttttttctttttttttttaaactgtggtaaaaaaaaaaaaaataatgcatttccatgtctgtatgtccgtgcttagcttattctatcaatcacggaagaggcagtcaaggaggaaggagagacattaggagccgataaatgcatctgatcagaaatcagcagacagaattaccaaagtgtatctggtgctgaatgactgggggacaagcagaagtggaagagatctttctgcaacaggatattcttctagtcttctgagtttctggtctttgacaggcaattctggttggctgtggctggaatccacatgctgatagataggaatttgtgcttacaaagcaggagaattaaaaagacgctttcctctcctc

SEQ ID NO: 177947 - DNA, 1356 bp, Homo sapiens
  Payload ID: 14909
  Gene Symbol: RBFOX2
  Gene Name: RNA binding protein, fox-1 homolog (C. elegans) 2
  Uniprot ID: O43251
  ENST ID: ENST00000438146
  CDS Start-End: 1-1356
atggcggagggcgcccagccgcatcagccgcctcagctcgggcccggcgccgccgcccggggcatgaagcgggagtcggagctggagctgccggtgcccggagcgggaggagacggagccgatcccggcctgagcaagcggccgcgcactgaggaggcggcggccgacggtggcggcgggatgcagaacgagcctctgactccaggttatcatggattcccagcgcgggacagccagggtaaccaggagccgacaacaactcctgacgcaatggttcagccttttactaccatcccatttccaccacctccgcagaatggaattcccacagagtatggggtgccacacactcaagactatgccggccagaccggtgagcataacctgacactctacggaagtacgcaagcccacggggagcagagcagcaactcacccagcacacaaaatggatctcttacgcagacagaaggtggagcacagacagacggccagcagtcacagacacaaagtagtgaaaattcagagagtaaatctaccccgaaacggctgcatgtctctaatattcctttccgcttccgggaccctgacctccggcagatgtttgggcagtttggcaaaatcctagatgtagaaataatctttaatgaacgtggctctaagggattcgggttcgtaactttcgagaatagtgctgatgcagacagggccagggagaaattacacggcaccgtggtagagggccgtaaaatcgaggtgaataatgctacagcacgtgtaatgaccaataagaagatggtcacaccatatgcaaatggttggaaattaagcccagtagttggagctgtatatggtccggagttatatgcagcatccagctttcaagcagatgtgtccctaggcaatgatgcagcagtgcccctatcaggaagagggggtatcaacacttacattcctttaatcagtctccctttagttcctggcttcccttaccctactgcagccaccacggcagccgctttcagaggagcccatttgaggggcagagggcggacagtatatggtgcagtccgagcggtacctccaacagccatccccgcctatccaggtgtggtttaccaggacggattttacggtgctgacctctatggtggatatgcagcctacagatatgcacagcctgctactgcaaccgcagccaccgctgctgcagccgctgcagccgcttacagtgacggttatggcagggtgtacacagccgacccctaccatgcccttgcccctgccgctagctatggagttggcgctgtggcgagtttataccgaggtggctacagccgatttgccccctactga

SEQ ID NO: 177948 - DNA, 733 bp, Homo sapiens
  Payload ID: 14909
  Gene Symbol: RBFOX2
  Gene Name: RNA binding protein, fox-1 homolog (C. elegans) 2
  ENST ID: ENST00000495377
  CDS Start-End: 1-692
gctctaagggattcgggttcgtaactttcgagaatagtgctgatgcagacagggccagggagaaattacacggcaccgtggtagagggccgtaaaatcgaggtgaataatgctacagcacgtgtaatgaccaataagaagatggtcacaccatatgcaaatggttggaaattaagcccagtagttggagctgtatatggtccggagttatatgcagcatccagctttcaagcagatgtgtccctaggcaatgatgcagcagtgcccctatcaggaagagggggtatcaacacttacattcctttaatcattcctggcttcccttaccctactgcagccaccacggcagccgctttcagaggagcccatttgaggggcagagggcggacagtatatggtgcagtccgagcggtacctccaacagccatccccgcctatccaggaatagtcttacaggaaccaatcattagcgctaaaatacctcagggtggatatgcagcctacagatatgcacagcctgctactgcaaccgcagccaccgctgctgcagccgctgcagccgcttacagtgacggttatggcagggtgtacacagccgacccctaccatgcccttgcccctgccgctagctatggagttggcgctgtggcgagtttataccgaggtggctacagccgatttgccccctactgaagtgacgtgagacccctgcaaatgggacagccccccagttc

SEQ ID NO: 177949 - DNA, 789 bp, Homo sapiens
  Payload ID: 14909
  Gene Symbol: RBFOX2
  Gene Name: RNA binding protein, fox-1 homolog (C. elegans) 2
  ENST ID: ENST00000473487
  CDS Start-End: 88-789
ctactattgcattcatgaagaaggagggagatgaaaaattaggcattctaactgggtaaccaggagccgacaacaactcctgacgcaatggttcagccttttactaccatcccatttccaccacctccgcagaatggaattcccacagagtatggggtgccacacactcaagactatgccggccagaccggtgagcataacctgacactctacggaagtacgcaagcccacggggagcagagcagcaactcacccagcacacaaaatggatctcttacgacagaaggtggagcacagacagacggccagcagtcacagacacaaagtagtgaaaattcagagagtaaatctaccccgaaacggctgcatgtctctaatattcctttccgcttccgggaccctgacctccggcagatgtttgggcagtttggcaaaatcctagatgtagaaataatctttaatgaacgtggctctaagggattcgggttcgtaactttcgagaatagtgctgatgcagacagggccagggagaaattacacggcaccgtggtagagggccgtaaaatcgaggtgaataatgctacagcacgtgtaatgaccaataagaagatggtcacaccatatgcaaatggttggaaattaagcccagtagttggagctgtatatggtccggagttatatgcagcatccagctttcaagcagatgtgtccctaggcaatgatgcagcagtgcccctatcaggaagagggggtatcaacacttacattcctttaatcattcctggcttc

SEQ ID NO: 177950 - DNA, 1935 bp, Homo sapiens
  Payload ID: 14909
  Gene Symbol: RBFOX2
  Gene Name: RNA binding protein, fox-1 homolog (C. elegans) 2
  Uniprot ID: O43251
  ENST ID: ENST00000619768
  CDS Start-End: 190-1332
ctgccagagaggaagagaaaagaaaggaagaaacattagaaagaaaaaggaaggaaaacggtataaagagagatcaattacccacccttaaatagctagattggggggggaggggggtggaaaagaaagctgtggaggtgtgccccagcacggctgctttgaaaggtttatcatctatccgtttggtttatggagaaaaagaaaatggtaactcagggtaaccaggagccgacaacaactcctgacgcaatggttcagccttttactaccatcccatttccaccacctccgcagaatggaattcccacagagtatggggtgccacacactcaagactatgccggccagaccggtgagcataacctgacactctacggaagtacgcaagcccacggggagcagagcagcaactcacccagcacacaaaatggatctcttacgacagaaggtggagcacagacagacggccagcagtcacagacacaaagtagtgaaaattcagagagtaaatctaccccgaaacggctgcatgtctctaatattcctttccgcttccgggaccctgacctccggcagatgtttgggcagtttggcaaaatcctagatgtagaaataatctttaatgaacgtggctctaagggattcgggttcgtaactttcgagaatagtgctgatgcagacagggccagggagaaattacacggcaccgtggtagagggccgtaaaatcgaggtgaataatgctacagcacgtgtaatgaccaataagaagatggtcacaccatatgcaaatggttggaaattaagcccagtagttggagctgtatatggtccggagttatatgcagcatccagctttcaagcagatgtgtccctaggcaatgatgcagcagtgcccctatcaggaagagggggtatcaacacttacattcctttaatcagtctccctttagttcctggcttcccttaccctactgcagccaccacggcagccgctttcagaggagcccatttgaggggcagagggcggacagtatatggtgcagtccgagcggtacctccaacagccatccccgcctatccaggtgtggtttaccaggacggattttacggtgctgacctctatggtggatatgcagcctacagatatgcacagcctgctactgcaaccgcagccaccgctgctgcagccgctgcagccgcttacagtgacggttatggcagggtgtacacagccgacccctaccatgcccttgcccctgccgctagctatggagttggcgctgtggcgagtttataccgaggtggctacagccgatttgccccctactgaagtgacgtgagacccctgcaaatgggacagccccccagttcatgaggcctggctattgcaatatttactagtagaggaactctatagcaagatgaagaggaaaaacaaacaaacaaacaaaaaaaaacacaaaaaaagaaagaatacttttttatacctcactatgttctttgaatatgtatttttcctttaaatttctgcctttaattcttttgttccaaagattgtgcatttttttctttttttttttaaactgtggtaaaaaaaaaaataataatgcatttccatgtctgtatgtccgtgcttagcttattctatcaatcacggaagaggcagtcaaggaggaaggagagacattaggagccgataaatgcatctgatcagaaatcagcagacagaattaccaaagtgtatctggtgctgaatgactgggggacaagcagaagtggaagagatctttctgcaacaggatattcttctagtcttctgagtttctggtctttgacaggcaattctggttggctgtggctggaatccacatgctgatagataggaatttgtgcttacaaagcaggagaattaaaaagacgctttcctctcctc

SEQ ID NO: 177951 - DNA, 6932 bp, Homo sapiens
  Payload ID: 14909
  Gene Symbol: RBFOX2
  Gene Name: RNA binding protein, fox-1 homolog (C. elegans) 2
  Uniprot ID: O43251
  ENST ID: ENST00000618140
  CDS Start-End: 370-1473
attctccagcaggcctgcttctggagttgggagatgtcagcctgctgggagggggtggggggaggaggaagaggtggggctctactctgattaattaccttaggcattcaggggtggggcttccttcagccatctgcctgagatatgggagggagctggagaaagaaggagggggagagactgccagagaggaagagaaaagaaaggaagaaacattagaaagaaaaaggaaggaaaacggtataaagagagatcaattacccacccttaaatagctagattggggggggaggggggtggaaaagaaagctgtggaggtgtgccccagcacggctgctttgaaaggtttatcatctatccgtttggtttatggagaaaaagaaaatggtaactcagggtaaccaggagccgacaacaactcctgacgcaatggttcagccttttactaccatcccatttccaccacctccgcagaatggaattcccacagagtatggggtgccacacactcaagactatgccggccagaccggtgagcataacctgacactctacggaagtacgcaagcccacggggagcagagcagcaactcacccagcacacaaaatggatctcttacgcagacagaaggtggagcacagacagacggccagcagtcacagacacaaagtagtgaaaattcagagagtaaatctaccccgaaacggctgcatgtctctaatattcctttccgcttccgggaccctgacctccggcagatgtttgggcagtttggcaaaatcctagatgtagaaataatctttaatgaacgtggctctaagggattcgggttcgtaactttcgagaatagtgctgatgcagacagggccagggagaaattacacggcaccgtggtagagggccgtaaaatcgaggtgaataatgctacagcacgtgtaatgaccaataagaagatggtcacaccatatgcaaatggttggaaattaagcccagtagttggagctgtatatggtccggagttatatgcagcatccagctttcaagcagatgtgtccctaggcaatgatgcagcagtgcccctatcaggaagagggggtatcaacacttacattcctttaatcattcctggcttcccttaccctactgcagccaccacggcagccgctttcagaggagcccatttgaggggcagagggcggacagtatatggtgcagtccgagcggtacctccaacagccatccccgcctatccaggggtggatatgcagcctacagatatgcacagcctgctactgcaaccgcagccaccgctgctgcagccgctgcagccgcttacagtgacggttatggcagggtgtacacagccgacccctaccatgcccttgcccctgccgctagctatggagttggcgctgtggcgagtttataccgaggtggctacagccgatttgccccctactgaagtgacgtgagacccctgcaaatgggacagccccccagttcatgaggcctggctattgcaatatttactagtagaggaactctatagcaagatgaagaggaaaaacaaacaaacaaacaaaaaaaaacacaaaaaaagaaagaatacttttttatacctcactatgttctttgaatatgtatttttcctttaaatttctgcctttaattcttttgttccaaagattgtgcatttttttctttttttttttaaactgtggtaaaaaaaaaaataataatgcatttccatgtctgtatgtccgtgcttagcttattctatcaatcacggaagaggcagtcaaggaggaaggagagacattaggagccgataaatgcatctgatcagaaatcagcagacagaattaccaaagtgtatctggtgctgaatgactgggggacaagcagaagtggaagagatctttctgcaacaggatattcttctagtcttctgagtttctggtctttgacaggcaattctggttggctgtggctggaatccacatgctgatagataggaatttgtgcttacaaagcaggagaattaaaaagacgctttcctctcctcttccctcctgtcttctccgttctttttacaatcatcttacacgcacagcctgagacagctggcatagtttttggaattatagtattgatatttccaaacgtgctctcagacagtggataataaacacctcattaggaaaccgatctcagaatgaactctggagtatgaaaaagatcatttctttttgttcctgtaacctagcattccttctaggcttcttctcctttaattgaaccacagcttagctcatgtattcttttattaacaccctgctctcatgtccataagattcaggaatttaggacccagggacagaaaagtgaataagccagtgaccagatttcccccagatgtcttgaggattagaagtacaaattgttgacagccattaaagagggtgaggaagggaaaaggaatattagaagatctggtatttcttacttttttcttgcctcagaaagtacaaagtttaaaaaatagaataaagaatctgctggggaaagatagagtaccaggtcctaggtcagtagtccctggaagttttggtgatgaggacatggaagggcaggcagaggcactttgtacttgctccaaagccataggaattttcatcttccagagcctttatgagtcacttctctatccacagtcttgagcctgtggctatcccgctgagcttctcactgtcctccaaaaacaccccgctgagcacccggaccactttgtacacattaacactacaggacataaaatgcagaggccctgagattgctgccctcccatattggaaggagggtctgcgatggcaagggtcttctatatcaccagaaagagtcgcgcagtgagtcactgccgttgccatctggctgtaattttctatgttatcaaggtaggagggagtgtttctcttctagctgttagatagaactgataaaagcaagtgtcctacagcatttcccaaatgaaggcattaggaaatagaaaagcacggtctttttggctccctggtctagtcacattggtactagggtgacctttcacccaagggacagctgctaaagggagtaattcagagacatggagcttctggttatgggtttgttttgggtttgtttttaactcctgcctccacacatgttcttgactgataactgactcatgtccctgaattaaaatgactgacctatgacagcatcaagcattctttgtaagcagagtgatatatctgagagggcgttgacctgttgtgtagaatacatatcctttcccccttcagaatcctgtctcgcctcgtaactgggagagaggctgtgcctgaaactaggggcgatgtcaaggaagctagaggcctcgatgcaattattactgactctggggaggaagacagagaataaggggacaccaactgcccagtccactggccatttttaagggtccccccaccccaagccaaagtttggtttgttgctgttaagacaatttttgttgtatgtatataaatattttagttagaggagcggggaatgggatgcgggctttcacagttctagggaatgggggcagggaggattttgcttttgcttttgctttgagggagaactttagctgactaaaaaaacagaagtttggggtcatgatcacaaaggggccattcccaaaagatggcaagccacgtattcagtggagactaggccaaattctaaatggttttatccatagcaggggagaataggagaatgagtttaagagtttttctcttcttttttcctagaaagaggtaaggataatgggaaaggtagagaaggcggctcccacagaccttttaagagaggcagaatcttgagcttgaggcaccttgagtgcatctcagttcagctggttctggctgaggcctccaaaggcaagctctgtgctttccagtggtttctgctgcatttccagggatggtgtttaacaccgcttcctccagctcccttttctaagaaagaataaatggagttctgctttttatgaaagggtctttggttttcagtgtcaacactgagaattggggctcttgcaagcatctggatttcacagtatcaacctccccgtcaccttttgaactttgagactccgtacggtcaacttcaccagaggcaggttgctcgaagcagcactgcttgtctgttcctgactctggttctcactgtattaaaaaagagagtcagaggagtctggcatttcgtgagtttgttagaggatgctggctgataattccagaaaacttactgatgctaaatcacagtacatgcatgattctttttcagctttactatagttcatgacctggactttctgtactcttggaagctgggctccttaaaggaggcctctagtgaacacctttatctccatgtccctcttagagcccagagagctgcccataggcattttccagaattcctcatgtcacctagttcaatttccattaactcagatcagccattgtgattcaccatttgtcaggctctcaggtttaacaaaacctactatcaccatcatccttcaacagccacagtctgaattgagccaacatttttttttctttgagaaagaagtggactggggcacaacttttagtctgaggggagctagtggaaatctagacaatagaagtcatcgatagcagcttttcctcaaatgtgtgactcctcaggggctgaactgctcttagcttagaattatgctttactagagatctagcagataagtgggttaatcactaccatcctgtaactagttatatagcttccagacatgagggagacatcaaacagggatggaagcaaccccaaggatatgcaagaagggcatgatgaacccccttccctctggcaggagaacaaggccaaccaagggacagactggaaagcacttagatgtttaaggaggagaaaggggaagctttgaccagtccttgccttttgccaagttcagccagttctccgctgcttgcaacctctagcgcagtaacatttgcagaattgcagattttcccccagatactaggaggaaagggactttggggggtggggaaggggtcgtggtgttttaaaagcataagttacctgtttgcactgttttaagataggaaaaaaaaatagtgggcaaggtgaacatcagacgtaaatttgtgtgtttttattttgtcatgctcttgaaaatgtttgaccatttgtagtatacacagtgaaacttgattctctgttgcataaaacactatatttttttggaaatgttactgtccaaaagcctcttccctccctttccttttcctatgtacttccttcatacttgctttactgatcagccaggcaatagccatccaagagctagagcatgaaacagggccctttccaagtaggctctgggtgtcctaagccagcgtgtgccctctggtttagtgagtgtaatagagtccctggcacctttctttgcaaatgaggctaacagaccagactgcagcaagttatcagattcctcaatcagatgcactaggagtgaggagcccagggatggagggggttcctgaagtattgcagttggctgtagtagctgagttcttttccatgttaccgaaactgtagccagttacagtttactcaggaaaacggtagatcaattcagccatggtagtgctggttggcagggattggtaacggagagaactgctcatcagccaaaactcaagccttgccttttaggaggccaccagcagagggacttggtcctccttgtctggtacttgtgtacatgccggtgacctgaggactccactcacactggcgagcaaaaagggagcagtgattctcttttctctccccaccccctgccctttgttaccaacaccagtttcccagggggtacatgagtttctgaatttttaaaaaatgtttttggtttggtttttctggggactgataagtgctttaagcaatgtccataccccgtcaagactcccagcttagtcattttcttgtatttttctgttcacagtatttgtgtgtgtgcttgttttggcagctcattttggctgtattatatattgagtgatgaattgatcctcttttttccctaagggatatgaattgtttttcttgtgttatattctgcttgtgaatagctggagcaaacctggggctgacacgcgtaagctagggctgcaaagcgagaagagagccggtggagtgtacttgtccctgacaggctgacctacctgagtctctgagcttttcagtccaaatctttgcaaggctcaaaatgccacagaacctctcctcttctccccactccccatggcagggaccggaccatccctacatgcaacatgctgttcctccagcccctcccattgccatggcaaaacaggtacctttggggcatgggggcattacatgggatgcttgtgtaatcgaccacctagccttctctctcccctcccgtcctcccccagaatcacttcctaggacacccgagctgcttgcccagggtcctgtttccctgctaactccagagaagcatcccagggctttgtgacagtctctaattcccttcccttctcgttaagaatcatattgtatagtagctttcagaccatacagtattcattgggttactcctattattatcaagtagctggaattgtgaaggtcggagtagttagatctttagcttttattccttatttttttgtattactctccatgtgtataaattattgatcatgttgctggcttttataaactctaagcgaaggaggagcactgcctcagcctttgcacatggtaatgaagcactgtttttaaataaaagagagaaacacca

SEQ ID NO: 177952 - DNA, 1537 bp, Homo sapiens
  Payload ID: 14909
  Gene Symbol: RBFOX2
  Gene Name: RNA binding protein, fox-1 homolog (C. elegans) 2
  Uniprot ID: O43251
  ENST ID: ENST00000631365
  CDS Start-End: 190-1266
ctgccagagaggaagagaaaagaaaggaagaaacattagaaagaaaaaggaaggaaaacggtataaagagagatcaattacccacccttaaatagctagattggggggggaggggggtggaaaagaaagctgtggaggtgtgccccagcacggctgctttgaaaggtttatcatctatccgtttggtttatggagaaaaagaaaatggtaactcagggtaaccaggagccgacaacaactcctgacgcaatggttcagccttttactaccatcccatttccaccacctccgcagaatggaattcccacagagtatggggtgccacacactcaagactatgccggccagaccggtgagcataacctgacactctacggaagtacgcaagcccacggggagcagagcagcaactcacccagcacacaaaatggatctcttacgacagaaggtggagcacagacagacggccagcagtcacagacacaaagtagtgaaaattcagagagtaaatctaccccgaaacggctgcatgtctctaatattcctttccgcttccgggaccctgacctccggcagatgtttgggggattcgggttcgtaactttcgagaatagtgctgatgcagacagggccagggagaaattacacggcaccgtggtagagggccgtaaaatcgaggtgaataatgctacagcacgtgtaatgaccaataagaagatggtcacaccatatgcaaatggttggaaattaagcccagtagttggagctgtatatggtccggagttatatgcagcatccagctttcaagcagatgtgtccctaggcaatgatgcagcagtgcccctatcaggaagagggggtatcaacacttacattcctttaatcattcctggcttcccttaccctactgcagccaccacggcagccgctttcagaggagcccatttgaggggcagagggcggacagtatatggtgcagtccgagcggtacctccaacagccatccccgcctatccaggtgtggtttaccaggacggattttacggtgctgacctctatggtggatatgcagcctacagatatgcacagcctgctactgcaaccgcagccaccgctgctgcagccgctgcagccgcttacagtgacggttatggcagggtgtacacagccgacccctaccatgcccttgcccctgccgctagctatggagttggcgctgtggcgagtttataccgaggtggctacagccgatttgccccctactgaagtgacgtgagacccctgcaaatgggacagccccccagttcatgaggcctggctattgcaatatttactagtagaggaactctatagcaagatgaagaggaaaaacaaacaaacaaacaaaaaaaaacacaaaaaaagaaagaatacttttttatacctcactatgttctttgaatatgtatttttcctttaaatttctgcctttaattcttttgttccaaagattgtgcatttttttctttttttttttaaactgtggtaaaaaaaaaaa

SEQ ID NO: 177953 - DNA, 1354 bp, Homo sapiens; identical to SEQ ID NO: 177940
  Payload ID: 14909
  Gene Symbol: RBFOX2
  Gene Name: RNA binding protein, fox-1 homolog (C. elegans) 2
  ENST ID: ENST00000626598
  CDS Start-End: 34-1107

SEQ ID NO: 177954 - DNA, 1706 bp, Homo sapiens
  Payload ID: 14909
  Gene Symbol: RBFOX2
  Gene Name: RNA binding protein, fox-1 homolog (C. elegans) 2
  Uniprot ID: O43251
  ENST ID: ENST00000626107
  CDS Start-End: 1-1113
atggagaaaaagaaaatggtaactcagggtaaccaggagccgacaacaactcctgacgcaatggttcagccttttactaccatcccatttccaccacctccgcagaatggaattcccacagagtatggggtgccacacactcaagactatgccggccagaccggtgagcataacctgacactctacggaagtacgcaagcccacggggagcagagcagcaactcacccagcacacaaaatggatctcttacgacagaaggtggagcacagacagacggccagcagtcacagacacaaagtagtgaaaattcagagagtaaatctaccccgaaacggctgcatgtctctaatattcctttccgcttccgggaccctgacctccggcagatgtttgggcagtttggcaaaatcctagatgtagaaataatctttaatgaacgtggctctaagggattcgggttcgtaactttcgagaatagtgctgatgcagacagggccagggagaaattacacggcaccgtggtagagggccgtaaaatcgaggtgaataatgctacagcacgtgtaatgaccaataagaagatggtcacaccatatgcaaatggttggaaattaagcccagtagttggagctgtatatggtccggagttatatgcagcatccagctttcaagcagatgtgtccctaggcaatgatgcagcagtgcccctatcaggaagagggggtatcaacacttacattcctttaatcagtctccctttagttcctggcttcccttaccctactgcagccaccacggcagccgctttcagaggagcccatttgaggggcagagggcggacagtatatggtgcagtccgagcggtacctccaacagccatccccgcctatccaggggtggatatgcagcctacagatatgcacagcctgctactgcaaccgcagccaccgctgctgcagccgctgcagccgcttacagtgacggttatggcagggtgtacacagccgacccctaccatgcccttgcccctgccgctagctatggagttggcgctgtggcgagtttataccgaggtggctacagccgatttgccccctactgaagtgacgtgagacccctgcaaatgggacagccccccagttcatgaggcctggctattgcaatatttactagtagaggaactctatagcaagatgaagaggaaaaacaaacaaacaaacaaaaaaaaacacaaaaaaagaaagaatacttttttatacctcactatgttctttgaatatgtatttttcctttaaatttctgcctttaattcttttgttccaaagattgtgcatttttttctttttttttttaaactgtggtaaaaaaaaaaataataatgcatttccatgtctgtatgtccgtgcttagcttattctatcaatcacggaagaggcagtcaaggaggaaggagagacattaggagccgataaatgcatctgatcagaaatcagcagacagaattaccaaagtgtatctggtgctgaatgactgggggacaagcagaagtggaagagatctttctgcaacaggatattcttctagtcttctgagtttctggtctttgacaggcaattctggttggctgtggctggaatccacatgctgatagataggaatttgtgcttacaaagcaggagaattaaaaagacgctttcctctcctc

SEQ ID NO: 177955 - DNA, 789 bp, Homo sapiens; identical to SEQ ID NO: 177949
  Payload ID: 14909
  Gene Symbol: RBFOX2
  Gene Name: RNA binding protein, fox-1 homolog (C. elegans) 2
  ENST ID: ENST00000627612
  CDS Start-End: 88-789

SEQ ID NO: 177956 - DNA, 1170 bp, Homo sapiens
  Payload ID: 14909
  Gene Symbol: RBFOX2
  Gene Name: RNA binding protein, fox-1 homolog (C. elegans) 2
  ENST ID: ENST00000625456
  CDS Start-End: 1-1170
aacgagcctctgactccaggttatcatggattcccagcgcgggacagccagggtaaccaggagccgacaacaactcctgacgcaatggttcagccttttactaccatcccatttccaccacctccgcagaatggaattcccacagagtatggggtgccacacactcaagactatgccggccagaccggtgagcataacctgacactctacggaagtacgcaagcccacggggagcagagcagcaactcacccagcacacaaaatggatctcttacgcagacagaaggtggagcacagacagacggccagcagtcacagacacaaagtagtgaaaattcagagagtaaatctaccccgaaacggctgcatgtctctaatattcctttccgcttccgggaccctgacctccggcagatgtttgggcagtttggcaaaatcctagatgtagaaataatctttaatgaacgtggctctaagggattcgggttcgtaactttcgagaatagtgctgatgcagacagggccagggagaaattacacggcaccgtggtagagggccgtaaaatcgaggtgaataatgctacagcacgtgtaatgaccaataagaagatggtcacaccatatgcaaatggttggaaattaagcccagtagttggagctgtatatggtccggagttatatgcagcatccagctttcaagcagatgtgtccctaggcaatgatgcagcagtgcccctatcaggaagagggggtatcaacacttacattcctttaatcagtctccctttagttcctggcttcccttaccctactgcagccaccacggcagccgctttcagaggagcccatttgaggggcagagggcggacagtatatggtgcagtccgagcggtacctccaacagccatccccgcctatccaggtgtggtttaccaggacggattttacggtgctgacctctatggtggatatgcagcctacagatatgcacagcctgctactgcaaccgcagccaccgctgctgcagccgctgcagccgcttacagtgacggttatggcagggtgtacacagccgacccctaccatgcccttgcccctgccgctagctatggagttggcgctgtggcgagtttataccgaggtggctacagccgatttgccccctactga

SEQ ID NO: 177957 - DNA, 811 bp, Homo sapiens
  Payload ID: 14909
  Gene Symbol: RBFOX2
  Gene Name: RNA binding protein, fox-1 homolog (C. elegans) 2
  ENST ID: ENST00000630250
  CDS Start-End: 1-684
ggattcgggttcgtaactttcgagaatagtgctgatgcagacagggccagggagaaattacacggcaccgtggtagagggccgtaaaatcgaggtgaataatgctacagcacgtgtaatgaccaataagaagatggtcacaccatatgcaaatggttggaaattaagcccagtagttggagctgtatatggtccggagttatatgcagcatccagctttcaagcagatgtgtccctaggcaatgatgcagcagtgcccctatcaggaagagggggtatcaacacttacattcctttaatcattcctggcttcccttaccctactgcagccaccacggcagccgctttcagaggagcccatttgaggggcagagggcggacagtatatggtgcagtccgagcggtacctccaacagccatccccgcctatccaggaatagtcttacaggaaccaatcattagcgctaaaatacctcagggtggatatgcagcctacagatatgcacagcctgctactgcaaccgcagccaccgctgctgcagccgctgcagccgcttacagtgacggttatggcagggtgtacacagccgacccctaccatgcccttgcccctgccgctagctatggagttggcgctgtggcgagtttataccgaggtggctacagccgatttgccccctactgaagtgacgtgagacccctgcaaatgggacagccccccagttcatgaggcctggctattgcaatatttactagtagaggaactctatagcaagatgaagaggaaaaacaaacaaacaaacaaaaaaaaa

SEQ ID NO: 177958 - DNA, 759 bp, Homo sapiens; identical to SEQ ID NO: 177941
  Payload ID: 14909
  Gene Symbol: RBFOX2
  Gene Name: RNA binding protein, fox-1 homolog (C. elegans) 2
  ENST ID: ENST00000629809
  CDS Start-End: 376-759

SEQ ID NO: 177959 - DNA, 1409 bp, Homo sapiens; identical to SEQ ID NO: 177939
  Payload ID: 14909
  Gene Symbol: RBFOX2
  Gene Name: RNA binding protein, fox-1 homolog (C. elegans) 2
  ENST ID: ENST00000627872
  CDS Start-End: 85-1197

SEQ ID NO: 177960 - DNA, 1254 bp, Homo sapiens; identical to SEQ ID NO: 177945
  Payload ID: 14909
  Gene Symbol: RBFOX2
  Gene Name: RNA binding protein, fox-1 homolog (C. elegans) 2
  Uniprot ID: O43251
  ENST ID: ENST00000627946
  CDS Start-End: 67-1197

SEQ ID NO: 177961 - DNA, 559 bp, Homo sapiens
  Payload ID: 14909
  Gene Symbol: RBFOX2
  Gene Name: RNA binding protein, fox-1 homolog (C. elegans) 2
  ENST ID: ENST00000626165
  CDS Start-End: 1-559
aacgagcctctgactccaggttatcatggattcccagcgcgggacagccagggtaaccaggagccgacaacaactcctgacgcaatggttcagccttttactaccatcccatttccaccacctccgcagaatggaattcccacagagtatggggtgccacacactcaagactatgccggccagaccggtgagcataacctgacactctacggaagtacgcaagcccacggggagcagagcagcaactcacccagcacacaaaatggatctcttacgcagacagaaggtggagcacagacagacggccagcagtcacagacacaaagtagtgaaaattcagagagtaaatctaccccgaaacggctgcatgtctctaatattcctttccgcttccgggaccctgacctccggcagatgtttgggcagtttggcaaaatcctagatgtagaaataatctttaatgaacgtggctctaagggattcgggttcgtaactttcgagaatagtgctgatgcagacagggccagggagaaattacacggcaccgtggtagagggcc

SEQ ID NO: 177962 - DNA, 1547 bp, Homo sapiens
  Payload ID: 14910
  Gene Symbol: RBFOX3
  Gene Name: RNA binding protein, fox-1 homolog (C. elegans) 3
  Uniprot ID: A6NFN3
  ENST ID: ENST00000584778
  CDS Start-End: 418-1395
agaagccgagggatgcagccaggggcacctcgcatggacgcctgccgcccgcctcagccctctgccctggggacacatggctgtgctggcagcagcaggttgaaattctgcctctgagaagctaacagtcttcctgtggtcgccactcctccccagcagccccctccttgccaaggacggtccagaaggagccccactggggcctccccgctcagcaaagcagacctcacctcccactaccagcttgaagtcacagcagccagaggaaattctgccaccattttcccaggtctgcagcccctccagctgggaacctgctcctggagccatccctctgcaaacagagagcccagagtgcctcggggaaaattggctgaataaaagagcgatcaggacgccacggctccgcctgaagcgatggcccagccctacccccccgcccagtacccccctccgccacagaacggcatccctgccgagtacgccccgcccccaccgcaccccacgcaggactactccggccagaccccggtccccacagagcatggcatgaccctgtacacaccagcacagacccaccccgagcagccaggctccgaggccagcacacagcccatcgccgggacccagacagtgccgcagacagacgaggcggcacagacggacagccagccgctccacccctccgaccctacagagaagcagcagcccaagcggctacacgtctccaacatccccttccggttcagggaccccgacttgcggcaaatgttcgggcaattcggaaaaattttagacgtggagatcatttttaacgagcggggctccaagggttttgggtttgtaacttttgaaactagctcagatgctgaccgagcccgggagaagctgaatgggacgatcgtagagggacggaaaattgaggtcaataatgccacggcccgagtgatgaccaacaagaagacggggaacccctacaccaacggctggaagctaaatccagtggtcggcgcagtctacgggcctgaattctatgcagtgacggggttcccctaccccaccaccggcacagccgttgcctaccggggcgcacatcttcggggccggggccgggccgtgtataatacatttcgggctgcgccacccccaccccccatcccgacttacggagcggtcgtgtatcaggatggattttatggtgctgagatttatggaggctacgcagcctacagatacgctcagcccgctgcagcggcggcagcctacagcgacagttacggcagagtctacgcagctgccgacccgtaccatcacaccatcgggcccgcggcgacctacagcattggaaccatggtaaggagcccaggcccgcccagccctgggtgccagtcctaacagctgggcatgggtggtgaggcccttgggggagaggccgagccctctgaccaatgccttggtcccggagactttggaaggaccacggcctggatgtgagttagggtgaggggagggctggcccctcacgccctctcagttgcggggaagca

SEQ ID NO: 177963 - DNA, 1519 bp, Homo sapiens
  Payload ID: 14910
  Gene Symbol: RBFOX3
  Gene Name: RNA binding protein, fox-1 homolog (C. elegans) 3
  Uniprot ID: A6NFN3
  ENST ID: ENST00000580155
  CDS Start-End: 514-1452
gatacagcagcagctggtgctcctggccaggctgtgcgtgctctctctgcctctctctctcggactctctgctctctctctctgactctctcctctctctctgttggcctggtgaaatgttcttggctgtaggcacacagagccttggactcaaggctgttggagtcgaggacaccttgacttcggtcctggaggttgaaattctgcctctgagaagctaacagtcttcctgtggtcgccactcctccccagcagccccctccttgccaaggacggtccagaaggagccccactggggcctccccgctcagcaaagcagacctcacctcccactaccagcttgaagtcacagcagccagaggaaattctgccaccattttcccaggtctgcagcccctccagctgggaacctgctcctggagccatccctctgcaaacagagagcccagagtgcctcggggaaaattggctgaataaaagagcgatcaggacgccacggctccgcctgaagcgatggcccagccctacccccccgcccagtacccccctccgccacagaacggcatccctgccgagtacgccccgcccccaccgcaccccacgcaggactactccggccagaccccggtccccacagagcatggcatgaccctgtacacaccagcacagacccaccccgagcagccaggctccgaggccagcacacagcccatcgccgggacccagacagtgccgcagacagacgaggcggcacagacggacagccagccgctccacccctccgaccctacagagaagcagcagcccaagcggctacacgtctccaacatccccttccggttcagggaccccgacttgcggcaaatgttcgggcaattcggaaaaattttagacgtggagatcatttttaacgagcggggctccaagggttttgggtttgtaacttttgaaactagctcagatgctgaccgagcccgggagaagctgaatgggacgatcgtagagggacggaaaattgaggtcaataatgccacggcccgagtgatgaccaacaagaagacggggaacccctacaccaacggctggaagctaaatccagtggtcggcgcagtctacgggcctgaattctatgcagtgacggggttcccctaccccaccaccggcacagccgttgcctaccggggcgcacatcttcggggccggggccgggccgtgtataatacatttcgggctgcgccacccccaccccccatcccgacttacggagcggtcgtgtatcaggatggattttatggtgctgagatttatggaggctacgcagcctacagatacgctcagcccgctgcagcggcggcagcctacagcgacagttacggcagagtctacgcagctgccgacccgtaccatcacaccatcgggcccgcggcgacctacagcattggaaccatgtgaaaccttccaccgtttccttctcggaccatgaagggcaaaaacaaaaaaacaaaaaaaatcacaaaac

SEQ ID NO: 177964 - DNA, 1143 bp, Homo sapiens
  Payload ID: 14910
  Gene Symbol: RBFOX3
  Gene Name: RNA binding protein, fox-1 homolog (C. elegans) 3
  ENST ID: ENST00000582043
  CDS Start-End: 74-1060
agagcccagagtgcctcggggaaaattggctgaataaaagagcgatcaggacgccacggctccgcctgaagcgatggcccagccctacccccccgcccagtacccccctccgccacagaacggcatccctgccgagtacgccccgcccccaccgcaccccacgcaggactactccggccagaccccggtccccacagagcatggcatgaccctgtacacaccagcacagacccaccccgagcagccaggctccgaggccagcacacagcccatcgccgggacccagacagtgccgcagacagacgaggcggcacagacggacagccagccgctccacccctccgaccctacagagaagcagcagcccaagcggctacacgtctccaacatccccttccggttcagggaccccgacttgcggcaaatgttcgggcaattcggaaaaattttagacgtggagatcatttttaacgagcggggctccaaggtcaataatgccacggcccgagtgatgaccaacaagaagacggggaacccctacaccaacggctggaagctaaatccagtggtcggcgcagtctacgggcctgaattctatgcagtgacggggttcccctaccccaccaccggcacagccgttgcctaccggggcgcacatcttcggggccggggccgggccgtgtataatacatttcgggctgcgccacccccaccccccatcccgacttacggagcggcactggagcaaacgcttgttaaaatgccagtcccatgggcggggctggcaccgtgccccctccctcctcagcagacaccggagccggcctaccccacctctccagcgttcccaccactttcttgtccgtttgcttccagggtcgtgtatcaggatggattttatggtgctgagatttatggaggctacgcagcctacagatacgctcagcccgctgcagcggcggcagcctacagcgacagttacggcagagtctacgcagctgccgacccgtaccatcacaccatcgggcccgcggcgacctacagcattggaaccatgtgaaaccttccaccgtttccttctcggaccatgaagggcaaaaacaaaaaaacaaaaaaaatcacaaaacaaaaaaaacaaaaaaa

SEQ ID NO: 177965 - DNA, 2934 bp, Homo sapiens
  Payload ID: 14910
  Gene Symbol: RBFOX3
  Gene Name: RNA binding protein, fox-1 homolog (C. elegans) 3
  ENST ID: ENST00000583458
  CDS Start-End: 320-1396
gttgaaattctgcctctgagaagctaacagtcttcctgtggtcgccactcctccccagcagccccctccttgccaaggacggtccagaaggagccccactggggcctccccgctcagcaaagcagacctcacctcccactaccagcttgaagtcacagcagccagaggaaattctgccaccattttcccaggtctgcagcccctccagctgggaacctgctcctggagccatccctctgcaaacagagagcccagagtgcctcggggaaaattggctgaataaaagagcgatcaggacgccacggctccgcctgaagcgatggcccagccctacccccccgcccagtacccccctccgccacagaacggcatccctgccgagtacgccccgcccccaccgcaccccacgcaggactactccggccagaccccggtccccacagagcatggcatgaccctgtacacaccagcacagacccaccccgagcagccaggctccgaggccagcacacagcccatcgccgggacccagacagtgccgacagacgaggcggcacagacggacagccagccgctccacccctccgaccctacagagaagcagcagcccaagcggctacacgtctccaacatccccttccggttcagggaccccgacttgcggcaaatgttcgggcaattcggaaaaattttagacgtggagatcatttttaacgagcggggctccaagggttttgggtttgtaacttttgaaactagctcagatgctgaccgagcccgggagaagctgaatgggacgatcgtagagggacggaaaattgaggtcaataatgccacggcccgagtgatgaccaacaagaagacggggaacccctacaccaacggctggaagctaaatccagtggtcggcgcagtctacgggcctgaattctatgcagtgacggggttcccctaccccaccaccggcacagccgttgcctaccggggcgcacatcttcggggccggggccgggccgtgtataatacatttcgggctgcgccacccccaccccccatcccgacttacggagcggcactggagcaaacgcttgttaaaatgccagtcccatgggcggggctggcaccgtgccccctccctcctcagcagacaccggagccggcctaccccacctctccagcgttcccaccactttcttgtccgtttgcttccagggtcgtgtatcaggatggattttatggtgctgagatttatggaggctacgcagcctacagatacgctcagcccgctgcagcggcggcagcctacagcgacagttacggcagagtctacgcagctgccgacccgtaccatcacaccatcgggcccgcggcgacctacagcattggaaccatgtgaaaccttccaccgtttccttctcggaccatgaagggcaaaaacaaaaaaacaaaaaaaatcacaaaacaaaaaaaacaaaaaaagatgttaagatccaagcaacaaaaaaaaaaccaaccaaaccaagaggcatccaaccaagtccaagtcccgcgtcctggccacacgcccgcaccgagggagcacgccggcaggggcgccgaggagcggccccaggacaggacggccccaccgcgtcctggctggcagcacagtgggaacacgcccctccgtctcaggcagtgggggagttggaggggaaggggcctcccttgtgggacccgtggggggctctgttttccatccagtcttcctttcccagcccccaactcccaagacagacagtgtggagcccagcggcggcggagcaggcccgggcctgagcaggcaggcgctgctagcaagacttgatctttgtggccagctgtgccagggggccggcggggctgaggggtgcgggcagctttcatcccaggggctccactgggccccgtcaccctcctgtcgcgtcccctgcgtcccacctccctcctgcccggcagtcccgcccgtgcccccagcctggcgaggaagccgtccaacagtagccccggggccagctcccaacagaaagggctgacgtggctccaggactcaggggcgctccatgggaggacgaaggaagcccagccagccaggagccactcctcacacctccaagtgtggccaagtgggccctgaggccaaggacttacttgctcttcctggccatctctccctttctggaggaggcccggggcctgtgtacaccaaggctgacctcgtgctgcctgctgggacccagccctccctgccgctcccctgtgagcccagtccaccgtgggcgcccagggccagggacgggccagcgcccggctgcatcgcgaggttgggagtcacagtggctgtgggcctggacgggcacagccagagcaggggcccatgggaagggcaagggatggggaagcctgggccggccccttccctgctcccaaggcaggtgtccaggtggcgggagcagcaccaaggacagccaggcttacccggtgggaggagcaggagcagagcaggtggcagggaggaacccctggcgaggcagggagcactgaagtagggaagcagcaaaaaatacaggctcccaacgtggctccactgtctcatgaagtgtcaaaaatttaaaaatacacctcactttctattcagcatcagctattgaaatggaattctccttttctattcccgttgtacatagccccacgccctgcctccggctttgtcctctgtacagagccccctgtcccctctgctgttccggacccttttcttgcagcagctcaaccccccgactcactcagatccccaggactgcagccgagccccgggcttcctttcttaccattctgtatgcttccaaggtgtgaccattcaaactaacagtattattaagattattaataaagatttctttcttcaaaccagga

SEQ ID NO: 177966 - DNA, 154 bp, Homo sapiens
  Payload ID: 14910
  Gene Symbol: RBFOX3
  Gene Name: RNA binding protein, fox-1 homolog (C. elegans) 3
  ENST ID: ENST00000582139
  CDS Start-End: 142-154
agatgaacagctgaccgtgttttcaaagataccacctggggaaacagccagaagctggaagtcatcccaagagagaagtcagccaggggttggagaccccagcagaagagcgatcaggacgccacggctccgcctgaagcgatggcccagccct

SEQ ID NO: 177967 - DNA, 877 bp, Homo sapiens
  Payload ID: 14910
  Gene Symbol: RBFOX3
  Gene Name: RNA binding protein, fox-1 homolog (C. elegans) 3
  ENST ID: ENST00000582880
  CDS Start-End: 1-227
gggtcgtgtatcaggatggattttatggtgctgagatttatggaggctacgcagcctacagatacgctcagcccgctgcagcggcggcagcctacagcgacagttacggcagagtctacgcagctgccgacccgtaccatcacaccatcgggcccgcggcgacctacagcattggaaccatggctagcctctgccgaggagggtacagccgcttcaccccctactagcaagagacccagcccctaacagcattcacactgactgcctattacacaccaaacccaacagcccaaaaccaggcacagccaccagaagacagtgcacccctcccggtcagcgacacgcacggctggccccctgcaactctaaaatctatagattatttctctccagccagttggtctccccaccccacctgtgctggtgtgtgtgtctttgaccctggtttttcctgtatgtctgcaaccgtgatttcctattttgactttgttgatgttgtactacccaagccattgcaggtacggtgtgcacaccgtggggtccaggctgggccaggagaccaggcagcccccaacctgggagtagcggtagcgccctatgagggcaagagccacatttcctggcctcccaggctgcacagaacaacagaaacgcctggcagggcctcccccaaagccacccgaccagccccgtgccatggccctagtgtccagcaccctgacgcagggagggaggggctccaggcacccagtgtgggtctccccggcctgagggtgctcccgcaggccttcacccagccaaccacaggagtagccactgcccctcctcgccccattcagctgaaactaatatttttcattaaattttattgacgata

SEQ ID NO: 177968 - DNA, 260 bp, Homo sapiens
  Payload ID: 14910
  Gene Symbol: RBFOX3
  Gene Name: RNA binding protein, fox-1 homolog (C. elegans) 3
  ENST ID: ENST00000580508
  CDS Start-End: 105-260
ggaggaggagagagaccgggagggcgcccgggaggcagggcgcgcgcacactccgagggacgcagcgagcgcagagccgccgccgggcgcccccctgccgccccatgctgtgctccatggcgaactcgggctgcctcctgctgtccaactccggcagcatgctcccgcactccgtgccctgcccgcccgccttcctctacctccaacagagcgatcaggacgccacggctccgcctgaagcgatggcccagccctacccc

SEQ ID NO: 177969 - DNA, 611 bp, Homo sapiens
  Payload ID: 14910
  Gene Symbol: RBFOX3
  Gene Name: RNA binding protein, fox-1 homolog (C. elegans) 3
  ENST ID: ENST00000582894
  CDS Start-End: 1-394
ggtcggcgcagtctacgggcctgaattctatgcagtgacggggttcccctaccccaccaccggcacagccgttgcctaccggggcgcacatcttcggggccggggccgggccgtgtataatacatttcgggctgcgccacccccaccccccatcccgacttacggagcggtcgtgtatcaggatggattttatggtgctgagatttatggaggctacgcagcctacagatacgctcagcccgctgcagcggcggcagcctacagcgacagttacggcagagtctacgcagctgccgacccgtaccatcacaccatcgggcccgcggcgacctacagcattggaaccatggctagcctctgccgaggagggtacagccgcttcaccccctactagcaagagacccagcccctaacagcattcacactgactgcctattacacaccaaacccaacagcccaaaaccaggcacagccaccagaagacagtgcacccctcccggtcagcgacacgcacggctggccccctgcaactctaaaatctatagattatttctctccagccagttggtctccccaccccacctgtgctggtgtgtgtgtctttgaccctg

SEQ ID NO: 177970 - DNA, 1161 bp, Homo sapiens
  Payload ID: 14911
  Gene Symbol: REXO2
  Gene Name: RNA exonuclease 2
  Uniprot ID: Q9Y3B8
  ENST ID: ENST00000265881
  CDS Start-End: 144-857
gttgagggcgagccggcgcaccgtacgctgggacgtgtggtttcagctcgtgcgcctccccgtgggtttgcgacgtttagcgactattgcgcctgcgccagcgccggctgcgagactggggccgtggctgctggtcccgggtgatgctaggcggctccctgggctccaggctgttgcggggtgtaggtgggagtcacggacggttcggggcccgaggtgtccgcgaaggtggcgcagccatggcggcaggggagagcatggctcagcggatggtctgggtggacctggagatgacaggattggacattgagaaggaccagattattgagatggcctgtctgataactgactctgatctcaacattttggctgaaggtcctaacctgattataaaacaaccagatgagttgctggacagcatgtcagattggtgtaaggagcatcacgggaagtctggccttaccaaggcagtgaaggagagtacaattacattgcagcaggcagagtatgaatttctgtcctttgtacgacagcagactcctccagggctctgtccacttgcaggaaattcagttcatgaagataagaagtttcttgacaaatacatgccccagttcatgaaacatcttcattatagaataattgatgtgagcactgttaaagaactgtgcagacgctggtatccagaagaatatgaatttgcaccaaagaaggctgcttctcatagggcacttgatgacattagtgaaagcatcaaagagcttcagttttaccgaaataacatcttcaagaaaaaaatagatgaaaagaagaggaaaattatagaaaatggggaaaatgagaagaccgtgagttgatgccagttatcatgctgccactacatcgttatctggaggcaacttctggtggtttttttttctcacgctgatggcttggcagagcaccttcggttaacttgcatctccagattgattactcaagcagacagcacacgaaatactatttttctcctaatatgctgtttccattatgacacagcagctcctttgtaagtaccaggtcatgtccatcccttggtacatatatgcatttgcttttaaaccatttcttttgtttaaataaataaataagtaaataaagctagttctattgaaatgcaaa

SEQ ID NO: 177971 - DNA, 726 bp, Homo sapiens
  Payload ID: 14911
  Gene Symbol: REXO2
  Gene Name: RNA exonuclease 2
  ENST ID: ENST00000546316
  CDS Start-End: 1-204
attgagaaggaccagattattgagatggcctgtctgataactgactctgatctcaacattttggctgaaggtcctaacctgattataaaacaaccagatgagttgctggacagcatgtcagattggtgtaaggagcatcacgggaaggaaattcagttcatgaagataagaagtttcttgacaaatacatgccccagttcatgaaacatcttcattatagaataattgatgtgagcactgttaaagaactgtgcagacgctggtatccagaagaatatgaatttgcaccaaagaaggctgcttctcatagggcacttgatgacattagtgaaagcatcaaagagcttcagttttaccgaaataacatcttcaagaaaaaaatagatgaaaagaagaggaaaattatagaaaatggggaaaatgagaagaccgtgagttgatgccagttatcatgctgccactacatcgttatctggaggcaacttctggtggtttttttttctcacgctgatggcttggcagagcaccttcggttaacttgcatctccagattgattactcaagcagacagcacacgaaatactatttttctcctaatatgctgtttccattatgacacagcagctcctttgtaagtaccaggtcatgtccatcccttggtacatatatgcatttgcttttaaaccatttcttttgtttaaataaataaataagtaaataaagcta

SEQ ID NO: 177972 - DNA, 452 bp, Homo sapiens
  Payload ID: 14911
  Gene Symbol: REXO2
  Gene Name: RNA exonuclease 2
  ENST ID: ENST00000544196
  CDS Start-End: 64-321
cgactattgcgcctgcgccagcgccggctgcgagactggggccgtggctgctggtcccgggtgatgctaggcggctccctgggctccaggctgttgcggggtgtaggtgggagtcacggacggttcggggcccgaggtgtccgcgaaggtggcgcagccatggcggcaggggagagcatggctcagcggatggtctgggtggacctggagatgacaggattggacattgagaaggaccagattattgagatggcctgtctgataactgactctgatctcaacattttggctgaagtaaaagaggtgaggacgtatttctagattaatgactgcgtttgtggagtaccaggcttatcctccccacatatcaactgtaggagaatcatgagactttgtacttctcatcataacaacttttttaactttgtataaataaagccctgagttttaga

SEQ ID NO: 177973 - DNA, 791 bp, Homo sapiens
  Payload ID: 14911
  Gene Symbol: REXO2
  Gene Name: RNA exonuclease 2
  ENST ID: ENST00000539754
  CDS Start-End: 59-727
attgcgcctgcgccagcgccggctgcgagactggggccgtggctgctggtcccgggtgatgctaggcggctccctgggctccaggctgttgcggggtgtaggtgggagtcacggacggttcggggcccgaggtgtccgcgaaggtggcgcagccatggcggcaggggagagcatggctcagcggatggtctgggtggacctggagatgacaggattggacattgagaaggaccagattattgagatggcctgtctgataactgactctgatctcaacattttggctgaaggtcctaacctgattataaaacaaccagatgagttgctggacagcatgtcagattggtgtaaggagcatcacgggaagcaggcagagtatgaatttctgtcctttgtacgacagcagactcctccagggctctgtccacttgcaggaaattcagttcatgaagataagaagtttcttgacaaatacatgccccagttcatgaaacatcttcattatagaataattgatgtgagcactgttaaagaactgtgcagacgctggtatccagaagaatatgaatttgcaccaaagaaggctgcttctcatagggcacttgatgacattagtgaaagcatcaaagagcttcagttttaccgaaataacatcttcaagaaaaaaatagatgaaaagaagaggaaaattatagaaaatggggaaaatgagaagaccgtgagttgatgccagttatcatgctgccactacatcgttatctggaggcaacttctggtggtttttttttctc

SEQ ID NO: 177974 - DNA, 449 bp, Homo sapiens
  Payload ID: 14911
  Gene Symbol: REXO2
  Gene Name: RNA exonuclease 2
  ENST ID: ENST00000538198
  CDS Start-End: 1-271
gggctccaggctgttgcggggtgtaggtgggagtcacggacggttcggggcccgaggtgtccgcgaaggtggcgcagccatggcggcaggggagagcatggctcagcggatggtctgggtggacctggagatgacaggattggacattgagaaggaccagattattgagatggcctgtctgataactgactctgatctcaacattttggctgaagaaattcagttcatgaagataagaagtttcttgacaaatacatgccccagttcatgaaacatcttcattatagaataattgatgtgagcactgttaaagaactgtgcagacgctggtatccagaagaatatgaatttgcaccaaagaaggctgcttctcatagggcacttgatgacattagtgaaagcatcaaagagcttcagttttaccgaaataacatcttcaagaaaaaaat

SEQ ID NO: 177975 - DNA, 880 bp, Homo sapiens
  Payload ID: 14911
  Gene Symbol: REXO2
  Gene Name: RNA exonuclease 2
  ENST ID: ENST00000544827
  CDS Start-End: 27-593
cacagaaaggattcaactcattcaagatgacaggattggacattgagaaggaccagattattgagatggcctgtctgataactgactctgatctcaacattttggctgaaggtcctaacctgattataaaacaaccagatgagttgctggacagcatgtcagattggtgtaaggagcatcacgggaagtctggccttaccaaggcagtgaaggagagtacaattacattgcagcaggcagagtatgaatttctgtcctttgtacgacagcagactcctccagggctctgtccacttgcaggaaattcagttcatgaagataagaagtttcttgacaaatacatgccccagttcatgaaacatcttcattatagaataattgatgtgagcactgttaaagaactgtgcagacgctggtatccagaagaatatgaatttgcaccaaagaaggctgcttctcatagggcacttgatgacattagtgaaagcatcaaagagcttcagttttaccgaaataacatcttcaagaaaaaaatagatgaaaagaagaggaaaattatagaaaatggggaaaatgagaagaccgtgagttgatgccagttatcatgctgccactacatcgttatctggaggcaacttctggtggtttttttttctcacgctgatggcttggcagagcaccttcggttaacttgcatctccagattgattactcaagcagacagcacacgaaatactatttttctcctaatatgctgtttccattatgacacagcagctcctttgtaagtaccaggtcatgtccatcccttggtacatatatgcatttgcttttaaaccatttcttttgtttaaataaataaataagtaaataaagctag

SEQ ID NO: 177976 - DNA, 539 bp, Homo sapiens
  Payload ID: 14911
  Gene Symbol: REXO2
  Gene Name: RNA exonuclease 2
  ENST ID: ENST00000543131
  CDS Start-End: 19-222
ggctgctggtcccgggtgatgctaggcggctccctgggctccaggctgttgcggggtgtaggtgggagtcacggacggttcggggcccgaggtgtccgcgaaggtggcgcagccatggcggcaggggagagcatggctcagcggatggtctgggtggacctggaggaaattcagttcatgaagataagaagtttcttgacaaatacatgccccagttcatgaaacatcttcattatagaataattgatgtgagcactgttaaagaactgtgcagacgctggtatccagaagaatatgaatttgcaccaaagaaggctgcttctcatagggcacttgatgacattagtgaaagcatcaaagagcttcagttttaccgaaataacatcttcaagaaaaaaatagatgaaaagaagaggaaaattatagaaaatggggaaaatgagaagaccgtgagttgatgccagttatcatgctgccactacatcgttatctggaggcaacttctggtggtttttttttctcacgctgatggcttggca

SEQ ID NO: 177977 - DNA, 475 bp, Homo sapiens
  Payload ID: 14911
  Gene Symbol: REXO2
  Gene Name: RNA exonuclease 2
  ENST ID: ENST00000541703
  CDS Start-End: 31-396
gactggggccgtggctgctggtcccgggtgatgctaggcggctccctgggctccaggctgttgcggggtgtaggtgggagtcacggacggttcggggcccgaggtgtccgcgaaggtggcgcagccatggcggcaggggagagcatggctcagcggatggtctgggtggacctggagatgacaggattggacattgagaaggaccagattattgagatggcctgtctgataactgactctgatctcaacattttggctgaaggtcctaacctgattataaaacaaccagatgagttgctggacagcatgtcagattggtgtaaggagcatcacgggaaggaaattcagttcatgaagataagaagtttcttgacaaatacatgccccagttcatgaaacatcttcattatagaataattgatgtgagcactgttaaagaactgtgcagacgctggtatccagaagaatatgaatt

SEQ ID NO: 177978 - DNA, 710 bp, Homo sapiens
  Payload ID: 14911
  Gene Symbol: REXO2
  Gene Name: RNA exonuclease 2
  ENST ID: ENST00000539275
  CDS Start-End: 46-285
cagcgccggctgcgagactggggccgtggctgctggtcccgggtgatgctaggcggctccctgggctccaggctgttgcggggtgtaggtgggagtcacggacggttcggggcccgaggtgtccgcgaaggtggcgcagccatggcggcaggggagagcatggctcagcggatggtctgggtggacctggagatgacaggattggacattgagaaggaccagattattgagatggcctgtctgataactgactctgatctcaacattttggctgaaggcacttgatgacattagtgaaagcatcaaagagcttcagttttaccgaaataacatcttcaagaaaaaaatagatgaaaagaagaggaaaattatagaaaatggggaaaatgagaagaccgtgagttgatgccagttatcatgctgccactacatcgttatctggaggcaacttctggtggtttttttttctcacgctgatggcttggcagagcaccttcggttaacttgcatctccagattgattactcaagcagacagcacacgaaatactatttttctcctaatatgctgtttccattatgacacagcagctcctttgtaagtaccaggtcatgtccatcccttggtacatatatgcatttgcttttaaaccatttcttttgtttaaataaataaataagtaaataaagctagttctattgaaatgcaaa

SEQ ID NO: 177979 - DNA, 664 bp, Homo sapiens
  Payload ID: 14911
  Gene Symbol: REXO2
  Gene Name: RNA exonuclease 2
  ENST ID: ENST00000539119
  CDS Start-End: 1-577
cggacggttcggggcccgaggtgtccgcgaaggtggcgcagccatggcggcaggggagagcatggctcagcggatggtctgggtggacctggagggtcctaacctgattataaaacaaccagatgagttgctggacagcatgtcagattggtgtaaggagcatcacgggaagtctggccttaccaaggcagtgaaggagagtacaattacattgcagcaggcagagtatgaatttctgtcctttgtacgacagcagactcctccagggctctgtccacttgcaggaaattcagttcatgaagataagaagtttcttgacaaatacatgccccagttcatgaaacatcttcattatagaataattgatgtgagcactgttaaagaactgtgcagacgctggtatccagaagaatatgaatttgcaccaaagaaggctgcttctcatagggcacttgatgacattagtgaaagcatcaaagagcttcagttttaccgaaataacatcttcaagaaaaaaatagatgaaaagaagaggaaaattatagaaaatggggaaaatgagaagaccgtgagttgatgccagttatcatgctgccactacatcgttatctggaggcaacttctggtggtttttttttctcacgctgatggcttggcagagcac

SEQ ID NO: 177980 - DNA, 1158 bp, Homo sapiens
  Payload ID: 14911
  Gene Symbol: REXO2
  Gene Name: RNA exonuclease 2
  Uniprot ID: Q9Y3B8
  ENST ID: ENST00000611665
  CDS Start-End: 144-857
gttgagggcgagccggcgcaccgtacgctgggacgtgtggtttcagctcgtgcgcctccccgtgggtttgcgacgtttagcgactattgcgcctgcgccagcgccggctgcgagactggggccgtggctgctggtcccgggtgatgctaggcggctccctgggctccaggctgttgcggggtgtaggtgggagtcacggacggttcggggcccgaggtgtccgcgaaggtggcgcagccatggcggcaggggagagcatggctcagcggatggtctgggtggacctggagatgacaggattggacattgagaaggaccagattattgagatggcctgtctgataactgactctgatctcaacattttggctgaaggtcctaacctgattataaaacaaccagatgagttgctggacagcatgtcagattggtgtaaggagcatcacgggaagtctggccttaccaaggcagtgaaggagagtacaattacattgcagcaggcagagtatgaatttctgtcctttgtacgacagcagactcctccagggctctgtccacttgcaggaaattcagttcatgaagataagaagtttcttgacaaatacatgccccagttcatgaaacatcttcattatagaataattgatgtgagcactgttaaagaactgtgcagacgctggtatccagaagaatatgaatttgcaccaaagaaggctgcttctcatagggcacttgatgacattagtgaaagcatcaaagagcttcagttttaccgaaataacatcttcaagaaaaaaatagatgaaaagaagaggaaaattatagaaaatggggaaaatgagaagaccgtgagttgatgccagttatcatgctgccactacatcgttatctggaggcaacttctggtggtttttttttctcacgctgatggcttggcagagcaccttcggttaacttgcatctccagattgattactcaagcagacagcacacgaaatactatttttctcctaatatgctgtttccattatgacacagcagctcctttgtaagtaccaggtcatgtccatcccttggtacatatatgcatttgcttttaaaccatttcttttgtttaaataaataaataagtaaataaagctagttctattgaaatgc

SEQ ID NO: 177981 - DNA, 1725 bp, Homo sapiens
  Payload ID: 14912
  Gene Symbol: RNGTT
  Gene Name: RNA guanylyltransferase and 5'-phosphatase
  Uniprot ID: O60942
  ENST ID: ENST00000369475
  CDS Start-End: 1-1725
atggctcacaacaagatcccgccgcggtggctgaactgtccccggcgcggccagccggtggcaggaagattcttacctctgaagacaatgttaggaccaagatatgatagtcaagttgctgaagaaaatcggttccatcccagcatgctctcaaattacctaaagagcctaaaggttaaaatgggcttgttggtggacctgacaaatacttcaaggttctatgaccgaaatgacatagaaaaagaaggaatcaaatatataaaacttcagtgtaaaggacatggtgagtgccctaccactgagaatactgagacctttattcgtctgtgtgagcggtttaatgaaagaaatccacctgaacttataggtgttcattgtactcatggcttcaatcgcactggtttcctcatatgtgcctttttggtggagaaaatggattggagtatcgaagcagcagttgctacttttgcccaagccagaccaccaggaatctacaagggtgattatttgaaggaactttttcgtcggtatggtgacatagaggaagcaccacccccacctctattgccagattggtgttttgaggatgatgaagacgaagatgaggatgaggatggaaagaaggaatcagaacccgggtcaagtgcttcttttggcaaaaggagaaaagaacggttaaaactgggcgctattttcttggaaggtgttactgttaaaggtgtaactcaagtaacaacacaaccaaagttaggagaggtacagcagaagtgtcatcaattctgtggctgggaagggtctggattccctggagcacagcctgtttccatggacaagcaaaatattaaacttttagacctgaagccatacaaagtaagctggaaagcagatggtactcggtacatgatgttgattgatggcacaaatgaagtttttatgattgatagagacaattcagtatttcatgtttcaaatctggaatttccatttcgtaaagatcttcgtatgcatttatcaaatactctcttggatggcgagatgattattgacagagtaaatggacaggctgttcctagatatttgatatatgacataattaaattcaattcacagcccgttggagattgtgattttaatgttcgtctgcagtgtatagaacgagaaattataagtcctcgacacgaaaaaatgaagactgggctcattgacaaaacacaggaaccatttagcgtcagaaataagccgttttttgacatctgtacttcaagaaagaaatacaaacctggtcgatgtgatgatattttgaaatggaagcctcccagtctgaattctgtggattttcgtctaaaaataacaagaatgggaggagaagggttacttcctcagaatgttggcctcctgtatgttggaggttatgaaagaccctttgcacaaatcaaggtgacaaaagagctgaaacagtatgacaacaaaattatagaatgcaaatttgagaacaacagctgggtcttcatgagacagagaacagacaaaagttttcctaatgcctacaacactgccatggctgtgtgtaacagcatctcaaaccctgtcaccaaggagatgctgtttgagttcatcgacagatgtactgcagcttctcaaggacagaagcgaaaacatcatctggaccctgacacggagctcatgccaccaccacctcccaaaagaccacgccctttaacctaa

SEQ ID NO: 177982 - DNA, 4553 bp, Homo sapiens
  Payload ID: 14912
  Gene Symbol: RNGTT
  Gene Name: RNA guanylyltransferase and 5'-phosphatase
  Uniprot ID: O60942
  ENST ID: ENST00000369485
  CDS Start-End: 313-2106
attcgtcgcgtccttaactctttgctatccttccgctgagcttcctcttctttccctctgacctcggaaagggggcggggctttcgggggcggaagttgcggtgcattgtgggttctcctggagctgtggagttgatcctgaatgaaagtggcgcgccgcccctgacgttacccggatcggagaggttggaattcagattacggctgcgattcgggtgtctcggaccccggtgtgcaccggaccacggggaggcggctccaaaggcgcggtgaacgttggtgagggagggcagctctgcgcagccccaagacatggctcacaacaagatcccgccgcggtggctgaactgtccccggcgcggccagccggtggcaggaagattcttacctctgaagacaatgttaggaccaagatatgatagtcaagttgctgaagaaaatcggttccatcccagcatgctctcaaattacctaaagagcctaaaggttaaaatgggcttgttggtggacctgacaaatacttcaaggttctatgaccgaaatgacatagaaaaagaaggaatcaaatatataaaacttcagtgtaaaggacatggtgagtgccctaccactgagaatactgagacctttattcgtctgtgtgagcggtttaatgaaagaaatccacctgaacttataggtgttcattgtactcatggcttcaatcgcactggtttcctcatatgtgcctttttggtggagaaaatggattggagtatcgaagcagcagttgctacttttgcccaagccagaccaccaggaatctacaagggtgattatttgaaggaactttttcgtcggtatggtgacatagaggaagcaccacccccacctctattgccagattggtgttttgaggatgatgaagacgaagatgaggatgaggatggaaagaaggaatcagaacccgggtcaagtgcttcttttggcaaaaggagaaaagaacggttaaaactgggcgctattttcttggaaggtgttactgttaaaggtgtaactcaagtaacaacacaaccaaagttaggagaggtacagcagaagtgtcatcaattctgtggctgggaagggtctggattccctggagcacagcctgtttccatggacaagcaaaatattaaacttttagacctgaagccatacaaagtaagctggaaagcagatggtactcggtacatgatgttgattgatggcacaaatgaagtttttatgattgatagagacaattcagtatttcatgtttcaaatctggaatttccatttcgtaaagatcttcgtatgcatttatcaaatactctcttggatggcgagatgattattgacagagtaaatggacaggctgttcctagatatttgatatatgacataattaaattcaattcacagcccgttggagattgtgattttaatgttcgtctgcagtgtatagaacgagaaattataagtcctcgacacgaaaaaatgaagactgggctcattgacaaaacacaggaaccatttagcgtcagaaataagccgttttttgacatctgtacttcaagaaagctacttgaaggaaattttgccaaagaagtgagccatgaaatggatggacttatttttcagcctactggaaaatacaaacctggtcgatgtgatgatattttgaaatggaagcctcccagtctgaattctgtggattttcgtctaaaaataacaagaatgggaggagaagggttacttcctcagaatgttggcctcctgtatgttggaggttatgaaagaccctttgcacaaatcaaggtgacaaaagagctgaaacagtatgacaacaaaattatagaatgcaaatttgagaacaacagctgggtcttcatgagacagagaacagacaaaagttttcctaatgcctacaacactgccatggctgtgtgtaacagcatctcaaaccctgtcaccaaggagatgctgtttgagttcatcgacagatgtactgcagcttctcaaggacagaagcgaaaacatcatctggaccctgacacggagctcatgccaccaccacctcccaaaagaccacgccctttaacctaagacctgcctgtgacttgagggttaagaagaaagaggaatgaggaaaaaacgctgttgcccatttttgtagccagagaaattgaaaaacgactgtggcttgatgttgatacacatttgaattttttttaaaaaaagaaagttatcgtagccagcctgtaaatacttgatgcattcgtttcctcagtgctgcaatacatcgtggacttaaacatcttatttatctgataaactcagccttaccttgtggaatctgaagattgaaatatccaaaggtttaaacaagatggaaatcaatgaaaaagaggccttgtttatatatgggtagcttcacatttaatttataaagttaacaatctggaaactgtgagcccataaaacagtattttttagaagttgtgttacaactgtagcaaattttccttttaaaaaatccaggcaatggcattaaacattcttgctatcatttaccatggatttcctacatttctgagatccctgtattcaaaaacaaatgacagggttgttaagttgtactatattaaacaacttggtctggtttatatcattttaacaagttttttggaaatgtaaaagaaaaaagtaaagctccatttttgtgaattgcattgtttctaaaggaagtattttgagtattttcatctgtttgtattgtttcgactatgatatcagatatccagtgtgtccattctggcagtggttttgagttacttcatggaacttggacatacaccaccaggtcctttatgtgttgttctcctgggagacttctttttttaaatgccagggctacttctgctttacctcagtggtatcagcacattgtaaattacgttaaaacacacaactcactgtgatctatgggagtgatatcaaatacaaacgatgttgtgttccttctctcgaacaaaacagcaaagggaatgccagctaacttctttgattagaaggtaatgtcatggaatagaatgctgtcaccagaaaatgctctcccactgctagataaatgcagaggcaaagtgtagacatctgtaggaactaaatatcaaggaaatcaagacatttattttcaaagcgagaattctatctacattctattctgcggatgttatttctgttatacatctgaattttaaaatgtttactgatagataatggatttaaagggcggctaattgattgtctgccattgttgataaactgttctaattggtttgtgaaagaactctgagaattagctaaatggaggctagtgtatttatttttagaggtacatgttttaagtaaatgtatttaaaacaaattttcatggtctgaattgtatatgtaaatgcatatctgtgtaagtatatgcaagtgtatattcttctactgattcagtcagacacgaaatccaactgaattacccggtagactgaatatctgacgggatttctatatggacatagcacagatgaaccaaaaatgtatttatattcacctgagttttaatgtttttaaacaaagttttctcctgcagtgcttttctatatgaaatagttgagtcaagcttgggcttttttcttcgttgttcccaagtcatgtaatgtatagtgaatttatccaaaacgccattgtaacgttttttactagagtgtttttgcacatttgggcgctaaagggattaaaacaactgatgccacaatgactattgaaggagggaaaattctcaaggttccatagtatcttttacaaaatggattaaaaaaaaaatgcctatgcaacttcaaatagtctgatgcctgcttccccaggacgagtgactcttccacggtgtgctgctttccctccgagcctgtggaaaggcagagcccttttgcagatacgaaagcaagcttttgccaatgatctttaatggagttaaaatgtttatggtaattgtaacctttcaaatgagttacgtgaaaagagcatctcacttttaatacacccagatattttcttcaagtctttgtgcattttagcaggacttaattttcttaatttattctttcctttcaattatagtgacatagagtagttggccttataagtagatcccatttagcccctgaacataataccatctgcagtattataaaagtcatttagaaggtcagggggataatctagaggcaggattttggacattgtgaaggaaatgtgctccttctcagctcacttcaataactattttctgagactgaagttttttagacaagaataagaaaactttgctttcttcagttatcacatgtgaaagcttttgctttttgttaggaaaaggtgtggatgactctactgcgtggatggttacatttgctttccgtgaaatgctcagaaaatgtcaggacattccttttccaattgtgtgtcagtgcgtattgtaataaaactactgatttaaatta

SEQ ID NO: 177983 - DNA, 1374 bp, Homo sapiens
  Payload ID: 14912
  Gene Symbol: RNGTT
  Gene Name: RNA guanylyltransferase and 5'-phosphatase
  Uniprot ID: O60942
  ENST ID: ENST00000538899
  CDS Start-End: 1-1374
atggctcacaacaagatcccgccgcggtggctgaactgtccccggcgcggccagccggtggcaggaagattcttacctctgaagacaatgttaggaccaagatatgatagtcaagttgctgaagaaaatcggttccatcccagcatgctctcaaattacctaaagagcctaaaggttaaaatgggcttgttggtggacctgacaaatacttcaaggttctatgaccgaaatgacatagaaaaagaaggaatcaaatatataaaacttcagtgtaaaggacatggtgagtgccctaccactgagaatactgagacctttattcgtctgtgtgagcggtttaatgaaagaaatccacctgaacttataggtgttcattgtactcatggcttcaatcgcactggtttcctcatatgtgcctttttggtggagaaaatggattggagtatcgaagcagcagttgctacttttgcccaagccagaccaccaggaatctacaagggtgattatttgaaggaactttttcgtcggtatggtgacatagaggaagcaccacccccacctctattgccagattggtgttttgaggatgatgaagacgaagatgaggatgaggatggaaagaaggaatcagaacccgggtcaagtgcttcttttggcaaaaggagaaaagaacggttaaaactgggcgctattttcttggaaggtgttactgttaaaggtgtaactcaagtaacaacacaaccaaagttaggagaggtacagcagaagtgtcatcaattctgtggctgggaagggtctggattccctggagcacagcctgtttccatggacaagcaaaatattaaacttttagacctgaagccatacaaagtaagctggaaagcagatggtactcggtacatgatgttgattgatggcacaaatgaagtttttatgattgatagagacaattcagtatttcatgtttcaaatctggaatttccatttcgtaaagatcttcgtatgcatttatcaaatactctcttggatggcgagatgattattgacagagtaaatggacaggctgttcctagatatttgatatatgacataattaaattcaattcacagcccgttggagattgtgattttaatgttcgtctgcagtgtatagaacgagaaattataagtcctcgacacgaaaaaatgaagactgggctcattgacaaaacacaggaaccatttagcgtcagaaataagccgttttttgacatctgtacttcaagaaagaaatacaaacctggtcgatgtgatgatattttgaaatggaagcctcccagtctgaattctgtggattttcgtctaaaaataacaagaatgggaggagaagggtaa

SEQ ID NO: 177984 - DNA, 1809 bp, Homo sapiens
  Payload ID: 14913
  Gene Symbol: RNMTL1
  Gene Name: RNA methyltransferase like 1
  Uniprot ID: Q9HC36
  ENST ID: ENST00000304478
  CDS Start-End: 107-1369
gccgtcacgcgcaccgtacagcccagtccacgaagggcgccacgggccgtgacgtcactagccgccgacggcgcgctttcgtgacgcagcccgggtctcagggaacatggcggcgctggtgagacccgcgaggtttgtcgtgcgaccgttgctgcaggtggtccaggcttgggaccttgacgcgaggcgctgggtccgggcgctgcggcggagcccagtgaaagtggtgtttccttccggagaggtggtggaacagaagcgcgctcctgggaagcagccccgcaaggcaccatctgaggccagtgcccaggagcaacgagagaaacaaccgctcgaggagtccgcatcccgcgctcccagcacctgggaagagtctgggcttcgctacgataaagcttatcccggggacaggaggctgagcagtgtaatgacaatagtaaagtccaggccatttcgggaaaaacaagggaagatcctgctggaaggtcgcaggctcatttcagacgctctcaaggctggagctgtgccaaaaatgttcttctttagccgtctagaatacctaaaggagttgccagtcgataagctgaaaggtgtcagcctcattaaggtgaaatttgaggatatcaaggattggtccgacctcgtaacgccacaaggaataatggggatttttgccaagcctgaccatgttaagatgacatatccaaagactcagcttcagcattcactgcctttattattgatttgtgacaatctccgtgaccctgggaacctggggacaattctgagatctgcagctggggcaggctgcagcaaagtgttactcaccaaaggctgtgtggatgcctgggagcccaaagtgctccgggcgggtatgggcgcacatttccggatgcccattatcaataatctggaatgggaaaccgtgcccaattacctgccccctgacactcgggtctatgtggctgacaactgtggcctttatgcccaggctgagatgtctaataaagctagtgaccatggctgggtgtgtgatcaacgagtgatgaagtttcacaagtatgaggaagaggaagatgtagaaaccggagccagtcaagattggctgcctcatgttgaggttcagagttacgactcggactggacagaggcgccggcagctgtggtgattggcggggagacctacggcgtgagcctggagtccctgcagctggccgagagcactggtggcaagaggctgctgatccccgttgtgcctggtgtggacagcctcaactcggccatggcggcaagcatcctgcttttcgaagggaaaagacagctgcgggggagggcggaggacttgagcagggacaggagttaccactgaggacgcagaagtgacttctgcttgaggacgtctgcagctcctcctacaccagcacactggtgggaggctggcggagtcagtgactatggcccccacgttcaggaggaaggtgtgatgccgtcatacagttacaggaaaaataagaacttcctcagaaagaacaggtccgaattcttcctgtcgcgtcactgattttgaggttcttttttctcttggtgacaataggtgacccacgtggctctgtgtgtttttaaaaattgtccaccaagaagcactttgtgcccagaaagttcctgaagcatcatcctggcagggaggcgcctgctccaccagctggtgggtgtttgtaatcgccaagcaccagctataggtcacagccacatcactcacagctgatcactggttggtggaaaataaactatgagcagcagattacgtta

SEQ ID NO: 177985 - DNA, 727 bp, Homo sapiens
  Payload ID: 14913
  Gene Symbol: RNMTL1
  Gene Name: RNA methyltransferase like 1
  ENST ID: ENST00000574509
  CDS Start-End: 13-345
gtctcagggaacatggcggcgctggtgagacccgcgaggtttgtcgtgcgaccgttgctgcaggtggtccaggcttgggaccttgacgcgaggcgctgggtccgggcgctgcggcggagcccagtgaaagtggtgtttccttccggagaggtggtggaacagaagcgcgctcctgggaagcagccccgcaaggcaccatctgaggccagtgcccaggagcaacgagagaaacaaccgctcgaggagtccgcatcccgcgctcccagcacctgggaagagtctgggcttcgctacgataaagcttatcccggggacaggaggctgagggatttttgccaagcctgaccatgttaagatgacatatccaaagactcagcttcagcattcactgcctttattattgatttgtgacaatctccgtgaccctgggaacctggggacaattctgagatctgcagctggggcaggctgcagcaaagtgttactcaccaaaggctgtgtggatgcctgggagcccaaagtgctccgggcgggtatgggcgcacatttccggatgcccattatcaataatctggaatgggaaaccgtgcccaattacctgccccctgacactcgggtctatgtggctgacaactgtggcctttatgcccaggctgagatgtctaataaagctagtgaccatggctgggtgtgtgatcaacgagtgatgaagtttcacaagtatgag

SEQ ID NO: 177986 - DNA, 572 bp, Homo sapiens
  Payload ID: 14913
  Gene Symbol: RNMTL1
  Gene Name: RNA methyltransferase like 1
  ENST ID: ENST00000571157
  CDS Start-End: 1-532
accgctcgaggagtccgcatcccgcgctcccagcacctgggaagagtctgggcttcgctacgataaagcttatcccggggacaggaggctgagcagtgtaatgacaatagtaaagtccaggccatttcgggaaaaacaagggaagatcctgctggaaggtcgcaggctcatttcagacgctctcaaggctggagctgtgccaaaaatgttcttctttagccgtctagaatacctaaaggagttgccagtcgataagctgaaaggtgtcagcctcattaaggtgaaatttgaggatatcaaggattggtccgacctcgtaacgccacaaggaataatggggatttttgccaagcctgaccatgttaagatgacatatccaaagactcagcttcagcattcactgcctttattattgatttgtgacaatctccgtgaccctgggaacctggggacaattctgagatctgcagctggggcaggctgcagcaaagtgttactcaccaaaggtaaggacatcaaaggccaggcatagtggctcacactcgtaatccagccctttgggaggccgaggc

SEQ ID NO: 177987 - DNA, 4665 bp, Homo sapiens
  Payload ID: 14914
  Gene Symbol: RPAP1
  Gene Name: RNA polymerase II associated protein 1
  Uniprot ID: Q9BWH6
  ENST ID: ENST00000304330
  CDS Start-End: 118-4299
ctgcggggcaagatggcggcgcccagacaggcctggagcacggatgaataagagggaacccccacacggagacactgctggagagagtcgtactggggaggcagctggagcagcaagatgctgtcgagaccgaagccaggggagtccgaggtggacctgctgcacttccagagtcagtttctcgcagctggtgcagccccagcagtgcagttggtgaagaaaggaaataggggcggtggtgatgccaactcagaccggcctccgctccaggaccatcgggatgtggtgatgttggacaatctcccagatttgcccccagctttggtcccttctcctccaaagagagccaggcccagccctggccactgcctgcctgaggatgaggacccagaagagaggctgaggaggcatgatcagcacatcactgctgtcttgactaagattattgaacgagatacaagttcagtggccgtgaatctgcctgtgcccagtggtgttgctttccctgctgtgttccttcgctcgcgggacacacaggggaaatcagcaacatctggtaagagaagcatctttgcccaggaaattgcggcaaggaggatagctgaagccaagggcccatcagttggggaagttgtgcccaacgtgggcccaccagagggtgccgtgacctgtgagacacccactcctaggaaccagggctgccagcttcctgggagcagccacagctttcagggacccaatctggtcacagggaaggggctcagggatcaagaagctgagcaggaagcccagactatccatgaagagaacatagcaagactgcaggccatggctcctgaggagatcctgcaggaacagcagcggttgctggcccagcttgaccccagcttggttgctttcttgagatctcacagccacacgcaagagcaaacaggagagacagcctctgaggagcagaggccaggaggaccctctgctaatgtcaccaaggaggaacccctcatgtcagcttttgccagtgagcccaggaagagagacaagctggagccagaagccccagctctggcattgcccgtgacccctcagaaagaatggctgcacatggacactgtcgagctggagaagctccactggacccaggacttgccccctgtccggcggcagcagacacaggagaggatgcaggctcgattcagtcttcagggagaactactggcccctgacgtggacctgcccacccacctgggtctgcaccaccatggagaggaggcagagagagcggggtattccctacaggagctgttccacctgacccgcagccaggtttcccagcagagagcactggcactgcatgtgttagcccaggtcatcagcagggcccaggctggtgagtttggggaccggctagcaggcagtgtcttaagcctccttttggatgctggtttcctcttcctactgcgcttctccttggatgacagagtggatggggtcattgcaaccgccatccgtgctcttcgggctctgctggtggctcctggagatgaggagctcctcgacagcaccttctcttggtaccatggagctttgacgttccctctgatgcccagccaggaggacaaggaggatgaggacgaggatgaagaatgcccagcaggaaaagcaaaaaggaaaagccctgaagaagaaagccggcctccacctgacctggcccgacatgatgtcatcaaggggctcctggctaccagcctgctgcctcggctgcgctacgtgctggaggtgacatacccaggacctgcggtggtccttgacatcctggctgtgctcatccgcctggcccggcattccctggaatcagccacaagggtcctggagtgccctcggctgatagagactatagttcgagagttcttgcccaccagttggtctcctgtgggggcagggcctacccctagtctatacaaagtaccctgtgctactgccatgaaactacttcgtgtcctggcctcagctgggaggaatattgctgcccggctgttgagcagctttgatctccggagccgcctgtgccgcatcatagctgaggctccccaagaactggccttgcccccagaggaagctgagatgctgagcaccgaggccctccgtctgtgggctgtggctgcctcctatggccagggcggttacctttacagggagctctacccagtgctgatgcgggccttgcaggtggtgccgcgggagctcagcacccacccacctcaacccctgtccatgcagcggatagcctcactgctcactctcctcacccagctaaccctggcagccggcagtacccctgctgaaaccatcagtgattctgctgaggccagcctctcggccaccccttccttagtcacttggacacaggtgtctgggctccagcctcttgttgagccgtgtctaaggcagaccttgaagttgctgtccagacctgagatgtggagagccgtgggcccagtgcccgttgcctgcctgttgttcctgggagcctactaccaggcctggagccagcaaccaagctcatgcccggaggattggctccaggacatgcagcgcctgtcagaggagctgctgctgccactgctgagtcagcccacactgggcagcctgtgggattcccttaggcactgctcccttctctgcaacccgctgtcctgtgtgccagcccttgaagctccccccagcctcgtgtcactgggctgctcgggaggctgcccccgtctcagtctggctggctcagcctcacccttcccattcctcactgccctcctctctcttcttaataccctggcccagatccacaaggggctgtgtggccagctggctgccatattggctgccccgggactccagaattacttcctccagtgtgtggctcctggggctgccccacacctcacacctttctctgcatgggccctgcgccatgagtaccacctgcagtacctggcactcgctctggcccagaaagcggcagcgctgcagccactgccagccacccatgctgccctctatcatggtatggccttggccctgctgagccggctgctgcccggaagtgagtacctcacccatgagctgctgctgagctgtgtattccggctggagttcctcccggaaagaacatcagggggtccagaggcagccgacttctctgaccagctgtcgttaggaagcagcagggtccctcggtgtgggcaagggactctgctggctcaggcctgccaggacctccccagcatccgcaactgctacctgactcattgctcgccagcccgagccagtctgctggcctcccaggctctgcaccgaggggagctacagcgagtcccaaccctgctactgcccatgcctacggagccgctgctgcccaccgactggcccttcctgccactgattcgcctctaccaccgggcttcagacaccccctcgggactctctcccacagacaccatgggcacagccatgcgggtcctgcagtgggtgctagttttggagagctggcgcccccaggctctctgggctgtgccccctgctgcccgcctggcacggctcatgtgtgtgttcctggtggacagtgagctgttccgggagtccccagtacagcatctggtggcagccctcctcgcccagctctgtcagcctcaagtcttgccaaacctcaacctggactgccgactccctggcctgacgtctttccctgacctctatgccaacttcctggatcattttgaggctgtctcttttggggaccacctctttggggccctggtcctcctgcccctgcagcgtcggttcagtgtcaccttgcgccttgccctctttggggaacacgtgggagccttgcgagctctgagcctgcctctgacccagttgcctgtgtccctggagtgttacacagtgcctcctgaagacaacctggccctccttcagctctacttccggaccctggttactggtgcgctccgcccacgttggtgccccgtgctctatgctgtggctgtggctcatgtcaatagcttcatcttctctcaggacccacagagctcagatgaggtcaaagctgcccgcaggagtatgctgcagaaaacatggctgctggcagatgagggtctccggcagcacctcctgcactataagcttcccaattccacgctcccagagggctttgagctctattctcagttgccccctctgcgtcagcactacctccagagactgacttcaacagtgctccaaaatggggtatcagagacctaggatagttgatatagatggaaagatgggtacgttgtcctgtatccagcctttcaacagatgtctggccagacgaagaacattgtgtcctaatggtaggcaggagaccaaggagcagaaggcttgccttcctgggagcaggttgtttgagctgttttagagcagtgagccctaccattacatcctgatatctggggcttctgaaggtctgtactgggagtgaagagtggcttagctatttacccgctctttggggacagggcaaactaaatgcatcccttcttacctaactcccaacccctgccctgggctgaggcatatgaatgctatagttgtgcattaaaataaatgttttttatctcctggaaa

SEQ ID NO: 177988 - DNA, 5897 bp, Homo sapiens
  Payload ID: 14914
  Gene Symbol: RPAP1
  Gene Name: RNA polymerase II associated protein 1
  Uniprot ID: Q9BWH6
  ENST ID: ENST00000562303
  CDS Start-End: 104-4051
ggcggcgcccagacaggcctggagcacggatgaataagagggaacccccacacggagacactgctggagagagtcgtactggggaggcagctggagcagcaagatgctgtcgagaccgaagccaggggagtccgaggtggacctgctgcacttccagagtcagtttctcgcagctggtgcagccccagcagtgcagttggtgaagaaaggaaataggggcggtggtgatgccaactcagaccggcctccgctccaggaccatcgggatgtggtgatgttggacaatctcccagatttgcccccagctttggtcccttctcctccaaagagagccaggcccagccctggccactgcctgcctgaggatgaggacccagaagagaggctgaggaggcatgatcagcacatcactgctgtcttgactaagattattgaacgagatacaagttcagtggccgtgaatctgcctgtgcccagtggtgttgctttccctgctgtgttccttcgctcgcgggacacacaggggaaatcagcaacatctggtaagagaagcatctttgcccaggaaattgcggcaaggaggatagctgaagccaagggcccatcagttggggaagttgtgcccaacgtgggcccaccagagggtgccgtgacctgtgagacacccactcctaggaaccagggctgccagcttcctgggagcagccacagctttcagggacccaatctggtcacagggaaggggctcagggatcaagaagctgagcaggaagcccagactatccatgaagagaacatagcaagactgcaggccatggctcctgaggagatcctgcaggaacagcagcggttgctggcccagcttgaccccagcttggttgctttcttgagatctcacagccacacgcaagagcaaacaggagagacagcctctgaggagcagaggccaggaggaccctctgctaatgtcaccaaggaggaacccctcatgtcagcttttgccagtgagcccaggaagagagacaagctggagccagaagccccagctctggcattgcccgtgacccctcagaaagaatggctgcacatggacactgtcgagctggagaagctccactggacccaggacttgccccctgtccggcggcagcagacacaggagaggatgcaggctcgattcagtcttcagggagaactactggcccctgacgtggacctgcccacccacctgggtctgcaccaccatggagaggaggcagagagagcggggtattccctacaggagctgttccacctgacccgcagccaggtttcccagcagagagcactggcactgcatgtgttagcccaggtcatcagcagggcccaggctggtgagtttggggaccggctagcaggcagtgtcttaagcctccttttggatgctggtttcctcttcctactgcgcttctccttggatgacagagtggatggggtcattgcaaccgccatccgtgctcttcgggctctgctggtggctcctggagatgaggagctcctcgacagcaccttctcttggtaccatggagctttgacgttccctctgatgcccagccaggaggacaaggaggatgaggacgaggatgaagaatgcccagcaggaaaagcaaaaaggaaaagccctgaagaagaaagccggcctccacctgacctggcccgacatgatgtcatcaaggggctcctggctaccagcctgctgcctcggctgcgctacgtgctggaggtgacatacccaggacctgcggtggtccttgacatcctggctgtgctcatccgcctggcccggcattccctggaatcagccacaagggtcctggagtgccctcggctgatagagactatagttcgagagttcttgcccaccagttggtctcctgtgggggcagggcctacccctagtctatacaaagtaccctgtgctactgccatgaaactacttcgtgtcctggcctcagctgggaggaatattgctgcccggctgttgagcagctttgatctccggagccgcctgtgccgcatcatagctgaggctccccaagaactggccttgcccccagaggaagctgagatgctgagcaccgaggccctccgtctgtgggctgtggctgcctcctatggccagggcggttacctttacagggagctctacccagtgctgatgcgggccttgcaggtggtgccgcgggagctcagcacccacccacctcaacccctgtccatgcagcggatagcctcactgctcactctcctcacccagctaaccctggcagccggcagtacccctgctgaaaccatcagtgattctgctgaggccagcctctcggccaccccttccttagtcacttggacacaggtgtctgggctccagcctcttgttgagccgtgtctaaggcagaccttgaagttgctgtccagacctgagatgtggagagccgtgggcccagtgcccgttgcctgcctgttgttcctgggagcctactaccaggcctggagccagcaaccaagctcatgcccggaggattggctccaggacatgcagcgcctgtcagaggagctgctgctgccactgctgagtcagcccacactgggcagcctgtgggattcccttaggcactgctcccttctctgcaacccgctgtcctgtgtgccagcccttgaagctccccccagcctcgtgtcactgggctgctcgggaggctgcccccgtctcagtctggctggctcagcctcacccttcccattcctcactgccctcctctctcttcttaataccctggcccagatccacaaggggctgtgtggccagctggctgccatattggctgccccgggactccagaattacttcctccagtgtgtggctcctggggctgccccacacctcacacctttctctgcatgggccctgcgccatgagtaccacctgcagtacctggcactcgctctggcccagaaagcggcagcgctgcagccactgccagccacccatgctgccctctatcatggtatggccttggccctgctgagccggctgctgcccggaagtgagtacctcacccatgagctgctgctgagctgtgtattccggctggagttcctcccggaaagaacatcagggggtccagaggcagccgacttctctgaccagctgtcgttaggaagcagcagggtccctcggtgtgggcaagggactctgctggctcaggcctgccaggacctccccagcatccgcaactgctacctgactcattgctcgccagcccgagccagtctgctggcctcccaggctctgcaccgaggggagctacagcgagtcccaaccctgctactgcccatgcctacggagccgctgctgcccaccgactggcccttcctgccactgattcgcctctaccaccgggcttcagacaccccctcgggactctctcccacagacaccatgggcacagccatgcgggtcctgcagtgggtgctagttttggagagctggcgcccccaggctctctgggctgtgccccctgctgcccgcctggcacggctcatgtgtgtgttcctggtggacagtgagctgttccgggagtccccagtacagcatctggtggcagccctcctcgcccagctctgtcagcctcaagtcttgccaaacctcaacctggactgccgactccctggcctgacgtctttccctgacctctatgccaacttcctggatcattttgaggctgtctcttttggggaccacctctttggggccctggtcctcctgcccctgcagcgtcggttcagtgtcaccttgcgccttgccctctttggggaacacgtgggagccttgcgagctctgagcctgcctctgacccaggtactttctcagcccagcaggacctgcaagggtaccctgcactgggcctcgggggcagtcctgagccttgaggagctttggaagacctcagcttcctcatcttacctcttgggggctttgaggggattaagagaatcaatgaaaagggcttaacatgggctgggtgtggtggctcacgcctgtaattccatcactctgggaagctgaggtgggtggatcacttaaggtcaggagtttgagaccagcctgggcaacatagtgaaaccccatttctactaaaaatacaaaacttagctgggcgtggttgcgggtgcctgtagtcccagctactcaggaggctgaggcaggagaatcgcttgaacccgggaagcggaggctacagtgagccgagatcgcgccactgcaccccagcccagtgacagagcaagaccctgtctcaaaaaagaaaaaaggaaagggtttaacctggtgtctggcatatagtgggtattcattactattaataaggcatagctccttgcttatcagtgctacaatctagataagaagagatttactgaaaacctacatagttgtgaattattcagatgctaggtggtatcaggattcagagaagggaaagatcaaattgggctttgtggaagaagtggggattgacccaggcactgtaggttgggtagaatttgaattggtgaggaggtagaaaggcaggagattcctaacagaataacataagcaaaaggagcatgacaaagggcagaaggagggaggagagatttctgttgggaacttaaggctggtcttgaattcctaatttcgtgtgatccgcctgcctcagcctcccaagtgctgagattacaggcgtggcccactacacatggccaatttcatgctttttaatggctgcttctcagttcccagttttccccaacatctgctctgtagtctttaaccctgatccttgtgctagaaggacagatgtttgtctaggacctgatctctgccctcatgatttggtttcatgtgatcgttatccacacaccttatgtatgtatatacattcctaccctccccctcagcacgtcatttcccctgtcacagttgcctgtgtccctggagtgttacacagtgcctcctgaagacaacctggccctccttcagctctacttccggaccctggttactggtgcgctccgcccacgttggtgccccgtgctctatgctgtggctgtggctcatgtcaatagcttcatcttctctcaggacccacagagctcagtaagttacatctccatcttcagaggaaggaagggagctagcaattgagctgcctctgggccagctggggaagaggtaagtgtcaagcaaggccagtggtgggtaccagccctcggctcagtgccacctctccctgttctgcttctaggatgaggtcaaagctgcccgcaggagtatgctgcagaaaacatggctgctggcagatgagggtctccggcagcacctcctgcactataagcttcccaattccacgctcccagagggctttgagctctattctcagttgccccctctgcgtcagcactacctccagagactgacttcaacagtgctccaaaatggggtatcagagacctaggatagttgatatagatggaaagatgggtacgttgtcctgtatccagcctttcaacagatgtctggccagacgaagaacattgtgtcctaatggtaggcaggagaccaaggagcagaaggcttgccttcctgggagcaggttgtttgagctgttttagagcagtgagccctaccattacatcctgatatctggggcttctgaaggtctgtactgggagtgaagagtggcttagctatttacccgctctttggggacagggcaaactaaatgcatcccttcttacctaactcccaacccctgccctgggctgaggcatatgaatgctatagttgtgcattaaaataaatgttttttatctcctgg

SEQ ID NO: 177989 - DNA, 955 bp, Homo sapiens
  Payload ID: 14914
  Gene Symbol: RPAP1
  Gene Name: RNA polymerase II associated protein 1
  ENST ID: ENST00000567866
  CDS Start-End: 415-955
aagatggcggcgcccagacaggcctggagcacgtaggtggcggggctggagggacggatttcaggtgatctgggaggaggacccagggtagcgtgtccagtttctttgctggaacctgcctgcgggcctttggtctgtaagggagcaactgtggcctcctctgtgcatagatctcgggcacggcccttcaacgggcggcgaaagctgcgactcgatgattcctcattgtagagttgggtggtccaggaggcttaactggagcccttgacctgagcggtaagggcagtcacgcgtcccgactcgggattggatcctggctctggaggataggctgcaatggatgaataagagggaacccccacacggagacactgctggagagagtcgtactggggaggcagctggagcagcaagatgctgtcgagaccgaagccaggggagtccgaggtggacctgctgcacttccagagtcagtttctcgcagctggtgcagccccagcagtgcagttggtgaagaaaggaaataggggcggtggtgatgccaactcagaccggcctccgctccaggaccatcgggatgtggtgatgttggacaatctcccagatttgcccccagctttggtcccttctcctccaaagagagccaggcccagccctggccactgcctgcctgaggatgaggacccagaagagaggctgaggaggcatgatcagcacatcactgctgtcttgactaagattattgaacgagatacaagttcagtggccgtgaatctgcctgtgcccagtggtgttgctttccctgctgtgttccttcgctcgcgggacacacaggggaaatcagcaacatctggtaagagaagcatctttgcccaggaaattgcggcaaggaggatagctgaagccaagggcccatcagttggggaagttgtgcccaacgtgggcccaccagagg

SEQ ID NO: 177990 - DNA, 545 bp, Homo sapiens
  Payload ID: 14914
  Gene Symbol: RPAP1
  Gene Name: RNA polymerase II associated protein 1
  ENST ID: ENST00000566863
  CDS Start-End: 160-545
aacgcgatctctgcggggcaagatggcggcgcccagacaggcctggagcacgtaggtggcggggctggagggacggatttcagggatgaataagagggaacccccacacggagacactgctggagagagtcgtactggggaggcagctggagcagcaagatgctgtcgagaccgaagccaggggagtccgaggtggacctgctgcacttccagagtcagtttctcgcagctggtgcagccccagcagtgcagttggtgaagaaaggaaataggggcggtggtgatgccaactcagaccggcctccgctccaggaccatcgggatgtggtgatgttggacaatctcccagatttgcccccagctttggtcccttctcctccaaagagagccaggcccagccctggccactgcctgcctgaggatgaggacccagaagagaggctgaggaggcatgatcagcacatcactgctgtcttgactaagattattgaacgagatacaagttcagtggccgtgaatctgcctgtgcccagtggtgttgcttt

SEQ ID NO: 177991 - DNA, 3906 bp, Homo sapiens
  Payload ID: 14914
  Gene Symbol: RPAP1
  Gene Name: RNA polymerase II associated protein 1
  ENST ID: ENST00000561603
  CDS Start-End: 116-3502
gcggggcaagatggcggcgcccagacaggcctggagcacggatgaataagagggaacccccacacggagacactgctggagagagtcgtactggggaggcagctggagcagcaagatgctgtcgagaccgaagccaggggagtccgaggtggacctgctgcacttccagagtcagtttctcgcagctggtgcagccccagcagtgcagttggtgaagaaaggaaataggggcggtggtgatgccaactcagaccggcctccgctccaggaccatcgggatgtggtgatgttggacaatctcccagatttgcccccagctttggtcccttctcctccaaagagagccaggcccagccctggccactgcctgcctgaggatgaggacccagaagagaggctgaggaggcatgatcagcacatcactgctgtcttgactaagattattgaacgagatacaagttcagtggccgtgaatctgcctgtgcccagtggtgttgctttccctgctgtgttccttcgctcgcgggacacacaggggaaatcagcaacatctggtaagagaagcatctttgcccaggaaattgcggcaaggaggatagctgaagccaagggcccatcagttggggaagttgtgcccaacgtgggcccaccagagggtgccgtgacctgtgagacacccactcctaggaaccagggctgccagcttcctgggagcagccacagctttcagggacccaatctggtcacagggaaggggctcagggatcaagaagctgagcaggaagcccagactatccatgaagagaacatagcaagactgcaggccatggctcctgaggagatcctgcaggaacagcagcggttgctggcccagcttgaccccagcttggttgctttcttgagatctcacagccacacgcaagagcaaacaggagagacagcctctgaggagcagaggccaggaggaccctctgctaatgtcaccaaggaggaacccctcatgtcagcttttgccagtgagcccaggaagagagacaagctggagccagaagccccagctctggcattgcccgtgacccctcagaaagaatggctgcacatggacactgtcgagctggagaagctccactggacccaggacttgccccctgtccggcggcagcagacacaggagaggatgcaggctcgattcagtcttcagggagaactactggcccctgacgtggacctgcccacccacctgggtctgcaccaccatggagaggaggcagagagagcggggtattccctacaggagctgttccacctgacccgcagccaggtttcccagcagagagcactggcactgcatgtgttagcccaggtcatcagcagggcccaggctggtgagtttggggaccggctagcaggcagtgtcttaagcctccttttggatgctggtttcctcttcctactgcgcttctccttggatgacagagtggatggggtcattgcaaccgccatccgtgctcttcgggctctgctggtggctcctggagatgaggagctcctcgacagcaccttctcttggtaccatggagctttgacgttccctctgatgcccagccaggaggacaaggaggatgaggacgaggatgaagaatgcccagcaggaaaagcaaaaaggaaaagccctgaagaagaaagccggcctccacctgacctggcccgacatgatgtcatcaaggggctcctggctaccagcctgctgcctcggctgcgctacgtgctggaggtgacatacccaggacctgcggtggtccttgacatcctggctgtgctcatccgcctggcccggcattccctggaatcagccacaagggtcctggagtgccctcggctgatagagactatagttcgagagttcttgcccaccagttggtctcctgtgggggcagggcctacccctagtctatacaaagtaccctgtgctactgccatgaaactacttcgtgtcctggcctcagctgggaggaatattgctgcccggctgttgagcagctttgatctccggagccgcctgtgccgcatcatagctgaggctccccaagaactggccttgcccccagaggaagctgagatgctgagcaccgaggccctccgtctgtgggctgtggctgcctcctatggccagggcggttacctttacagggagctctacccagtgctgatgcgggccttgcaggtggtgccgcgggagctcagcacccacccacctcaacccctgtccatgcagcggatagcctcactgctcactctcctcacccagctaaccctggcagccggcagtacccctgctgaaaccatcagtgattctgctgaggccagcctctcggccaccccttccttagtcacttggacacaggtgtctgggctccagcctcttgttgagccgtgtctaaggcagaccttgaagttgctgtccagacctgagatgtggagagccgtgggcccagtgcccgttgcctgcctgttgttcctgggagcctactaccaggcctggagccagcaaccaagctcatgcccggaggattggctccaggacatgcagcgcctgtcagaggagctgctgctgccactgctgagtcagcccacactgggcagcctgtgggattcccttaggcactgctcccttctctgcaacccgctgtcctgtgtgccagcccttgaagctccccccagcctcgtgtcactgggctgctcgggaggctgcccccgtctcagtctggctggctcagcctcacccttcccattcctcactgccctcctctctcttcttaataccctggcccagatccacaaggggctgtgtggccagctggctgccatattggctgccccgggactccagaattacttcctccagtgtgtggctcctggggctgccccacacctcacacctttctctgcatgggccctgcgccatgagtaccacctgcagtacctggcactcgctctggcccagaaagcggcagcgctgcagccactgccagccacccatgctgccctctatcatggtatggccttggccctgctgagccggctgctgcccggaagtgagtacctcacccatgagctgctgctgagctgtgtattccggctggagttcctcccttgcctgtgtccctggagtgttacacagtgcctcctgaagacaacctggccctccttcagctctacttccggaccctggttactggtgcgctccgcccacgttggtgccccgtgctctatgctgtggctgtggctcatgtcaatagcttcatcttctctcaggacccacagagctcagatgaggtcaaagctgcccgcaggagtatgctgcagaaaacatggctgctggcagatgagggtctccggcagcacctcctgcactataagcttcccaattccacgctcccagagggctttgagctctattctcagttgccccctctgcgtcagcactacctccagagactgacttcaacagtgctccaaaatggggtatcagagacctaggatagttgatatagatggaaagatgggtacgttgtcctgtatccagcctttcaacagatgtctggccagacgaagaacattgtgtcctaatggtaggcaggagaccaaggagcagaaggcttgccttcctgggagcaggttgtttgagctgttttagagcagtgagccctaccattacatcctgatatctggggcttctgaaggtctgtactgggagtgaagagtggcttagctatttacccgctctttggggacagggcaaactaaatgcatcccttcttacctaactcccaacccctgccctgggctgaggcatatgaatgctatagttgtgcattaaaataaatgttttttatctcctggaaa

SEQ ID NO: 177992 - DNA, 601 bp, Homo sapiens
  Payload ID: 14914
  Gene Symbol: RPAP1
  Gene Name: RNA polymerase II associated protein 1
  ENST ID: ENST00000565035
  CDS Start-End: 1-601
agtaccctgtgctactgccatgaaactacttcgtgtcctggcctcagctgggaggaatattgctgcccggctgactgtgcccatttccagttgagcagctttgatctccggagccgcctgtgccgcatcatagctgaggctccccaagaactggccttgcccccagaggaagctgagatgctgagcaccgaggccctccgtctgtgggctgtggctgcctcctatggccagggcggttacctttacagggagctctacccagtgctgatgcgggccttgcaggtggtgccgcgggagctcagcacccacccacctcaacccctgtccatgcagcggatagcctcactgctcactctcctcacccagctaaccctggcagccggcagtacccctgctgaaaccatcagtgattctgctgaggccagcctctcggccaccccttccttagtcacttggacacaggtgtctgggctccagcctcttgttgagccgtgtctaaggcagaccttgaagttgctgtccagacctgagatgtggagagccgtgggcccagtgcccgttgcctgcctgttgttcctgggagcctactaccaggcctgga

SEQ ID NO: 177993 - DNA, 16993 bp, Homo sapiens
  Payload ID: 14915
  Gene Symbol: RPAP2
  Gene Name: RNA polymerase II associated protein 2
  Uniprot ID: Q8IXW5
  ENST ID: ENST00000610020
  CDS Start-End: 110-1948
ccggcgtcttagcccgctcttctggccccgccccgcgctacgcgtagggaggcggggcctcggggcgagacgccggagcgtgtccccgtccggcagactactctcccccatggcggacttcgctgggccgtcttctgccggccgcaaggccggggctccccgctgctctcgaaaagccgcaggtactaaacagacaagtactttgaaacaagaagatgcttctaaaaggaaagctgaactagaagcagctgtgagaaagaagattgaatttgagagaaaagctctacatattgttgaacagcttttagaggagaatattacagaagagttcctaatggagtgtgggaggttcattacacctgctcactacagtgatgtcgtggatgaacgttctattgtcaaactctgtggttatcctttatgtcagaagaagctgggaattgtaccaaaacagaaatataaaatttctaccaaaaccaataaagtctatgatattactgaaagaaagtctttttgcagcaatttttgttatcaagcatctaagttttttgaagcacaaattcccaaaactccagtatgggttcgagaagaagagaggcatcctgattttcaactgctaaaggaagaacaaagtggccattctggagaagaagtacagttatgcagtaaagccattaaaacatcagatatcgacaatcctagccactttgaaaagcaatatgaatctagttcttctagcactcacagtgatagtagcagtgacaatgagcaagactttgtttcctccattctaccaggaaacagaccaaattcaacaaatattagaccacagctgcaccaaaaaagcataatgaaaaagaaagctggtcacaaagctaactccaaacacaaagacaaagaacagacagtagtagatgtcactgagcagttaggcgattgcaaattagatagtcaggagaaagatgctacatgtgaacttcctttacagaaagtaaatactcagagttcttcaaatagcactttgcctgaaagattaaaagcgtcagaaaattctgaaagtgaatacagtaggtcagaaataactctagtaggcataagtaagaaaagtgcagagcattttaagagaaaatttgccaaatcaaaccaagtgtctaggtcagtgtctagttcagtgcaggtgtgtcctgaagttggaaagagaaacttacttaaagttttgaaggagactttgattgagtggaagacagaagaaacattgaggtttttgtatggccagaattatgcttctgtgtgtctgaaacccgaagcctctctggttaaagaagaacttgatgaagatgacataatctcagatccagatagtcatttccctgcctggagggaatctcagaacagcttggatgagtctttaccttttaggggctcaggtacagccattaaaccactgccaagttacgagaatttgaaaaaagaaactgaaaagttaaatctgaggatcagggagttttacagaggacggtatgttttgggtgaagaaaccaccaaatcacaagactcagaagagcatgattccacctttccactgatagactcaagttcccagaaccagattagaaaacgcatcgtacttgaaaagttgagtaaagtgttgcctgggcttctggttcctcttcagattacattgggagatatttacacacaacttaaaaatcttgttcgaactttcaggttaacaaatagaaatattatacacaaacctgcggaatggactttaattgctatggtgttgctgtcattactgaccccaattcttggcattcagaaacattctcaggaaggtatggtgtttacacggtttctagacaccctccttgaagaattacatctaaaaaatgaagaccttgaaagtctaaccatcatatttagaaccagctgtttaccagagtgatatattccatgaagacaaaatagaagatgaacttctattcaccgtttctggaattctagccgccatgatggtctggtggtgactgataactagttttattccaagacatacctttacctctttaagtttcaatctcccatctcccagtccttcagtccccaactgcagaggatgacctccccagatagaggagaatcattactccaacaagaataaccaagtctttgtatccctagtacaagacatagtatttttattcgaaaatgaatgtttaagtattaaattgaaacttgaatgaatattcaagaaaatataatgatctctactttttctggatgatttccagccatcatatcagtttgccaaaaaaattgagaaagttatgattttgacctcccaacctaaactctaaattctaaagatcagtaaacaattaggtcaataaatacatacaatttaagatgaagccctttggaagtctagtccaaaacaggaaaatctcagaactttctggactcaaggaaatgctttaaatggaatctgtagtttgtttgcaggagagacaatttctagaatttagattgcttttcaaaatgtttatcaggtaggcaagttagcagttgaggcggaacacagacaacttggggagctttactggaaggccaagaaaatactcttggacactggaggaaatgacagctactaaagcccaatcatggaaaaggaccagaaagcagcccactggaatggggagcttagtgggcaaggaggtagggatataatttctcttcttggctccaccagtaattagctctgtggcccagtcacctaaactttctggacttcagttcaggttgtatggcagtaggccatagaattggctactgccatacaatctctatgggaaaggactgcaaaaactaaattttatctctgtatgggcaaaggctactgtcatcctgttgttggtctggggccactctgacaattttttttaacctcatttgattgtgtaagggtctaaccacaacaaaaaatcatagtgtaatagaattaatcaagttcagcaaggtcacaggctagatcaatatacagaaaatcaattgtatttttctgttcagaaaactccaaaaatgaaataaagaaaattgtgttcacaatatcaccaaagagaattaaatacttaggaataaatttaacaaaataagtataagacttgtataacgaaaactataaaacattcaagagggctgggcatggtggctcatgcctttagttctagcactttggaggcagaggcaggaggactgcttgagcccaggagttcaagaccagcctgggcaacaaagtgagaccctgtctccacaaaaaataaaaataaaaataaattgaagatggccgaataggaacagctccagtctacagctcccagcaggatggacacagaagatgggtgatttctgcattttcaactaaagtacctggttcgtctcactgggactggctggacagtgggtgtagcccacagagggttagccgaagcaaggtggggcatcgcctcacctgggaagcgccaaggggtcgggggatttccctttcctagccaagggaagccgtgagtgactatacctggaggaggggtacactcctgcccaaatactgctcttttcccacagtcttcgcaactggcagaccacgaaatcccctcccatgcctggttcagtgggtcccacgcccacagagccttgctcactgctagcgccagcagtctgaaatcgacctgggacgtgggagcttggcggggtagaggtgtccgccattgctgaggcttgagtaggcggttctatgctcacagtgtaaacaaagcagcagggaagctcaaactgggcagagcccaccacagctcagcaaggcctactgtctctgtagattccacctccaggggcagggcatatctgaacaaaaggcagcagacagcttctccagacttaaacgtccctgcctgacagctctgaagagagcagtggttctcccagcaccgcgttcaagctccgataatagacagactgcctcctcaagtgggtccctgacccccgtgtagcctgactgggagacatctcccagtaggcgccgaaagacacctcagagaggtagatgccccactggaacgaagcttccacagtaaggatcaggcagcaatatttgctgttctgcagcctccactggtgacacccaggcaaacagggtctggagtggacctccagcaaactccaacagacctgcagctaaggggcctgtctattagaaggaaaactaacagaaaggaatagcatcaacatcaaaaaaaggacatctacaccaaaaccccatccataggacaccaacatcagagaccaaaggtaggtaaaaccacaaagatggggagaaaccagaccagaaaggctgaaaattccaaaaaccagaatgcctcttctcctccaaaggaacacaactccttgccagcaagggaacaaaactggacagagaatgagtttgacaagttgacagaagtaggcttcagaaggtcggtaataacaaacttctccaagctaaaggagcatgttctaatgcgtcgcaaggaagctaaaaatcttgaaaaaaggttagacaaatggctaactagaataaccagtgtagagaagagcttaaatgacctgatggagctgaaaaccacagtacgggaacttcgtgaagcatacacaagcttcaatagccaattcgatcaagtggaagaaaggatatcagtaactgaagatcaaattaatgaaataaagcgagaggacaagattagagaaaaaagagtgaaaagaaatgaacaaagcctccaagaaatatgagactatgtgaaaagaccaaatctatgtttgattggtgtacctgaaagtgatggggagaacagaaccaagtttgaaaacactcttcaggatattatccaggagagcttccccaacctagcaaggaaggccaacattcaaattcaggaaatacagagaacaccacaaagatactcctcaagaagagcaaccccaagacacataattgtcagattcaccaaggttgaaatgaaggaaaaactgttaagggcagccagagagaaaggtcaggttacccacaaagggaagcccatcagattaacagcggacctctgggcagaaaccctacaagccagaagagaatgggggccaatattcaacattcttaaagaaaagaattttcaacccagaatctcatatccagccaaactaagcttcttaagtgaaggagaaataaaatcctttacagacaagcaaatgctgagagattttgtcaccaccaggcctgccttacaagagctcctgaagtaagcactaaaatggacaggaacaaccagtaccagccactgcaaaaacatgccaaatggtaaagaccatcaacactatgaagaaactgcatcaattaatggatgaaataaccagctagcatcataatgacaggatcaaattcccacataacaatattaaccttaaatgtaaatgggataaatgccccaattaaaagacacagactggcaaattgaataaacagtcaagacccatcagtgagctatattcaggagacccatctcatgtgcaaagacacacataggctcagaataaaaggatgtaggaagatttaccaagcaaatggaaagcagaaaaaagcaggggttgcaatcctagtctctgataaaacagactttaaaccaacaaagatcaaaagagacaaagaaggtcattacataatggtaaagggatcaattcaacaagaacagctaactatcctaaatatatatgcacccaatacaggagcacccagattcataaagcaagttctacaaagagatttagactcccacacaatattaatgggtgactttaacaccccactgtcaatattagacagatcaacaagacagaaaattaacaaagatatccaggacttgaactcagctctggaccaagcagacctaatagacatcgacagaactctccaccccaaatcaacagaatatacattcttgtcagcaccacatcacacttattccaaaattgaccacataattggaagtaaagcactcttcagcaaatgcaaaagaacagaaatcacaacaaaccgtctcagaccacaatgcaatcaaattagaactcaggatcaagaatctcactcaactgcacaactgcatggaaactgaacaacctgttcctgaatgactactgggtaaataacgaaatgaaggcagaaataaagatgttctttggaaccaacgagaacaaagacacaatgtaccagaatctctaggacatgtttaaagcagtatgtagagggaaatttatagcactaaatgcccacaagtgaaagcaggagtgatctaaaatcaacaccctaacatcacaattaaaagaactagagaagcaagaccaaacaaattcaaaagctagcagaaggcaagaaataactaagatcagagcagaactgaaggagatagagactcaacaaacccttcaaaaaatcagtgaatccaggagctagttttttgaaaagatcaacaaaattgatagaccgttagcaaggctaaaaaagaagaaaagagagaagagtcaaatagatgcaataaaaaatgataaaggggatatcaccactgatcccacagaaatacaaactaccatcagcgaatactataaacacctctacacaaataaactagaaaatctagaagaaatggataaattcctcgacacatacaccctcccaagactaaaccaggaagaagttgaatctctgaataaaccagtaacaggttctgaaattgaggcaataattaatagcctaccaaccaaaaaaagtccaggaccagacggattcacagccaaattctacgaaaggtacaaagaggtgctggtaccattccttctgaaactattccaatcaatagaagaaaagggaatcctccctaactcattttatgaggctaacatcatcctgataccaaagcctggcagagacacaacaaaaaaagagaattttaggccaatatccctgatgaacatcgatgcgaaaatcctcaataaaatactggcaaaccgaatccagcagcatatcaaaaagcttatccaccacgatcaagtcagcttcttccctgggatgcaaggctggttcaacatatgcaaatcaataaacataatccatcacataaacagaaccaacggcaaaaaccacatgattatctcaatagatacaaaaaaggccttcaacaaaattcaacagcctttcatgctaaaaaccctcaataaactaggtattgatggaatgtatctcaatataataagaggttatttatgacaaacccacagccaatagcatactgaatgggcaaaagctggaagcatttcctttgaagaccagcacaaggcaaggatgccctctctcaccactcctattcaacatagtattggaagttctggccagggcaatcaggcaagagaaagcaataaagcatattcaaataggaagagaggaagtcaaattgtctctgtttgcagatgacatgattgtatatttagaaaaccccatcgtctcatcccaaaatctccttaagctgataagcaacttcagcaaagtctcaggatacaaaatcggtgtgcaaaaatcacaagcattcctatataccaataatagacaaagagccaaatcatgagtgaactcccattcacaattgctactaagaaaataaaatacaaagcactgctcaaggaaataagagaggacacaaacaaatggaaaaacattccatgctcatggataggaagaatcaatatcatgacaatggccttgttgcccaaactgatttatagattcaatgctatccccatcaagctaccactaactttcttcacagaattggaaaaaactactttaagattcatatggaaccaaaaaagagcccacctagccaagacaatcctgggcaagaagaacaaagctggaggcatcacactacctgacttcaaactttactacaagcctacagtaaccaaaacagcatggcactggtacaaaaacagatatgcagacgaatggaacagaatggaggcctcagaaataacaccacacgtctaccaccatctgatctttgacaaacctgacacacacaagcaatggggaaaagattccctatttaataaatggtgttgggaaaacgggctagccatatgcagaaaactgtaactggaccctttccttacaccttatacaaaaatcaactcaagatggaacaaagacttaaacgtaagacctaggaccataaaaatcctagaagaaaacctgggcaataccattcaggacataggcatgggcaaagacttcatgtctaaaacaccaaaagcaatggcaacaaaagccaaaattgacaaatgggttctaattaaagagcttctgcacagcaaaataaactatcatcagagtgaacaggcaacctacagaatgggagaacatttttgcaatatatccatctgacaaagggctaatatccagaatctacaaagaacttaaacaaatttacaagaaaaaagcaaacaaccccatcaaaaaatgggcaaaggatatgaacagatacttctcaaaagaagacatttatgcagccaacagacatatgaaaaaatgctcatcatcactagtcattagagaaatgaaaatcaaaaccacagtgagataccatctcatgccagttagaatggcgatcattaaaaatcaggaaacaatagatgctggagaggttgtggaaaaattggaacgcttttacactgttggtgggagtgcaaattagtccgaccattgtggaagtcagtgtgacgactcctcaaggatctagaactggaaataccatttgacccagcaatcccactattgggcatatacccaaaagattataaatcattctacaataaagacacatgcacacgtatgtttattgctgcactattcacaatagcaaagatttgaaaccaacccaaatgcccgtcaatgatagactggattaagaaaatgtggcacatgtataccatggaatactatgcagccataaaaaaggatgagttcatgtcctttgcagggacatggataaagccggaaaccatcattctcagcaaactatcacaagatcagaaaaccaaacaacgcatgttctcactcataagtgggagttaaacaatgagaacacatggacacagggagggtaacatcacacaccagggcctgtggggggtggggggctaagggagggataacattaggagaaatacctaatgtaggtgacaggttggtgggtgcagcaaaccaccatggcatgtgtatacctatgtaacaaaactacatgttctgcacatgtaacccagaacttaaagtataataaaaaaaataattattaaattttaaaaaactagccaggcatggtgctgcacacctgtagtcccagctacttgagaggctacattgggaggattgcctgagcttgggaggttgaggctgcagttagctgtgactgtgccagtgcactccagcctgggcaacagagcaagaccctgtctcaaaaaaagaaaaagaaaaattcagagagattaaagaaggtatcaagaaatgtagacacaatccatgttcatgaattggaagatcaaatgttgttaagatagcagttctccccaaattaatctacaatgcaatccctatcaaaatcacagcaggcttttttgaaaaattgacaagccaatcttaaaatctgtatgaaaacataaaggattcagaatagccaaaataattctgaaaatgaagaaataattctgatccagaacttactacaaagctacattaatcaagacagtgtggtactgatataaagataggcatacagatcagtggaacagagtccaggaataaaccttcacatttatgatcaattaagttttgacaaaaatcccaatgaaattatggagaaaagatggtcttttcaacaaatagtgctaggatatttggatatcaaatgcagaagaaattaatttagattcttacctcctaccatatgcaaaaataaactcaaaattgatcacacacctacatgtaagagctaaaactataaaacatgtagaagaaaacatgggagaaaacctagatgaccttggtttaggaagaattcttaagacactaatagcacaattcataaaagaaaatattaataaattggacttcattaaaatataaaattttgtttcaaaaaactattaagaaaattaattggcccggggaggtggttcacatctgaaatccctgcactttcggaagccaaggagggtggaccacttgagctcaggaatttgagaccagactggacaacagagcaaaatgccatctccacaaaaaatacaaaaattaaccaggcatggtggcgtgctcctgtagtcctggctactcagaaggctgaggtgggaggatctcttgaccctgggaggcagaggttgcagtgagccaagatcacaccaccgcactagagcctgggtgacagagtgagaccctgtctcaaaaaaaaaaaaaaaaaaaaaaattaattgaaaaatcacagactgggagaaaatattttcaaaccataataagtatctgatagaggacttgtatctagactatgtaaagaattcttaaaactcaaaaataaggcagacaacttaaaaatggacaaaatgtttgaatagatatttcagcaaagatatacaaattgcttagcatatgaagagatgtgtactatcactagtcattaggaaaatacaagttaaaagcaaaattagataccattttggacccactaaaatgactataataaaaaagacagacaaagatatgtgttggtgatgatgtggagaaactggagccctaatgcattgctggtgggaatgtaaaatggtgcagccactttggaaaacagtttggcagtttcttaaaaagataaacataagtttaccatatgatcctgctattccatgagaagagaagtggaaatgtgttcacatcaagactcgtaggcaaatgttcatagcattatcattcatattagtcaaaaagtggaaaccaaatgaccatcaactactggattttttttttttttttaagagatgaggcctcactatgttgcatactctgaagtcaaactcctgggctcaaacaatcctcctgcctcagcctcctcagtaactgggactgcaggcaggcaccaacatacccagattatttctttttctttttttttttaactggtggatttctttaaatgatatatgtatacaatggagtagtgatataggctacaatatggatgcatctcaaaacattatgcttagtgaaagaagtctgatgcaatatcccacatatggtatgtttccatttacagtccagaaaaggcatatactaaattagcagttgcatgggtctgatgtgaaaacatggattgcctgcagatgggcacaagggatcttttgggggtgacaaaaatgttccaaaactaagttgtaatttttgcacaacttttatgtgtgtgtgtgtgtgtgtgtgtgagatggagtttcactcttgttgcccaggctggagtgcaatggcgcgatctcagctcaccacaacctccgcctcctgggttgaagcatttctcctgcctcagcttcctgagtagctgggattacaggcatgtgccaccatgcccggctaattttgtatttttagtagagacaggttttctccaggttggtcaggctggtctcgaactcctgacctcaggtgatcctcctgcctcggcctcccaaagcgctgggattacaggcgtgagccaccacacccagccatttttgcacaactttataaactttaaaaataattgatttatgcacttaaaacaggtaaagtttatgtgtataaattataccttaataaagctattaaaagtcaaagattataacagggcctctctctctctgacctagtgacctagggtaaagagaaaaagaagctagccaggcacaggggctcacacctgtaatcccagcactttgggaagccaagatgggctgattgcttgagtccaggagtttgagaccaacttgggcaacatagcaaaaccctgtctccaccaaaaataaaaaaaattagccaggcatggcggtgtatgcctggagtcccagctactcaggagtcagaggtgggaggatcacttgagcccaggaggcagaggttgtagggagccaagattgcaccactgcactccagcctgggtgacagagcaagacactgtctcaaaaattaaaaattaaaaaatgagggaagctgctgtatctccacttcttccctctctgtgcccagagatatctcttcagttatctcacatgccctacaagtctagagacctcaggtgaggagccagtagctcagtatagaaactaaggatccaagtggacaactgccaccaagtcaccacagggccagctgctttgggagggtgctgcatctgcctcccatacacttctgccaagtttatgttagtttgggaggactgaagcagaattcagttcaaagtactgtgctggattttggtttctaaatattttccaatagaaaagaacccaggcttcttgagaaaatagctaggttctaaggctagagccaaaaaaatgcaagataagcctggagcatcttgtagtaccagaaactaagcaagtgctcaaaaacaaaaggatagaagcatgtcagacagacacaggagccaatctgaaagagctccctggccgggcacggtggctcacgcctgtaatcccagcactttgggagactgaggtgggaggatgacttgagcccaggagtttgagaccagcctgggcaacatagggagaccccatctctacaaaaaagtaaacaattagccgggcatggtggcacacgcctatagtcccagctactcaggagggtgaagatcacctgagaccaggcggtcaaggcttcagtgagccatgattgtggcactgcactccagcctaggcaatagagtgagactgtctcaaaaaataaaattttaaaataactgaagagtataactggattgtttgtaacacaaaggataagtgcttaagatgatggaaaccctatttatcctgatgtgattattacacattgcatgcctgtaccaaaatatttcatgtaacccataaatatatacatctactatgtacccacaaaaattaaaaaatgtttacaggagtgaaccaccgcacctggccagtggagtctttttaaggtattatttagcatcttctgcttatagtcatgtccaaaaaccagttgatcttcctactcattaggggacaagatcaattctctaaaaaattaacctagcccaaggtaagtggtactattctgaaatctgaaaatctttagtagcctcacattataagcccttcgtagaaaaagaaaagtaagcatttctagaagcacatttttgttggactgagggtggggcaaggagcaggggtgactttcatctgaaatgtacctaggcaggccagagtctgagttaggactggctcctgggactttgccatccaggccaagaagcatgctccagtgtgcatgcactctcatcaaagccctagtcaggaatcccagccactcctctcctgtgcagcacaagctgaaggataaggtgtggggcagtgactgcgtggggctgcctgtgtgattcctgataaagaaatgccttcatgaaatgtattgttccccaataaagctcattttctgtgagaattcatgtgtccttttccaaattaaactagcaaaatatgaacttttgtaaaaggtccacacccagccagttttctactctctaaatgttcaggcctttgcctgtccttccctcagcaaaaatactgtgttttggaaaacattaccaataaaggagctgggaggtggaattggatcaaaatacctttagatgaaagcagcagcacaagccattccctttaaatgagctggcctcacctctggggcctatgaagaaaagcctgcttcaaggtgatagttttcattttgcttcccagcacctctgcagtcataaccaaagtgaaggacaatattgcatgacttcagaagaaagccatccagccaccttgcaacatgttcaggaaattctggactcccttggggcttgcaaaactccctatgtcttgcagaccaaaagcaagttctcagtcacctagctctagtttgcataattaaagaaagtggaagctggttcttttctgggtgacccttcacccaaccaagctcataaggacttgtgacaaaaataagagcaataaaatgaagttttaacagtgaaaacttctatcacttagataagcaggaaaagccagtcccctagatgcccatctgaccctaccttactggggtcatacagccaaagcagtgtccacttcaggtactgtaatgttttgaagttgacacatataatttaatgtagtttcatgtcataagttataagacttttcagagaaacaatttagtaatatcttctgtaatacccatcttcattttttatatgaaaaagcatagcctatgatctgtcaccttgctcactcccacatccttacctcttatccttctcacatcgtcccattaacacattatccatctttggggggaaaaaatacactaaattttagacagagtcactttcactatggccacaatgggagaaaagacagtccaccttcaaagtcaaccagaatgactcttaacctctcttgtctgggttgggcatccagataagattttcttcgtacaaagagtcttgctactaggaaaaagagtttgaaaatcactagtctaactaaatatctcactttaaaaaaagcacaaactaagactcaatgaggtttatcttccacaagatcagccagttttagcagagcagttgctaaaacccaggtctcaaactccttgtctatggctcatctaactaagcaacaaaaagcccaatgagctctggagagagagagggagctaaaacaggactcaatcaaaacccacttgggattagggaagccaccctctgtgagtgagttaaactgagattccctccccttcaccctggcttcctttgcagaacaagggtcaccgccagagggaaagctgagtttacggaggggatcctggttggagtcagagtataccttggtttggttttgtggggttttttgagacagggtctcactgtcacccaggctggagcacagtgacagtcatagctcactatagcctcagactcctggcctcaagcgatcctcccacctcaacctccagagtatctgggactataggcacgtaccaccatacccagctaatattttttttaattttatattttttagagacagggtgtcactatgttacccaggtctcaatcactatgttactccttgcctcaagcaatcctctcaccttggcctcccaaagtgctgagcttacaggtgtcaaccactgtggccagccacgcattggttttaaggtccagaatttttctgtttggagccttcacaattagttttaggttgggagaccgtgaacccaccaagcagccctttagaggctggaaaaagagtttggaaaaagaactctgtggctttaggaatttctctcggaaatcctctagggcagagaaggaaaatttaccaaatgggagagtgtattagtctattcttacattgctataaggaaataccccagactgggtaatttataaaggaaagagttttaattgactcacagttccacatggctgggaaagcctcaggaaacttacaatcatagcagaaggcaaaggggaagaaaggcaccttcttcacagggcggcaggaaggagaagtgcagagcaaagtggggcaaagcctctataaagccatcagatctcatgagaactcactatcatgagaacagcaggggagaaccacccccatgatccaatcaccttccacgaggtccctcccccaacacgtggggatcacaatttggattacaattcaagatgagatttgggtgaggacacagagccggaccatatcagagagaaagctattactgaagacctttctaactcacttctgtaaagatcaattcaataaaagcagcaaacacacatactttgctttccttgtgattaatgccttgacttttttgtggaaagtaacaccccaagaaagccagctactcatgttggcaataaaggtaaaagtatctatggaataaggaccatttttaggacaatactttccctactacttagttctagtcccttttttgtagaattctgaggactttctacatacacaatcatgtcatcagcaaataaagattattgtacttgttctttgccaacccatatgtcttgccttactgccctggttaggaccttcagaacaatactggatataagtggtgaaagcacatatcctccccttgttcctaattttagagggaaagtactcagtctttcgccattaagtacaatgtcagctgtaagttttcctagagaccctttctcagcttgaagatgttccctggtattcatagtttgctaaaaggtttttgtcattttaaatcataaatgggtgttgaattttgtcaaaggcttttaatgcatctatggagatgatccaagtttttttcctccttatttctgctaaggttgtataattatgctcattggtattttaaatgttaaattaaccttgcgttcctgggataagacccactgatcatgatgcattttcctctttgtaaattgctgtattcattttagtttcttcaggattttgcctatgtttgaaggatattggtttgtaatttttcttgtaacatctttgtctggttttgaaatcaaagtaatactggcctaataaaatgagttggaatgtg

SEQ ID NO: 177994 - DNA, 4370 bp, Homo sapiens
  Payload ID: 14916
  Gene Symbol: RPAP3
  Gene Name: RNA polymerase II associated protein 3
  Uniprot ID: Q9H6T3
  ENST ID: ENST00000005386
  CDS Start-End: 117-2114
gcttgtggggaagcgcaggaggcggggctttgcgtgagtcactgccgggctcggcgtgagtcgctgcggggctgacggggtggcagtgcggcgggttacggcctggtcagaccataatgacttcagcaaataaagcaatcgaattacaactacaagtgaaacaaaatgcagaagaattacaagactttatgcgggatttagaaaactgggaaaaagacattaaacaaaaggatatggaactaagaagacagaatggtgttcctgaagagaatttacctcctattcgaaatgggaattttaggaaaaagaagaaaggcaaagctaaagagtcttccaaaaaaaccagagaggaaaacacaaaaaacaggataaaatcttatgattatgaggcatgggcaaaacttgatgtggaccgtatccttgatgagcttgacaaagacgatagtacccatgagtctctgtctcaagaatcagagtcggaagaagatgggattcatgtagattcacaaaaggctcttgttttaaaagaaaagggcaataaatacttcaaacaaggaaaatatgatgaagcaattgactgctacacaaaaggcatggatgccgatccatataatcccgtgttgccaacgaacagagcgtcagcatattttagactgaaaaaatttgctgttgctgagtctgattgtaatttagcagttgccttgaatagaagttatacaaaggcttattccagacgaggtgctgctcgatttgctttgcaaaaattagaagaggccaaaaaagattatgaaagagtattagaactagaaccaaataactttgaagcaacaaatgaactcaggaaaatcagtcaggctttagcatccaaagaaaactcatatccaaaggaagctgacatagtgattaagtcaacagaaggagagcgaaagcaaattgaagcacaacagaataagcagcaggccatttcagagaaagatcgggggaatggatttttcaaagaggggaaatatgaaagagcaattgaatgctatactcgagggatagcagcagatggtgctaatgcccttcttccagctaacagagctatggcctatctgaagattcagaaatatgaagaagctgaaaaagactgcacacaagccattttattagatggctcatattctaaagcttttgccagaagaggaactgcaagaacatttttgggaaagctaaatgaggcaaaacaagattttgaaactgttttacttctggaacctggaaataagcaagcagtaactgaactctccaaaattaaaaaggaattaattgagaaaggacactgggatgatgtctttcttgattccacacaaagacaaaatgtggtaaaacccattgataatccaccgcatcctggatcaactaaaccactcaagaaggttattattgaagaaactggtaatttgatacagactattgatgtgccagatagcactactgctgctgctccagagaataatcctattaatctagcaaatgtaatagcagccacaggcaccacaagtaagaagaattcaagccaagatgacctttttcccacaagtgatactccaagagcaaaagtattgaaaatagaagaagtcagtgatacttcatccctgcaacctcaagccagtttgaagcaggatgtatgtcagtcttacagcgagaaaatgcccatagagatagaacaaaaacctgctcagtttgccacaactgttcttcctccaattcctgcaaactcgttccagctcgaatctgatttcagacaattgaaaagttctccagatatgttgtatcagtatttaaagcaaattgaaccatctttgtatcctaagttgtttcagaaaaatctggatccagatgtattcaaccagatcgttaaaattctgcatgacttttacattgagaaagaaaagccattactcatctttgaaatcttacaaagactttctgaactaaaaaggtttgatatggcagtgatgtttatgtcagaaacagagaaaaagattgcacgtgcattatttaatcacatagacaagtcaggattgaaggatagttctgtcgaagaactcaagaaaagatacggtggttgatttccatttttgctgaaataattgtttttgactttcatatgtaaattttttctactgaaagtgttttgctttttaagaaaatgaaattatatagcaggaaaggactatctttgaacataagttaattaactataaggtgaattgtgatttaactagtgagaattgtattcaagtgaactctgtttttctgaaaataaaaatataaacaatgagatacatttgtaaggatcagcattttattttatgagtcattttaaatgttaaatttagatacattcttcagtgacccataaatgtaacattatttttatattttcatgagtttttgtaaccacttgccaaagctgcttcattagcatatgaataattacctttgtaaagaggaagttaaatagatagtgagatcctttctttataaaacttttaaatgttattgtgccaattcactaacatgaagttatttagttgcagggtatgtatgtatttttagtatttatgttgaaagaaagaagacttttaactagactttcaaactaggttaattgaagtatcacagtattcttacattttaatgccatagggttttttcccttaagatatccatgttacataccagttaaggacagataatctaatgcaaggtgtaaaaatgtaaaaattagtaatgtttaaagtactaattagcatatagcccatatgtatttgttggatgtgagtgtagcgtttgtaaacttttgaaagtagggctagaactctgctcatccctgtactctgcatagtacctagcacagacgtttgcacatagttaggtgctcaactgatacttataaaatttaattgaatttgacgcaagaatcatattaagtaaatgtttaaagtagcagcctagcaaatttttgggcatggtgtaagcactggtaaaaccagttaattttagagactatcaagttgttaaaaaatattaggacaccatcctttaattgttatcagcatcaataagacagttcagtttacaattttatacgatattgtggttaatttttattgccattatacatattactattcttatgaattgtttgagaagtaatcataatttatttacaaagataatttcttcagattgtggtataaattattgagatatgtttgtaatttggatagtttgaatgctttaaaatacacttgatagagtttattaactttgtttattgctaaatgtattatgatatataaacaggcaattgaatttagctttttatctgctatgatctgaatgtttatatcccccacaaattcatatgttgaaatcctaaccctgaaggcgatggtcttcggaggtggggcctttgggaagtgattgggtcaagagggcaggcccttgtaaaagaggccccagagagcttgttcaccaattacaccatgtaaggacacataagaaggcaccatctacgaacaagaaggtgggccttcaccagacaccagagaccagaatctactggcatcttcatcttggactccccatcctccagaactgtaagaaataaatttctgtttttattaatgtaagctacccagtttgatattttattatagcaacccgaatggactacggtatgatcctttgaagaaacttacaaggtagtcagggcaggtaatgttattgtcattcttaacataagaaaaggaggctcagagggttaatgttctctgcatgattatagagctaaaaattggccaaaacagttcagaacgtgctgtcttctcttaatgtagagctatttgaactacttccagctgcagtttttatgttgtgttacctgtgtagagactgttaactgaagaagtacagatcacaagatttactatagaatttgaattttaaaaaatttctgatgttagcctgatttctccccagagacattttcatgtagtgatttaagaccagaggctctggattcagacttcttgagtttgaattctggctccatctggctttagggccttggacaagttacttttctattctttgtttttgaaatctgtagaatgggtataagtgagattgaatgaatgcacacattttgtttttggagcagggctggatgtatagtaagctactgttactattattattacaattaccaacatttcctaaaagtgattagaataaagaacagtctttaggggctgtcatattgttgccttattgcaaaatagcatagtggttaataaagtcatttttgggtcaaataa

SEQ ID NO: 177995 - DNA, 2149 bp, Homo sapiens
  Payload ID: 14916
  Gene Symbol: RPAP3
  Gene Name: RNA polymerase II associated protein 3
  Uniprot ID: Q9H6T3
  ENST ID: ENST00000380650
  CDS Start-End: 42-1937
cggggtggcagtgcggcgggttacggcctggtcagaccataatgacttcagcaaataaagcaatcgaattacaactacaagtgaaacaaaatgcagaagaattacaagactttatgcgggatttagaaaactgggaaaaagacattaaacaaaaggatatggaactaagaagacagaatggtgttcctgaagagaatttacctcctattcgaaatgggaattttaggaaaaagaagaaaggcaaagctaaagagtcttccaaaaaaaccagagaggaaaacacaaaaaacaggataaaatcttatgattatgaggcatgggcaaaacttgatgtggaccgtatccttgatgagcttgacaaagacgatagtacccatgagtctctgtctcaagaatcagagtcggaagaagatgggattcatgtagattcacaaaaggctcttgttttaaaagaaaagggcaataaatacttcaaacaaggaaaatatgatgaagcaattgactgctacacaaaaggcatggatgccgatccatataatcccgtgttgccaacgaacagagcgtcagcatattttagactgaaaaaatttgctgttgctgagtctgattgtaatttagcagttgccttgaatagaagttatacaaaggcttattccagacgaggtgctgctcgatttgctttgcaaaaattagaagaggccaaaaaagattatgaaagagtattagaactagaaccaaataactttgaagcaacaaatgaactcaggaaaatcagtcaggctttagcatccaaagaaaactcatatccaaaggaagctgacatagtgattaagtcaacagaaggagagcgaaagcaaattgaagcacaacagaataagcagcaggccatttcagagaaagatcgggggaatggatttttcaaagaggggaaatatgaaagagcaattgaatgctatactcgagggatagcagcagatggtgctaatgcccttcttccagctaacagagctatggcctatctgaagattcagaaatatgaagaagctgaaaaagactgcacacaagccattttattagatggctcatattctaaagcttttgccagaagaggaactgcaagaacatttttgggaaagctaaatgaggcaaaacaagattttgaaactgttttacttctggaacctggaaataagcaagcagtaactgaactctccaaaattaaaaagaaaccactcaagaaggttattattgaagaaactggtaatttgatacagactattgatgtgccagatagcactactgctgctgctccagagaataatcctattaatctagcaaatgtaatagcagccacaggcaccacaagtaagaagaattcaagccaagatgacctttttcccacaagtgatactccaagagcaaaagtattgaaaatagaagaagtcagtgatacttcatccctgcaacctcaagccagtttgaagcaggatgtatgtcagtcttacagcgagaaaatgcccatagagatagaacaaaaacctgctcagtttgccacaactgttcttcctccaattcctgcaaactcgttccagctcgaatctgatttcagacaattgaaaagttctccagatatgttgtatcagtatttaaagcaaattgaaccatctttgtatcctaagttgtttcagaaaaatctggatccagatgtattcaaccagatcgttaaaattctgcatgacttttacattgagaaagaaaagccattactcatctttgaaatcttacaaagactttctgaactaaaaaggtttgatatggcagtgatgtttatgtcagaaacagagaaaaagattgcacgtgcattatttaatcacatagacaagtcaggattgaaggatagttctgtcgaagaactcaagaaaagatacggtggttgatttccatttttgctgaaataattgtttttgactttcatatgtaaattttttctactgaaagtgttttgctttttaagaaaatgaaattatatagcaggaaaggactatctttgaacataagttaattaactataaggtgaattgtgatttaactagtgagaattgtattcaagtgaactctgtttttctgaaaataaaaatataaacaatga

SEQ ID NO: 177996 - DNA, 2133 bp, Homo sapiens
  Payload ID: 14916
  Gene Symbol: RPAP3
  Gene Name: RNA polymerase II associated protein 3
  Uniprot ID: Q9H6T3
  ENST ID: ENST00000432584
  CDS Start-End: 400-1920
gagtcactgccgggctcggcgtgagtcgctgcggggctgacggggtggcagtgcggcgggttacggcctggtcagaatttacctcctattcgaaatgggaattttaggaaaaagaagaaaggcaaagctaaagagtcttccaaaaaaaccagagaggaaaacacaaaaaacaggataaaatcttatgattatgaggcatgggcaaaacttgatgtggaccgtatccttgatgagcttgacaaagacgatagtacccatgagtctctgtctcaagaatcagagtcggaagaagatgggattcatgtagattcacaaaaggctcttgttttaaaagaaaagggcaataaatacttcaaacaaggaaaatatgatgaagcaattgactgctacacaaaaggcatggatgccgatccatataatcccgtgttgccaacgaacagagcgtcagcatattttagactgaaaaaatttgctgttgctgagtctgattgtaatttagcagttgccttgaatagaagttatacaaaggcttattccagacgaggtgctgctcgatttgctttgcaaaaattagaagaggccaaaaaagattatgaaagagtattagaactagaaccaaataactttgaagcaacaaatgaactcaggaaaatcagtcaggctttagcatccaaagaaaactcatatccaaaggaagctgacatagtgattaagtcaacagaaggagagcgaaagcaaattgaagcacaacagaataagcagcaggccatttcagagaaagatcgggggaatggatttttcaaagaggggaaatatgaaagagcaattgaatgctatactcgagggatagcagcagatggtgctaatgcccttcttccagctaacagagctatggcctatctgaagattcagaaatatgaagaagctgaaaaagactgcacacaagccattttattagatggctcatattctaaagcttttgccagaagaggaactgcaagaacatttttgggaaagctaaatgaggcaaaacaagattttgaaactgttttacttctggaacctggaaataagcaagcagtaactgaactctccaaaattaaaaaggaattaattgagaaaggacactgggatgatgtctttcttgattccacacaaagacaaaatgtggtaaaacccattgataatccaccgcatcctggatcaactaaaccactcaagaaggttattattgaagaaactggtaatttgatacagactattgatgtgccagatagcactactgctgctgctccagagaataatcctattaatctagcaaatgtaatagcagccacaggcaccacaagtaagaagaattcaagccaagatgacctttttcccacaagtgatactccaagagcaaaagtattgaaaatagaagaagtcagtgatacttcatccctgcaacctcaagccagtttgaagcaggatgtatgtcagtcttacagcgagaaaatgcccatagagatagaacaaaaacctgctcagtttgccacaactgttcttcctccaattcctgcaaactcgttccagctcgaatctgatttcagacaattgaaaagttctccagatatgttgtatcagtatttaaagcaaattgaaccatctttgtatcctaagttgtttcagaaaaatctggatccagatgtattcaaccagatcgttaaaattctgcatgacttttacattgagaaagaaaagccattactcatctttgaaatcttacaaagactttctgaactaaaaaggtttgatatggcagtgatgtttatgtcagaaacagagaaaaagattgcacgtgcattatttaatcacatagacaagtcaggattgaaggatagttctgtcgaagaactcaagaaaagatacggtggttgatttccatttttgctgaaataattgtttttgactttcatatgtaaattttttctactgaaagtgttttgctttttaagaaaatgaaattatatagcaggaaaggactatctttgaacataagttaattaactataaggtgaattgtgatttaactagtgagaattgtattcaagtgaactctgtttttctgaaaataaaaatataaacaatgag

SEQ ID NO: 177997 - DNA, 2050 bp, Homo sapiens
  Payload ID: 14917
  Gene Symbol: RPUSD1
  Gene Name: RNA pseudouridylate synthase domain containing 1
  Uniprot ID: Q9UJJ7
  ENST ID: ENST00000007264
  CDS Start-End: 136-1074
gggcggaagcgctgccaggcgtccggagcggagcttccagggtctctgggtcgccagcgcgcgggcgcgcggctggagccggcgccgggcacggcatcgggggcctggactgcacggcccggcagcaggccggccatggagccaggcagcgtggagaacctgtccatcgtgtaccggagccgcgacttcctggtggtcaacaagcactgggacgttcgcattgacagcaaggcgtggcgggagactctgaccctgcagaagcagctgcggtaccgctttcccgagctggccgaccctgacacctgctacgggttcaggttctgccaccagctggatttctccaccagcggggcgctgtgcgtggccctaaacaaggcagccgccggcagcgcgtacaggtgcttcaaggagcggcgcgtgaccaaggcttacctggcattgctgcgggggcacatccaggagagccgggtaaccatcagccatgccattggcaggaacagcacggagggccgggcccacaccatgtgcatcgagggctcgcagggttgtgagaacccaaagccaagcctcacagatctcgtggttctggaacacgggctgtacgcaggcgatcctgtctccaaagtgctgctgaagccgctcacgggccggacacaccagctgcgcgtgcactgcagtgccctgggccaccccgtggtgggcgacctgacctacggagaagtctcgggccgggaggaccggccgttcagaatgatgctgcacgctttctacctgcgcatccccacggacaccgagtgtgtggaggtctgcacgcctgaccccttcctgccctccctggatgcctgctggagcccccacacactgctgcagtcgctggaccagctcgtgcaggccttacgggccacccccgaccctgaccccgaggataggggccccaggccaggcagcccctccgcactcctgcctgggcccggccggcctcctccacccccaaccaagccccctgagactgaggcacagcggggcccctgcctgcagtggctgtcggagtggacgctggaaccggacagctgagagccgtggggctggggcagggggtgtcagctgcacagcgggactctagggagatgggcgagcgagcgtctgctcactggctctggggcctcgaggtgccaggcagcatcaggcccactgggttgccccggccaggcctgcgaggaagggctgaggtggggccggcagggggcgccaggcagccgtgatcacaggtgacgaccgcaccgcggccgtgggactgatgcgggatcccgagggccttcctgcccacatgccccgggagaaaccgaggcccctccctcctcctggaacagcttccggctctcaagcgtcaccccaggggcgtcagttttacggactcaaggtcacctcaggaagaggcagggccaggttttgggataggctttgcctccaggatgggctgctcctgggcctggtgagctactgcccccaacctaccctctagaggggctgggaagggccgttctgggctcacctggcctgggagacccatctggtccctgcgtcctctgcccctcactgctctgtgcagatcctgtcgccctcagctgcctcctcccgagacctaatggtccctgctgggctcgagtctgcaggcccggctgcgtgtgccttggcctcactgtaccagtggttccctctctgcccggattctgagctcagtgtggtgtttggtgcacaggggttggtcaggggccatggccaaggccctgccacgcacgcccatccctcagatccactgtgagcaccaacctgctgcagtctcttgggcccctgctggcagctctgccacgtcaccgcctgcctggctcccacacagccatgcattgtcactctgcctccgggaccccagcttgggagctgtgggtctgccaggtcccacctcctctgtcccccatgccacaacctgggctcctggctacagcagggctccagggactccaaataaatgttcagtgactggctccaagga

SEQ ID NO: 177998 - DNA, 917 bp, Homo sapiens
  Payload ID: 14917
  Gene Symbol: RPUSD1
  Gene Name: RNA pseudouridylate synthase domain containing 1
  ENST ID: ENST00000569601
  CDS Start-End: 375-917
gtcgccagcgcgcgggcgcgcggctggagccggcgccgggcacggcatcgggggcctggactgcacggcccggcagcagcaaggcgtggcgggagactctgaccctgcagaagcagctgcggtaccgctttcccgagctggccgaccctgacacctgctacgggttcaggttctgccaccagctggatttctccaccagcggggcgctgtgcgtggccctaaacaaggcagccgccggcagcgcgtacaggtgcttcaaggagcggcgcgtgaccaaggcttacctggcattgctgcgggggcacatccaggagagccgggtaaccatcagccatgccattggcaggaacagcacggagggccgggcccacaccatgtgcatcgagggctcgcagggtgtggcaggttgtgagaacccaaagccaagcctcacagatctcgtggttctggaacacgggctgtacgcaggcgatcctgtctccaaagtgctgctgaagccgctcacgggccggacacaccagctgcgcgtgcactgcagtgccctgggccaccccgtggtgggcgacctgacctacggagaagtctcgggccgggaggaccggccgttcagaatgatgctgcacgctttctacctgcgcatccccacggacaccgagtgtgtggaggtctgcacgcctgaccccttcctgccctccctggatgcctgctggagcccccacacactgctgcagtcgctggaccagctcgtgcaggccttacgggccacccccgaccctgaccccgaggataggggccccaggccaggcagcccctccgcactcctgcctgggcccggccggcctcctccacccccaaccaagccccctgagactgaggcacagcggggcccctgcctgcagtggctgtcggagtggacg

SEQ ID NO: 177999 - DNA, 2159 bp, Homo sapiens
  Payload ID: 14917
  Gene Symbol: RPUSD1
  Gene Name: RNA pseudouridylate synthase domain containing 1
  Uniprot ID: Q9UJJ7
  ENST ID: ENST00000561734
  CDS Start-End: 245-1183
ggcttaggtcaggcagggcccttcaggtcagcccggagcaggctgactccttgactccccagctgacgccctggggactgatctcggggactgaggatgcaggtgcacagtagggctgcggacccggctcggtggcttcgcaccggagcccgggtggggcggtgcgggtacctctgtatgctgggctgggggcgcaccacgtgctcacagcacacgcacccacgcgtggctcggcaggccggccatggagccaggcagcgtggagaacctgtccatcgtgtaccggagccgcgacttcctggtggtcaacaagcactgggacgttcgcattgacagcaaggcgtggcgggagactctgaccctgcagaagcagctgcggtaccgctttcccgagctggccgaccctgacacctgctacgggttcaggttctgccaccagctggatttctccaccagcggggcgctgtgcgtggccctaaacaaggcagccgccggcagcgcgtacaggtgcttcaaggagcggcgcgtgaccaaggcttacctggcattgctgcgggggcacatccaggagagccgggtaaccatcagccatgccattggcaggaacagcacggagggccgggcccacaccatgtgcatcgagggctcgcagggttgtgagaacccaaagccaagcctcacagatctcgtggttctggaacacgggctgtacgcaggcgatcctgtctccaaagtgctgctgaagccgctcacgggccggacacaccagctgcgcgtgcactgcagtgccctgggccaccccgtggtgggcgacctgacctacggagaagtctcgggccgggaggaccggccgttcagaatgatgctgcacgctttctacctgcgcatccccacggacaccgagtgtgtggaggtctgcacgcctgaccccttcctgccctccctggatgcctgctggagcccccacacactgctgcagtcgctggaccagctcgtgcaggccttacgggccacccccgaccctgaccccgaggataggggccccaggccaggcagcccctccgcactcctgcctgggcccggccggcctcctccacccccaaccaagccccctgagactgaggcacagcggggcccctgcctgcagtggctgtcggagtggacgctggaaccggacagctgagagccgtggggctggggcagggggtgtcagctgcacagcgggactctagggagatgggcgagcgagcgtctgctcactggctctggggcctcgaggtgccaggcagcatcaggcccactgggttgccccggccaggcctgcgaggaagggctgaggtggggccggcagggggcgccaggcagccgtgatcacaggtgacgaccgcaccgcggccgtgggactgatgcgggatcccgagggccttcctgcccacatgccccgggagaaaccgaggcccctccctcctcctggaacagcttccggctctcaagcgtcaccccaggggcgtcagttttacggactcaaggtcacctcaggaagaggcagggccaggttttgggataggctttgcctccaggatgggctgctcctgggcctggtgagctactgcccccaacctaccctctagaggggctgggaagggccgttctgggctcacctggcctgggagacccatctggtccctgcgtcctctgcccctcactgctctgtgcagatcctgtcgccctcagctgcctcctcccgagacctaatggtccctgctgggctcgagtctgcaggcccggctgcgtgtgccttggcctcactgtaccagtggttccctctctgcccggattctgagctcagtgtggtgtttggtgcacaggggttggtcaggggccatggccaaggccctgccacgcacgcccatccctcagatccactgtgagcaccaacctgctgcagtctcttgggcccctgctggcagctctgccacgtcaccgcctgcctggctcccacacagccatgcattgtcactctgcctccgggaccccagcttgggagctgtgggtctgccaggtcccacctcctctgtcccccatgccacaacctgggctcctggctacagcagggctccagggactccaaataaatgttcagtgactggctccaagga

SEQ ID NO: 178000 - DNA, 1835 bp, Homo sapiens
  Payload ID: 14917
  Gene Symbol: RPUSD1
  Gene Name: RNA pseudouridylate synthase domain containing 1
  ENST ID: ENST00000567114
  CDS Start-End: 348-899
cgcgcagcggtgcagggcggaagcgctgccaggcgtccggagcggagcttccagggtctctgggtcgccagcgcgcgggcgcgcggctggagccggcgccgggcacggcatcgggggcctggactgcacggcccggcagcaggttctgccaccagctggatttctccaccagcggggcgctgtgcgtggccctaaacaaggcagccgccggcagcgcgtacaggtgcttcaaggagcggcgcgtgaccaaggcttacctggcattgctgcgggggcacatccaggagagccgggtaaccatcagccatgccattggcaggaacagcacggagggccgggcccacaccatgtgcatcgagggctcgcagggttgtgagaacccaaagccaagcctcacagatctcgtggttctggaacacgggctgtacgcaggcgatcctgtctccaaagtgctgctgaagccgctcacgggccggacacaccagctgcgcgtgcactgcagtgccctgggccaccccgtggtgggcgacctgacctacggagaagtctcgggccgggaggaccggccgttcagaatgatgctgcacgctttctacctgcgcatccccacggacaccgagtgtgtggaggtctgcacgcctgaccccttcctgccctccctggatgcctgctggagcccccacacactgctgcagtcgctggaccagctcgtgcaggccttacgggccacccccgaccctgaccccgaggataggggccccaggccaggcagcccctccgcactcctgcctgggcccggccggcctcctccacccccaaccaagccccctgagactgaggcacagcggggcccctgcctgcagtggctgtcggagtggacgctggaaccggacagctgagagccgtggggctggggcagggggtgtcagctgcacagcgggactctagggagatgggcgagcgagcgtctgctcactggctctggggcctcgaggtgccaggcagcatcaggcccactgggttgccccggccaggcctgcgaggaagggctgaggtggggccggcagggggcgccaggcagccgtgatcacaggtgacgaccgcaccgcggccgtgggactgatgcgggatcccgagggccttcctgcccacatgccccgggagaaaccgaggcccctccctcctcctggaacagcttccggctctcaagcgtcaccccaggggcgtcagttttacggactcaaggtcacctcaggaagaggcagggccaggttttgggataggctttgcctccaggatgggctgctcctgggcctggtgagctactgcccccaacctaccctctagaggggctgggaagggccgttctgggctcacctggcctgggagacccatctggtccctgcgtcctctgcccctcactgctctgtgcagatcctgtcgccctcagctgcctcctcccgagacctaatggtccctgctgggctcgagtctgcaggcccggctgcgtgtgccttggcctcactgtaccagtggttccctctctgcccggattctgagctcagtgtggtgtttggtgcacaggggttggtcaggggccatggccaaggccctgccacgcacgcccatccctcagatccactgtgagcaccaacctgctgcagtctcttgggcccctgctggcagctctgccacgtcaccgcctgcctggctcccacacagccatgcattgtcactctgcctccgggaccccagcttgggagctgtgggtctgccaggtcccacctcctctgtcccccatgccacaacctgggctcctggctacagcagggctc

SEQ ID NO: 178001 - DNA, 587 bp, Homo sapiens
  Payload ID: 14917
  Gene Symbol: RPUSD1
  Gene Name: RNA pseudouridylate synthase domain containing 1
  ENST ID: ENST00000563560
  CDS Start-End: 82-587
cagcgcgcgggcgcgcggctggagccggcgccgggcacggcatcgggggcctggactgcacggcccggcagcaggccggccatggagccaggcagcgtggagaacctgtccatcgtgtaccggagccgcgacttcctggtggtcaacaagcactgggacgttcgcattgacagcaaggcgtggcgggagactctgaccctgcagaagcagctgcggtaccgctttcccgagctggccgaccctgacacctgctacgggttcaggttctgccaccagctggatttctccaccagcggggcgctgtgcgtggccctaaacaaggcagccgccggcagcgcgtacaggtgcttcaaggagcggcgcgtgaccaaggcttacctggcattgctgcgggggcacatccaggagagccgggtaaccatcagccatgccattggcaggaacagcacggagggccgggcccacaccatgtgcatcgagggctcgcagggtgtggcaggttgtgagaacccaaagccaagcctcacagatctcgtggttctggaacacgggctgtacgcaggcgatcctgtctccaaagtgctgct

SEQ ID NO: 178002 - DNA, 561 bp, Homo sapiens
  Payload ID: 14917
  Gene Symbol: RPUSD1
  Gene Name: RNA pseudouridylate synthase domain containing 1
  ENST ID: ENST00000565503
  CDS Start-End: 93-386
ctctgggtcgccagcgcgcgggcgcgcggctggagccggcgccgggcacggcatcgggggcctggactgcacggcccggcagcaggccggccatggagccaggcagcgtggagaacctgtccatcgtgtaccggagccgcgacttcctggtggtcaacaagcactgggacgttcgcattgacagcaaggcgtggcgggagactctgaccctgcagaagcagctgcggtaccgctttcccgagctggccgaccctgacacctgctacgggttcaggttctgccaccagctggatttctccaccagcggggcgctgtgcgtggccctaaacaaggcagccgccggcagcgcgtacagctgcgggggcacatccaggagagccgggtaaccatcagccatgccattggcaggaacagcacggagggccgggcccacaccatgtgcatcgagggctcgcagggttgtgagaacccaaagccaagcctcacagatctcgtggttctggaacacgggctgtacgcaggcgatcctgtctccaaagtgctgctgaagccgctcacggg

SEQ ID NO: 178003 - DNA, 940 bp, Homo sapiens
  Payload ID: 14917
  Gene Symbol: RPUSD1
  Gene Name: RNA pseudouridylate synthase domain containing 1
  ENST ID: ENST00000565377
  CDS Start-End: 422-940
gcggaagcgctgccaggcgtccggagcggagcttccagggtctctgggtcgccagcgcgcgggcgcgcggctggagccggcgccgggcacggcatcgggggcctggactgcacggcccggcagcagcaaggcgtggcgggagactctgaccctgcagaagcagctgcggtaccgctttcccgagctggccgaccctgacacctgctacgggttcaggttctgccaccagctggatttctccaccagcggggcgctgtgcgtggccctaaacaaggcagccgccggcagcgcgtacaggtgcttcaaggagcggcgcgtgaccaaggcttacctggcattgctgcgggggcacatccaggagagccgggtaaccatcagccatgccattggcaggaacagcacggagggccgggcccacaccatgtgcatcgagggctcgcagggttgtgagaacccaaagccaagcctcacagatctcgtggttctggaacacgggctgtacgcaggcgatcctgtctccaaagtgctgctgaagccgctcacgggccggacacaccagctgcgcgtgcactgcagtgccctgggccaccccgtggtgggcgacctgacctacggagaagtctcgggccgggaggaccggccgttcagaatgatgctgcacgctttctacctgcgcatccccacggacaccgagtgtgtggaggtctgcacgcctgaccccttcctgccctccctggatgcctgctggagcccccacacactgctgcagtcgctggaccagctcgtgcaggccttacgggccacccccgaccctgaccccgaggataggggccccaggccaggcagcccctccgcactcctgcctgggcccggccggcctcctccacccccaaccaagccccctgagactgaggcacagcggggcccctgcctgcagtgg

SEQ ID NO: 178004 - DNA, 835 bp, Homo sapiens
  Payload ID: 14917
  Gene Symbol: RPUSD1
  Gene Name: RNA pseudouridylate synthase domain containing 1
  ENST ID: ENST00000567283
  CDS Start-End: 86-511
tcgccagcgcgcgggcgcgcggctggagccggcgccgggcacggcatcgggggcctggactgcacggcccggcagcaggccggccatggagccaggcagcgtggagaacctgtccatcgtgtaccggagccgcgacttcctggtggtcaacaagcactgggacgttcgcattgacagcaaggcgtggcgggagactctgaccctgcagaagcagctgcggtaccgctttcccgagctggccgaccctgacacctgctacgggttcaggttctgccaccagctggatttctccaccagcggggcgctgtgcgtggccctaaacaaggcagccgccggcagcgcgtacaggtgcttcaaggagcggcgcgtgaccaaggcttacctggcattggtaagacctgctgcgggggcacatccaggagagccgggtaaccatcagccatgccattggcaggaacagcacggagggccgggcccacaccatgtgcatcgagggctcgcagggttgtgagaacccaaagccaagcctcacagatctcgtggttctggaacacgggctgtacgcaggcgatcctgtctccaaagtgctgctgaagccgctcacgggccggacacaccagctgcgcgtgcactgcagtgccctgggccaccccgtggtgggcgacctgacctacggagaagtctcgggccgggaggaccggccgttcagaatgatgctgcacgctttctacctgcgcatccccacggacaccgagtgtgtggaggtctgcacgcctgaccccttcctgccctccctggatgcctgctggagcccccacacactgctgcagtcgct

SEQ ID NO: 178005 - DNA, 1918 bp, Homo sapiens
  Payload ID: 14917
  Gene Symbol: RPUSD1
  Gene Name: RNA pseudouridylate synthase domain containing 1
  ENST ID: ENST00000565809
  CDS Start-End: 124-519
tgccaggcgtccggagcggagcttccagggtctctgggtcgccagcgcgcgggcgcgcggctggagccggcgccgggcacggcatcgggggcctggactgcacggcccggcagcaggccggccatggagccaggcagcgtggagaacctgtccatcgtgtaccggagccgcgacttcctggtggtcaacaagcactgggacgttcgcattgacagcaaggcgtggcgggagactctgaccctgcagaagcagctgcggtaccgctttcccgagctggccgaccctgacacctgctacgggttcaggttctgccaccagctggatttctccaccagcggggcgctgtgcgtggccctaaacaaggcagccgccggcagcgcgtacaggtgcttcaaggagcggcgcgtgaccaaggcttacctggcattggttgtgagaacccaaagccaagcctcacagatctcgtggttctggaacacgggctgtacgcaggcgatcctgtctccaaagtgctgctgaagccgctcacgggccggacacaccagctgcgcgtgcactgcagtgccctgggccaccccgtggtgggcgacctgacctacggagaagtctcgggccgggaggaccggccgttcagaatgatgctgcacgctttctacctgcgcatccccacggacaccgagtgtgtggaggtctgcacgcctgaccccttcctgccctccctggatgcctgctggagcccccacacactgctgcagtcgctggaccagctcgtgcaggccttacgggccacccccgaccctgaccccgaggataggggccccaggccaggcagcccctccgcactcctgcctgggcccggccggcctcctccacccccaaccaagccccctgagactgaggcacagcggggcccctgcctgcagtggctgtcggagtggacgctggaaccggacagctgagagccgtggggctggggcagggggtgtcagctgcacagcgggactctagggagatgggcgagcgagcgtctgctcactggctctggggcctcgaggtgccaggcagcatcaggcccactgggttgccccggccaggcctgcgaggaagggctgaggtggggccggcagggggcgccaggcagccgtgatcacaggtgacgaccgcaccgcggccgtgggactgatgcgggatcccgagggccttcctgcccacatgccccgggagaaaccgaggcccctccctcctcctggaacagcttccggctctcaagcgtcaccccaggggcgtcagttttacggactcaaggtcacctcaggaagaggcagggccaggttttgggataggctttgcctccaggatgggctgctcctgggcctggtgagctactgcccccaacctaccctctagaggggctgggaagggccgttctgggctcacctggcctgggagacccatctggtccctgcgtcctctgcccctcactgctctgtgcagatcctgtcgccctcagctgcctcctcccgagacctaatggtccctgctgggctcgagtctgcaggcccggctgcgtgtgccttggcctcactgtaccagtggttccctctctgcccggattctgagctcagtgtggtgtttggtgcacaggggttggtcaggggccatggccaaggccctgccacgcacgcccatccctcagatccactgtgagcaccaacctgctgcagtctcttgggcccctgctggcagctctgccacgtcaccgcctgcctggctcccacacagccatgcattgtcactctgcctccgggaccccagcttgggagctgtgggtctgccaggtcccacctcctctgtcccccatgccacaacctgggctcctggctacagcagggctccagggactccaaataaatgttca

SEQ ID NO: 178006 - DNA, 954 bp, Homo sapiens
  Payload ID: 14917
  Gene Symbol: RPUSD1
  Gene Name: RNA pseudouridylate synthase domain containing 1
  ENST ID: ENST00000562070
  CDS Start-End: 1-536
accagctggatttctccaccagcggggcgctgtgcgtggccctaaacaaggcagccgccggcagcgcgtacaggtgcttcaaggagcggcgcgtgaccaaggcttacctggcattgctgcgggggcacatccaggagagccgggtaaccatcagccatgccattggcaggaacagcacggagggccgggcccacaccatgtgcatcgagggctcgcagggttgtgagaacccaaagccaagcctcacagatctcgtggttctggaacacgggctgtacgcaggcgatcctgtctccaaagtgctgctgaagccgctcacgggtgtgtctggggtgggcggtgtcctggtggtgacagaagggaaactgaggcacagggccacgaagcttatgttgggccaccctgagcatcagggcagagctggcaacaagcactcctgcgttcttaactccacgccctgcagcctctcagcttctcacctgacacagggtccctgctggctcctgactgattccttgggggtctggctggcctagattctccaggaccgagcaccaccctggccctgtcctcaccagtggtgacctgaacacaatcttctgtcctaaatactgtcatcctcactcatggcaggggacagggagagttccaccccaagaggctgcttcaagactgcagcggggtcatgacgggaggtgggtcctggtcagggagataggtgtggatcggccccgctcccagcttgatccggcaccgccctcatcccgcaggccggacacaccagctgcgcgtgcactgcagtgccctgggccaccccgtggtgggcgacctgacctacggagaagtctcgggccgggaggaccggccgttcagaatgatgctgcacgctttctacctgcgcatccccacggacaccgagtgtgtggaggtctgcacgcctgaccccttcctgcc

SEQ ID NO: 178007 - DNA, 2358 bp, Homo sapiens
  Payload ID: 14918
  Gene Symbol: RPUSD2
  Gene Name: RNA pseudouridylate synthase domain containing 2
  Uniprot ID: Q8IZ73
  ENST ID: ENST00000315616
  CDS Start-End: 39-1676
gatcgcgaccctgggagtggagtgggggcagcgtggttatgtggctggaccgccgcggatggctcagggttcttggacattggcgctacgaccttaggcgccctagctttaccaggacttggagtggcgataagggcccaatggcagaaacagtgtctacccaggttgggacagagggcgggctgagggcttcgcatcagcaaaacggtgacgctggtggcgacgcgaaggttgagctgtcccccgggcccccgaagccggctggccgggaagtggagccggccccagtaggcggggagcatccctcggctgcagccccaggcccgggcaagcataagaagcggcggggcgcaaccagggagcgtgtcgtgccgcccccgaagaagcggcggaccggggtgagcttcggagatgagcactttgcagaaaccagttattacttcgagggcggcctgcgtaaggtgcggccctattactttgacttccggacctactgcaaaggtcgctgggtgggccacagcttgctgcacgtcttcagtaccgagttccgagctcagcccctggcctactatgaggccgcggtccgggcgggccgcctgcaactcaacgagaagccggtgcaggacctcaacatcgtgctcaaggacaatgatttcttgcggaacacagtgcacaggcatgagccaccagtcacagcagagcccattcgcctgctagctgagaacgaagatgtggtggttgtagacaagccttcctccattcccgttcacccctgtggccgcttccgacacaacacagttatcttcatcctaggcaaggagcaccaactcaaggagctacaccccttgcatcggcttgaccgccttacctcaggggtgcttatgtttgccaagacagctgcagtctctgagagaattcacgagcaggttcgggaccggcagctggagaaggagtacgtgtgccgggtggaaggggagttccccactgaggaagtgacctgtaaagaacccatcttagtggtgtcttacaaagtaggggtgtgccgtgtagatccccggggcaagccctgtgagacagtgttccagaggctaagctacaatggccagtccagtgtggtacggtgccggccactcacaggccgcacacaccagattcgagtccaccttcagttcttgggccatcccattctcaacgaccccatctacaactcagttgcctggggtccttctcgaggccggggcggctacattcccaagacaaacgaggagttgctacgggacctggtagcagagcaccaggccaaacagagcctggatgtgctagatctctgtgagggtgacctgtccccaggactcacagactctacggccccctcctcagagttgggcaaggacgacctggaagagttggctgcagctgcccagaagatggaggaagtagctgaggcagcccctcaggagttggacacaatagccttggcatcagagaaggcagttgaaacagatgtcatgaatcaagagacagacccactctgtgcagagtgccggctggtgcgacaggatcccttgccccaagaccttgtgatgttcctacatgccctacgctataaagggccaggctttgagtacttttcaccaatgcctgcctgggcacaggatgactggcaaaaggactgagggtgtggccaatggagggattgcttcttgggttgtgacaaggatgggctatagggcaagggctgaccccatgggctagtacttggggtttctataggaatgaggacgggcttctaaagagacctgctcatacttgctacctccttccagtgggaatttggagactttttggtttgtaaatatatccctttttctaacatctttgatgtctggttttcttccggcttcttttttattactgatgtaaaattcacataacataaaattaaccactttaactagccaggcacagtggctcatggctataatcctagtactttgggaggtagaagtgaaaggatcactggaggccaagagttcaaggttaaagtgaactgtgattgtgctgctgcactccagagcctaggtgacagagtgagaccctgtctcttaaaaaaaaaaaaaattaaccaatttaagatgtacagcgtagtcacatttagtacattcacagtgttgtacaaccataacctcatatatttccaaaacattttcatcaccccaaaaggaaacctgtacccattaagtaagtggtcactttccactccccttccaccagcctctggcaaccactaatctactttctgtctgtttggatttgcctgtttattctggacattttatataaatggaatgataaaac

SEQ ID NO: 178008 - DNA, 1558 bp, Homo sapiens
  Payload ID: 14918
  Gene Symbol: RPUSD2
  Gene Name: RNA pseudouridylate synthase domain containing 2
  Uniprot ID: Q8IZ73
  ENST ID: ENST00000559271
  CDS Start-End: 7-1461
gtggttatgtggctggaccgccgcggatggctcagggttcttggacattggcgctacgaccttaggcgccctagctttaccaggacttggagtggcgataagggcccaatggcagaaacagtgtctacccaggttgggacagagggcgggctgagggcttcgcatcagcaaaacggtgacgctggtggcgacgcgaaggttgagctgtcccccgggcccccgaagccggctggccgggaagtggagccggccccagtaggcggggagcatccctcggctgcagccccaggcccgggcaagcataagaagcggcggggcgcaaccagggagcgtgtcgtgccgcccccgaagaagcggcggaccggggtgagcttcggagatgagcactttgcagaaaccagttattacttcgagggcggcctgcgtaaggacaatgatttcttgcggaacacagtgcacaggcatgagccaccagtcacagcagagcccattcgcctgctagctgagaacgaagatgtggtggttgtagacaagccttcctccattcccgttcacccctgtggccgcttccgacacaacacagttatcttcatcctaggcaaggagcaccaactcaaggagctacaccccttgcatcggcttgaccgccttacctcaggggtgcttatgtttgccaagacagctgcagtctctgagagaattcacgagcaggttcgggaccggcagctggagaaggagtacgtgtgccgggtggaaggggagttccccactgaggaagtgacctgtaaagaacccatcttagtggtgtcttacaaagtaggggtgtgccgtgtagatccccggggcaagccctgtgagacagtgttccagaggctaagctacaatggccagtccagtgtggtacggtgccggccactcacaggccgcacacaccagattcgagtccaccttcagttcttgggccatcccattctcaacgaccccatctacaactcagttgcctggggtccttctcgaggccggggcggctacattcccaagacaaacgaggagttgctacgggacctggtagcagagcaccaggccaaacagagcctggatgtgctagatctctgtgagggtgacctgtccccaggactcacagactctacggccccctcctcagagttgggcaaggacgacctggaagagttggctgcagctgcccagaagatggaggaagtagctgaggcagcccctcaggagttggacacaatagccttggcatcagagaaggcagttgaaacagatgtcatgaatcaagagacagacccactctgtgcagagtgccggctggtgcgacaggatcccttgccccaagaccttgtgatgttcctacatgccctacgctataaagggccaggctttgagtacttttcaccaatgcctgcctgggcacaggatgactggcaaaaggactgagggtgtggccaatggagggattgcttcttgggttgtgacaaggatgggctatagggcaagggctgaccccatgggctagtacttggggtttctatag

SEQ ID NO: 178009 - DNA, 631 bp, Homo sapiens
  Payload ID: 14918
  Gene Symbol: RPUSD2
  Gene Name: RNA pseudouridylate synthase domain containing 2
  ENST ID: ENST00000616318
  CDS Start-End: 1-519
ccaatggcagaaacagtgtctacccaggttgggacagagggcgggctgagggcttcgcatcagcaaaacggtgacgctggtggcgacgcgaaggttgagctgtcccccgggcccccgaagccggctggccgggaagtggagccggccccagtaggcggggagcatccctcggctgcagccccaggcccgggcaagcataagaagcggcggggcgcaaccagggagcgtgtcgtgccgcccccgaagaagcggcggaccggggtgagcttcggagatgagcactttgcagaaaccagttattacttcgagggcggcctgcgtaaggtgcggccctattactttgacttccggacctactgcaaaggtcgctgggtgggccacagcttgctgcacgtcttcagtaccgagttccgagctcagcccctggcctactatgaggccgcggtccgggcgggccgcctgcaactcaacgagaagccggtgcaggacctcaacatcgtgctcaaggtggagtcctgatggggctggccagaagcgggcgaggaaaaggggccgggttttgttttgttttgttttgttttttagtcttagtaaagcataggtactggattaaaatcatggcaattctaaa

SEQ ID NO: 178010 - DNA, 1225 bp, Homo sapiens
  Payload ID: 14919
  Gene Symbol: RPUSD3
  Gene Name: RNA pseudouridylate synthase domain containing 3
  Uniprot ID: Q6P087
  ENST ID: ENST00000383820
  CDS Start-End: 3-1058
acatgcgcgctgtcctggctcgggagatggacggccgccgtgttttgggccggttctggagtggctggcggcggggcctgggtgtccgcccagtgcccgaggacgcaggctttggcaccgaagcccggcatcagaggcaaccccgcggctcctgccaacggtcggggcccctcggggaccagcccttcgcggggctgctgccaaaaaacctcagtcgggaggagctggttgatgcgctgcgggcagccgtggtggaccggaaaggacctctagtgacgttgaacaagccacagggtctaccagtgacaggaaaaccaggagagctgacgttgttctcagtgctgccagagctgagccagtccctagggctcagggagcaggagcttcaggttgtccgagcatctgggaaagaaagctctgggcttgtactcctctccagctgtccccagacagctagtcgcctccagaagtacttcacccatgcacggagagcccaaaggcccacagccacctactgtgctgtcactgatgggatcccagctgcttctgaggggaagatccaggctgccctgaaactggaacacattgatggggtcaatctcacagttccagtgaaggccccatcccgaaaggacatcctggaaggtgtcaagaagactctcagtcactttcgtgtggtagccacaggctctggctgtgccctggtccagctgcagccactgacagtgttctccagtcaactacaggtgcacatggtactacagctctgccctgtgcttggggaccacatgtactctgcccgtgtgggcactgtcctgggccagcgatttctgctgccagctgagaacaacaagccccaaagacaggtcctggatgaagccctcctcagacgcctccacctgaccccctcccaggctgcccagctgcccttgcacctccacctacatcggctccttctcccaggcaccagggccagggacacccctgttgagctcctggcaccactgcccccttatttctccaggaccctacagtgcctggggctccgcttacaatagtcctccctctgttcctgaccccctcacacacactggaaagtgagggtgggggctctgcagtcagacaaacctaagatcacatcctggacaggccacttgcttgctgtgtggcattgggcaagtaactttacctctctggacttgtgataataaaagttcctacctca

SEQ ID NO: 178011 - DNA, 1178 bp, Homo sapiens
  Payload ID: 14919
  Gene Symbol: RPUSD3
  Gene Name: RNA pseudouridylate synthase domain containing 3
  ENST ID: ENST00000433972
  CDS Start-End: 1-456
aatcagcgcgctggctggagcgcgggtctgcccctctggacgcacatgcgcgctgtcctggctcgggagatggacggccgccgtgttttgggccggttctggagtggctggcggcggggcctgggtgtccgcccagtgcccgaggacgcaggctttggcaccgaagcccggcatcagaggcaaccccgcggctcctgccaacggtcggggcccctcggggaccagcccttcgcggggctgctgccaaaaaacctcagtcgggaggagctggttgatgcgctgcgggcagccgtggtggaccggaaaggacctctagtgacgttgaacaagccacagggtctaccagtgacaggaaaaccaggagagctgacgttgttctcagtgctgccagagctgagccagtccctagggctcagggagcaggagcttcaggttgtccgagcatctgggaagtaagtggtaggggtgacaggaagctaggagtacaggcatccatctgtggtggggaaacagctgcttggggataagctgagacattttccatgggaaggtttgagatcatagaggtggatacaagtactgtgaagaagaggaagccgatggctctgggttcaaatcctcaagtacaaatggtgtgataccaggcaaagcatgacacctccctgacgctgggcacagtgactcacacctgtaatcccaacacttctggaggccaaggcaagaggatcacttgagcccaggagttcgagaccagcctgggcaaaatagaccccatctctggaaaaacaacaacaaaactttccgcgtggtggctcatgcctataatcaataggactttgggaggccgaggtgggaggattgcttgagtccagaagttcaagaccagcctgggcaacatggcaaaaccctatctttacttaaaaaacaaaataaaacacacacacacacacacacaaaaacctagctgggcagagcagcacatgcctgtagtgctcgggtggctgagatgggagaatcacctgagctcagaagatggcagctgcaataagctgagatcccgccactgtacgcaagcctaaacaacctgaatgagaccccgtctcaaaaaaacaaaacaaaacaaataccctccctgagcttcagttcccctaatggtaaaatagagaaaataataccta

SEQ ID NO: 178012 - DNA, 817 bp, Homo sapiens
  Payload ID: 14919
  Gene Symbol: RPUSD3
  Gene Name: RNA pseudouridylate synthase domain containing 3
  ENST ID: ENST00000451405
  CDS Start-End: 1-110
gggagatggacggccgccgtgttttgggccggttctggagtggctggcggcggggcctgggtgtccgcccagtgcccgaggacgcaggctttggcaccgaagcccggtgattaagtaccccctctctcatgcgggacggaggctagggcagggggaaggcacgtgcgggatctggatcaggtagatgttacccgaaaacagccccgttggcctctctgagcctcggtgccctccgctgtagaatgggaccggtcgtacctgaattttcgaggacctctagtgacgttgaacaagccacagggtctaccagtgacaggtatgggccggggatgtgggaagggaatgcagcggaagggggtttcgtgactgagggagggaaaagtgaaggcatgaagctttggcctcttgtaatttttctttcttactttccaggaaaaccaggagagctgacgttgttctcagtgctgccagagctgagccagtccctagggctcagggagcaggagcttcaggttgtccgagcatctgggaagtaagtggtaggggtgacaggaagctaggagtacaggcatccatctgtggtggggaaacagctgcttggggataagctgagacattttccatgggaaggtttgagatcatagaggtggatacaagtactgtgaagaagaggaagccgatggctctgggttcaaatcctcaagtacaaatggtgtgataccaggcaaagcatgacacctccctgacgctgggcacagtgactcacacctgtaatcccaacacttctggaggccaaggcaagaggatcacttgagcc

SEQ ID NO: 178013 - DNA, 807 bp, Homo sapiens
  Payload ID: 14919
  Gene Symbol: RPUSD3
  Gene Name: RNA pseudouridylate synthase domain containing 3
  ENST ID: ENST00000433555
  CDS Start-End: 1-307
tgttttgggccggttctggagtggctggcggcggggcctgggtgtccgcccagtgcccgaggacgcaggctttggcaccgaagcccggacctctagtgacgttgaacaagccacagggtctaccagtgacaggaaaaccaggagagctgacgttgttctcagtgctgccagagctgagccagtccctagggctcagggagcaggagcttcaggttgtccgagcatctgggaagtaagtggtaggggtgacaggaagctaggagtacaggcatccatctgtggtggggaaacagctgcttggggataagctgagacattttccatgggaaggtttgagatcatagaggtggatacaagtactgtgaagaagaggaagccgatggctctgggttcaaatcctcaagtacaaatggtgtgataccaggcaaagcatgacacctccctgacgctgggcacagtgactcacacctgtaatcccaacacttctggaggccaaggcaagaggatcacttgagcccaggagttcgagaccagcctgggcaaaatagaccccatctctggaaaaacaacaacaaaactttccgcgtggtggctcatgcctataatcaataggactttgggaggccgaggtgggaggattgcttgagtccagaagttcaagaccagcctgggcaacatggcaaaaccctatctttacttaaaaaacaaaataaaacacacacacacacacacacaaaaacctagctgggcagagcagcacatgcctgtagtgctcgggtggctgagatgggagaatcacctgagctc

SEQ ID NO: 178014 - DNA, 1178 bp, Homo sapiens
  Payload ID: 14919
  Gene Symbol: RPUSD3
  Gene Name: RNA pseudouridylate synthase domain containing 3
  Uniprot ID: Q6P087
  ENST ID: ENST00000433535
  CDS Start-End: 1-1011
atgcgcgctgtcctggctcgggagatggacggccgccgtgttttgggccggttctggagtggctggcggcggggcctgggtgtccgcccagtgcccgaggacgcaggctttggcaccgaagcccggcatcagaggcaaccccgcggctcctgccaacggtcggggcccctcggggaccagcccttcgcggggctgctgccaaaaaacctcagtcgggaggagctggttgatgcgctgcgggcagccgtggtggaccggaaaggaaaaccaggagagctgacgttgttctcagtgctgccagagctgagccagtccctagggctcagggagcaggagcttcaggttgtccgagcatctgggaaagaaagctctgggcttgtactcctctccagctgtccccagacagctagtcgcctccagaagtacttcacccatgcacggagagcccaaaggcccacagccacctactgtgctgtcactgatgggatcccagctgcttctgaggggaagatccaggctgccctgaaactggaacacattgatggggtcaatctcacagttccagtgaaggccccatcccgaaaggacatcctggaaggtgtcaagaagactctcagtcactttcgtgtggtagccacaggctctggctgtgccctggtccagctgcagccactgacagtgttctccagtcaactacaggtgcacatggtactacagctctgccctgtgcttggggaccacatgtactctgcccgtgtgggcactgtcctgggccagcgatttctgctgccagctgagaacaacaagccccaaagacaggtcctggatgaagccctcctcagacgcctccacctgaccccctcccaggctgcccagctgcccttgcacctccacctacatcggctccttctcccaggcaccagggccagggacacccctgttgagctcctggcaccactgcccccttatttctccaggaccctacagtgcctggggctccgcttacaatagtcctccctctgttcctgaccccctcacacacactggaaagtgagggtgggggctctgcagtcagacaaacctaagatcacatcctggacaggccacttgcttgctgtgtggcattgggcaagtaactttacctctctggacttgtgataataaaagttcctacctca

SEQ ID NO: 178015 - DNA, 907 bp, Homo sapiens
  Payload ID: 14919
  Gene Symbol: RPUSD3
  Gene Name: RNA pseudouridylate synthase domain containing 3
  ENST ID: ENST00000427174
  CDS Start-End: 1-842
acggccgccgtgttttgggccggttctggagtggctggcggcggggcctgggtgtccgcccagtgcccgaggacgcaggctttggcaccgaagcccggcatcagaggcaaccccgcggctcctgccaacggtcggggcccctcggggaccagcccttcgcggggctgctgccaaaaaacctcagtcgggaggagctggttgatgcgctgcgggcagccgtggtggaccggaaaggacctctagtgacgttgaacaagccacagggtctaccagtgacaggaaaaccaggagagctgacgttgttctcagtgctgccagagctgagccagtccctagggctcagggagcaggagcttcaggttgtccgagcatctgggaaagaaagctctgggcttgtactcctctccagctgtccccagacagctagtcgcctccagaagtacttcacccatgcacggagagcccaaaggcccacagccacctactgtgctgtcactgatgggatcccagctgcttctgaggggaagatccaggctgccctgaaactggaacacattgatggggtcaatctcgcttgttcactcttggctggcaccacagacagttccagtgaaggccccatcccgaaaggacatcctggaaggtgtcaagaagactctcagtcactttcgtgtggtagccacaggctctggctgtgccctggtccagctgcagccactgacagtgttctccagtcaactacaggtgcacatggtactacagctctgccctgtgcttggggaccacatgtactctgcccgtgtgggcactgtcctgggccagcgatttctgctgccagctgagaacaacaagccccaaagacaggtcctggatgaagccctcctcagacgcctccacctgaccccct

SEQ ID NO: 178016 - DNA, 756 bp, Homo sapiens
  Payload ID: 14919
  Gene Symbol: RPUSD3
  Gene Name: RNA pseudouridylate synthase domain containing 3
  ENST ID: ENST00000423108
  CDS Start-End: 1-434
gtgctgtcactgatgggatcccagctgcttctgaggggaagatccaggctgccctgaaactggaacacattgatggggtcaatctcacagttccagtgaaggccccatcccgaaaggacatcctggaaggtgtcaagaagactctcagtcactttcgtgtggtagccacaggctctggctgtgccctggtccagctgcagccactgacagtgttctccagtcaactacaggtgcacatggtactacagctctgccctgtgcttggggaccacatgtactctgcccgtgtgggcactgtcctgggccagcgatttctgctgccagctgagaacaacaagccccaaagacaggtactccagcccacctgcctgctgctttctgaggggtggagggagaggtcctggatgaagccctcctcagacgcctccacctgaccccctcccaggctgcccagctgcccttgcacctccacctacatcggctccttctcccaggcaccagggccagggacacccctgttgagctcctggcaccactgcccccttatttctccaggaccctacagtgcctggggctccgcttacaatagtcctccctctgttcctgaccccctcacacacactggaaagtgagggtgggggctctgcagtcagacaaacctaagatcacatcctggacaggccacttgcttgctgtgtggcattgggcaagtaactttacctctctggacttgtgataataaaagttcctacctca

SEQ ID NO: 178017 - DNA, 1005 bp, Homo sapiens
  Payload ID: 14919
  Gene Symbol: RPUSD3
  Gene Name: RNA pseudouridylate synthase domain containing 3
  ENST ID: ENST00000424438
  CDS Start-End: 190-828
ggcctgggtgtccgcccagtgcccgaggacgcaggctttggcaccgaagcccggtgattaagtaccccctctctcatgcgggacggaggctagggcagggggaaggcacgtgcgggatctggatcaggtagatgttacccgaaaacagccccgttggcctctctgagcctcggtgccctccgctgtagaatgggaccggtcgtacctgaattttcgaggcatcagaggcaaccccgcggctcctgccaacggtcggggcccctcggggaccagcccttcgcggggctgctgccaaaaaacctcagtcgggaggagctggttgatgcgctgcgggcagccgtggtggaccggaaaggacctctagtgacgttgaacaagccacagggtctaccagtgacaggaaaaccaggagagctgacgttgttctcagtgctgccagagctgagccagtccctagggctcagggagcaggagcttcaggttgtccgagcatctgggaaagaaagctctgggcttgtactcctctccagctgtccccagacagctagtcgcctccagaagtacttcacccatgcacggagagcccaaaggcccacagccacctactgtgctgtcactgatgggatcccagctgcttctgaggggaagatccaggctgccctgaaactggaacacattgatggggtcaatctcacagttccagtgaaggccccatcccgaaaggacatcctggaaggtgtcaagaagactctcagtcactttcgtgtggtagccacaggctctggctgtgccctggtccagctgcagccactgacaggtcctggatgaagccctcctcagacgcctccacctgaccccctcccaggctgcccagctgcccttgcacctccacctacatcggctccttctcccaggcaccagggccagggacacccctgttgagctcctggcaccactgcccccttatttctccaggaccctacagtgcctggggctccgcttaca

SEQ ID NO: 178018 - DNA, 955 bp, Homo sapiens
  Payload ID: 14919
  Gene Symbol: RPUSD3
  Gene Name: RNA pseudouridylate synthase domain containing 3
  ENST ID: ENST00000418713
  CDS Start-End: 1-741
ctggctcgggagatggacggccgccgtgttttgggccggttctggagtggctggcggcggggcctgggtgtccgcccagtgcccgaggacgcaggctttggcaccgaagcccggcatcagaggcaaccccgcggctcctgccaacggtcggggcccctcggggaccagcccttcgcggggctgctgccaaaaaacctcagtcgggaggagctggttgatgcgctgcgggcagccgtggtggaccggaaaggacctctagtgacgttgaacaagccacagggtctaccagtgacaggaaaaccaggagagctgacgttgttctcagtgctgccagagctgagccagtccctagggctcagggagcaggagcttcaggttgtccgagcatctgggaaagaaagctctgggcttgtactcctctccagctgtccccagacagctagtcgcctccagaagtacttcacccatgcacggagagcccaaaggcccacagccacctactgtgctgtcactgatgggatcccagctgcttctgaggggaagatccaggctgccctgaaactggaacacattgatggggtcaatctcacagttccagtgaaggccccatcccgaaaggacatcctggaaggtgtcaagaagactctcagtcactttcgtgtggtagccacaggctctggctgtgccctggtccagctgcagccactgacaggtaggtctggcaccctagccagcctttaaaactgcacttgatttgggaggctgaggcaggtggatcacgaggtcaggagttcaagaccagtctggccaagatggtgaaaccctgtttcaactaaaaactacaaaaattagctgggcacggtggcaggcgcctgtaaaaccagctactcgggaggctgaggcaggagaatcgcttgaacctgggaggcagaagttgcaatgagccaagatcatg

SEQ ID NO: 178019 - DNA, 2512 bp, Homo sapiens
  Payload ID: 14920
  Gene Symbol: RPUSD4
  Gene Name: RNA pseudouridylate synthase domain containing 4
  Uniprot ID: Q96CM3
  ENST ID: ENST00000298317
  CDS Start-End: 55-1188
attgtagtcgcccttctccacgtggtcttggctcgccccgcccttccttgtaagatggcggcgcccaggtggagcgcgtcgggcccctggatccggggaaacggccaaggttgcgggagtctcttcactctcgtctcaaagccattttgtgccgctgccgctgcctctacggccataaatgcccagagattagcggagaagctccgagcccagaaacgggaacaagacacaaagaaggagccggtgtccacaaacgctgttcagcggagagtgcaagaaatagtgcggttcacacggcagctgcagcgagtccaccccaacgtgcttgctaaggcactgacccgaggaattctccaccaggacaagaaccttgtggtcatcaataagccctacggtctccctgtgcatggtggccctggggtccagctctgcatcactgatgtactacctatcctggcaaagatgcttcatggccacaaggcagagcccttgcatctgtgccaccggctggacaaggaaaccacaggtgtaatggtgttggcttgggacaaggacatggcacatcaagtccaagagttgtttagaacccgtcaggtggtgaagaagtactgggccatcactgtgcatgtccccatgccctcagcaggagtcgtggacatccccattgtggagaaggaggcgcaaggccagcagcaacaccacaagatgacattgtccccgagctaccgcatggacgatgggaaaatggtgaaagtgcggcgcagccggaatgcgcaagttgctgtaactcagtaccaggtgctcagcagcactctctcctccgccctcgtggagctccagcccatcactggaataaaacatcagcttcgagttcacttgtcttttggattggattgtccaatccttggtgatcacaagtactcagactggaataggttggccccccagaagctgtctgtgggcaccctgaagaagctggggctagaacagtcgaaggcccgctacatcccccttcacctgcacgcccggcagctgatcctgcctgccctggggtccgggaaggaggaactcaacttggtctgcaaacttcctcgcttctttgtgcattccctgcaccgcctgcgtttagagatgccaaatgaggatcaaaatgagaacaatgaagccaagtgtctgggagcacagtgaagaccatgggagcaccctggcacctgggagcacagtgaagaccctgagagcatcctggcacctgggagcgcaggttggcccctgaactgttctttgtttacaggactctgctaacttctcacttggaacagactgcgtaagagccaggtgggataaggtaaagcaactcagctgctacagggcttttaatggagaacaaagtctatttactgatagtttggctgcactgtggaaaagcctgctggaagtctccctgccgtgggctctcattgccaatatggaacagagcccagggccaggcagactggggcagtgactggaaaaggaaaactaaaggtcagaatccgggatcaggaactgtttttatccagcagtgaagctcttgagctcttaggaaggttcccgtggttggaaagaacataatggttaacaaatatcacagcatccagggattgcccagctatagtgtgggtgccctactgaactctgattagggaacctgtataagggtattgagtgtgaggttgaggtgggacatttgctgagcaaggagaaccgatgtgaatggcaggcagataacatgcacacatgaagctggctgggtgtaaggcagtagcggggagcggcatgctgtctaacagctgttagctccagctggttgttgccatgtgggaatggattttctcatttcttcagagaagctggaaacctagatatttatgtgaaacctcccagtgtattgccaactaaatcaaatttttaaagatgcttaggcacctaagcaaataatacttagaggttgaatttggtctacaggctagcagtttgcagtctatgtttaatgaatggtatagaagtttggggaaaggtgccatcttgaaaattctggatcagtggttggcattttcgctgcgtgtagtatgtatcctttctaggcttggagatggctttggttggtccgtgaatgtagttatgagagtgctgccattaaaaaatcaaaaatctctgttgtggaagcgtatcttctgttcttaggtctcaggaaggagagggctatactgaacaccattagggatagatggaaatgaccttggcctccctgctcagctggtccatctagtttccaccttgtttcttgcaaacaaatacacctcacactactttttctttctgacagagttggagtgacagcacagttaggggggtacaccccgggacagtctttatatgttccctctgtatagatgatgccactttctagccctttccctgtctccatggtacccattactgtgcataataaatttaactttgaaagcacaga

SEQ ID NO: 178020 - DNA, 2053 bp, Homo sapiens
  Payload ID: 14920
  Gene Symbol: RPUSD4
  Gene Name: RNA pseudouridylate synthase domain containing 4
  Uniprot ID: Q96CM3
  ENST ID: ENST00000533628
  CDS Start-End: 9-1049
cttgtaagatggcggcgcccaggtggagcgcgtcgggcccctggatccggggaaacggccaaggttgcgggagtctcttcactctcgtctcaaagccattttgtgccgctgccgctgcctctacggccataaatgcccagagattagcggagaagctccgagcccagaaacgggaacaagacacaaagaaggagccggtgtccacaaacgctgttcagcggagagtgcaagaaatagtgcggttcacacggcagctgcagcgagtccaccccaacgtgcttgctaaggcactgacccgaggaattctccaccaggacaagaaccttgtggtcatcaataagccctacggtctccctgtgcatggtggccctggggtccagctctgcatcactgatgtactacctatcctggcaaagatgcttcatggccacaaggcagagcccttgcatctgtgccaccggctggacaaggaaaccacaggtgtaatggtgttggcttgggacaaggacatggcacatcaagtccaagagttgtttagaacccgtcaggtggtgaagaagtactgggccatcactgtgcatgtccccatgccctcagcaggagtcgtggacatccccattgtggagaaggaggcgcaagttgctgtaactcagtaccaggtgctcagcagcactctctcctccgccctcgtggagctccagcccatcactggaataaaacatcagcttcgagttcacttgtcttttggattggattgtccaatccttggtgatcacaagtactcagactggaataggttggccccccagaagctgtctgtgggcaccctgaagaagctggggctagaacagtcgaaggcccgctacatcccccttcacctgcacgcccggcagctgatcctgcctgccctggggtccgggaaggaggaactcaacttggtctgcaaacttcctcgcttctttgtgcattccctgcaccgcctgcgtttagagatgccaaatgaggatcaaaatgagaacaatgaagccaagtgtctgggagcacagtgaagaccatgggagcaccctggcacctgggagcacagtgaagaccctgagagcatcctggcacctgggagcgcaggttggcccctgaactgttctttgtttacaggactctgctaacttctcacttggaacagactgcgtaagagccaggtgggataaggtaaagcaactcagctgctacagggcttttaatggagaacaaagtctatttactgatagtttggctgcactgtggaaaagcctgctggaagtctccctgccgtgggctctcattgccaatatggaacagagcccagggccaggcagactggggcagtgactggaaaaggaaaactaaaggtcagaatccgggatcaggaactgtttttatccagcagtgaagctcttgagctcttaggaaggttcccgtggttggaaagaacataatggttaacaaatatcacagcatccagggattgcccagctatagtgtgggtgccctactgaactctgattagggaacctgtataagggtattgagtgtgaggttgaggtgggacatttgctgagcaaggagaaccgatgtgaatggcaggcagataacatgcacacatgaagctggctgggtgtaaggcagtagcggggagcggcatgctgtctaacagctgttagctccagctggttgttgccatgtgggaatggattttctcatttcttcagagaagctggaaacctagatatttatgtgaaacctcccagtgtattgccaactaaatcaaatttttaaagatgcttaggcacctaagcaaataatacttagaggttgaatttggtctacaggctagcagtttgcagtctatgtttaatgaatggtatagaagtttggggaaaggtgccatcttgaaaattctggatcagtggttggcattttcgctgcgtgtagtatgtatcctttctaggcttggagatggctttggttggtccgtgaatgtagttatgagagtgctgccattaaaaaatcaaaaatc

SEQ ID NO: 178021 - DNA, 582 bp, Homo sapiens
  Payload ID: 14920
  Gene Symbol: RPUSD4
  Gene Name: RNA pseudouridylate synthase domain containing 4
  ENST ID: ENST00000532674
  CDS Start-End: 55-582
attgtagtcgcccttctccacgtggtcttggctcgccccgcccttccttgtaagatggcggcgcccaggtggagcgcgtcgggcccctggatccggggaaacggccaaggttgcgggagtctcttcactctcgtctcaaagccattttgtgccgctgccgctgcctctacggccataaatgcccagagattagcggagaagctccgagcccagaaacgggaacaagacacaaagaaggagccggtgtccacaaacgctgttcagcggagagtgcaagaaatagtgcggttcacacggcagctgcagcgagtccaccccaacgtgcttgctaaggcactgacccgaggaattctccaccaggacaagaaccttgtggtcatcaataagccctacggtctccctgtgcatggtggccctggggtccagctctgcatcactgatgtactacctatcctggcaaagatgcttcatggccacaaggcagagcccttgcatctgtgccaccggctggacaaggaaaccacaggtgctcagcagcactctctcctccgccctcgtggagctccagcccatcactggaat

SEQ ID NO: 178022 - DNA, 758 bp, Homo sapiens
  Payload ID: 14921
  Gene Symbol: RCL1
  Gene Name: RNA terminal phosphate cyclase-like 1
  Uniprot ID: Q9Y2P8
  ENST ID: ENST00000381728
  CDS Start-End: 178-741
agtgggcagcctcagacctcagaaggacagcacctgcttggtccaaagggtatgagattcaggactgtttgtctaagctgtctgtggtcaaaagtacattctggactgaagagatggtgatgtaactgggctgtgtgtgtattgaaaaatccctctttgctctttcctcatttcagaatgacatccttaactccaggctgcaggtactctgtacgtgtgtcacctcagatggcgaaccggattgtggattctgcaaggagcatcctcaacaagttcatacctgatatctatatttacacagatcacatgaaaggagtcaactctgggaagtctccgggctttgggttgtcactggttgctgagaccaccagtggcaccttcctcagtgctgaactggcctccaacccccagggccagggagcagcagtacttccagaggaccttggcaggaactgtgcccggctgctgctggaggaaatctacaggggtggatgcgtagactcgaccaaccaaagcctggcgctactactcatgacccttggacagcaggatgtttccaaagtcctgctaggccctctctctccctacacgatagaatttttgcggcatttgaagagctttttccagattatgtttaaaattgaaaccaagccatgtggtgaagaactcaagggtggggataaagtgctgatgacctgtgttggcattggtttctccaaccttagcaagaccctcaagtgataaccatcacaagataa

SEQ ID NO: 178023 - DNA, 801 bp, Homo sapiens
  Payload ID: 14921
  Gene Symbol: RCL1
  Gene Name: RNA terminal phosphate cyclase-like 1
  Uniprot ID: Q9Y2P8
  ENST ID: ENST00000381730
  CDS Start-End: 41-604
cgtggactgtcttttcagaggcctcgaatagcttgaacaaatgacatccttaactccaggctgcaggtactctgtacgtgtgtcacctcagatggcgaaccggattgtggattctgcaaggagcatcctcaacaagttcatacctgatatctatatttacacagatcacatgaaaggagtcaactctgggaagtctccgggctttgggttgtcactggttgctgagaccaccagtggcaccttcctcagtgctgaactggcctccaacccccagggccagggagcagcagtacttccagaggaccttggcaggaactgtgcccggctgctgctggaggaaatctacaggggtggatgcgtagactcgaccaaccaaagcctggcgctactactcatgacccttggacagcaggatgtttccaaagtcctgctaggccctctctctccctacacgatagaatttttgcggcatttgaagagctttttccagattatgtttaaaattgaaaccaagccatgtggtgaagaactcaagggtggggataaagtgctgatgacctgtgttggcattggtttctccaaccttagcaagaccctcaagtgataaccatcacaagataaggccccaatgcctacagacaaagcagaagctgccacggacaccaatgggaccaagtccaaatggattaatccaggacagaatagccacttgcttaattttctgtgaagaaatatcaatatacaaataaaagacatccctgtagcatatggtttccagctgtttctccagtggcattgcca

SEQ ID NO: 178024 - DNA, 804 bp, Homo sapiens
  Payload ID: 14921
  Gene Symbol: RCL1
  Gene Name: RNA terminal phosphate cyclase-like 1
  ENST ID: ENST00000381732
  CDS Start-End: 117-644
cagcccgagccgccgccgtcggtgtcgccgccaccaccaccatcggagtcacgagtcccgcgtctgtccgaagtcgccgctctcgggctgctcacgtctcttcggagagcgcgcacatggcgactcaggcgcactccctcagctacgcagggtgcaacttcttgcgccaacgtctggtcctgtctaccctgagcgggcgccccgtcaaaatccgaaagattcgggccagagacgacaacccgggcctccgagattttgaagccagcttcataaggctattggacaaaataacgaatggttctcgaattgaaataaaccaaacaggaacaaccttatattatcagcctggcctcctgtatggtggatctgtggaacatgactgtagcgtccttcgtggcattgggtattacctggagagtcttctttgcttggctccatttatgaagcacccgttaaaaatagttctacgaggagtgaccaatgatcaggttgacccttcagtgagtattgagaacaaaccgtggtgtggtttttgttttgtctcttgtcacaacccaacttgtgagaaaaaagttccttataaggcacagttttattacaaatgtatattgcttttgttatttactttgagatttagaggttaatcactccaggaggcagatgaaccaaaacttaggatcatcaaattcaggactattgttaacagttaccaaggtgccttttgttgttacctaagaaccttcaaaacagatgctctccgtctcatcatagttgacatgaactatagttctgctggctgtatat

SEQ ID NO: 178025 - DNA, 2134 bp, Homo sapiens
  Payload ID: 14921
  Gene Symbol: RCL1
  Gene Name: RNA terminal phosphate cyclase-like 1
  Uniprot ID: Q9Y2P8
  ENST ID: ENST00000381750
  CDS Start-End: 224-1345
gaggcggggaggtggccactggctccgccccgctcccctctgacccggtgtctagtctctccgtcttcctgttccaaaccacgtggacgcgtctgggctgctggaggcagcccgagccgccgccgtcggtgtcgccgccaccaccaccatcggagtcacgagtcccgcgtctgtccgaagtcgccgctctcgggctgctcacgtctcttcggagagcgcgcacatggcgactcaggcgcactccctcagctacgcagggtgcaacttcttgcgccaacgtctggtcctgtctaccctgagcgggcgccccgtcaaaatccgaaagattcgggccagagacgacaacccgggcctccgagattttgaagccagcttcataaggctattggacaaaataacgaatggttctcgaattgaaataaaccaaacaggaacaaccttatattatcagcctggcctcctgtatggtggatctgtggaacatgactgtagcgtccttcgtggcattgggtattacctggagagtcttctttgcttggctccatttatgaagcacccgttaaaaatagttctacgaggagtgaccaatgatcaggttgacccttcagttgatgttcttaaggcaacagcactccctttgttgaaacaatttgggattgatggtgaatcatttgaactgaagattgtgcgacggggaatgcctcccggaggaggaggcgaagtggttttctcatgtcctgtgaggaaggtcttgaagcccattcaactcacagatccaggaaaaatcaaacgtattagaggaatggcgtactctgtacgtgtgtcacctcagatggcgaaccggattgtggattctgcaaggagcatcctcaacaagttcatacctgatatctatatttacacagatcacatgaaaggagtcaactctgggaagtctccgggctttgggttgtcactggttgctgagaccaccagtggcaccttcctcagtgctgaactggcctccaacccccagggccagggagcagcagtacttccagaggaccttggcaggaactgtgcccggctgctgctggaggaaatctacaggggtggatgcgtagactcgaccaaccaaagcctggcgctactactcatgacccttggacagcaggatgtttccaaagtcctgctaggccctctctctccctacacgatagaatttttgcggcatttgaagagctttttccagattatgtttaaaattgaaaccaagccatgtggtgaagaactcaagggtggggataaagtgctgatgacctgtgttggcattggtttctccaaccttagcaagaccctcaagtgataaccatcacaagataaggccccaatgcctacagacaaagcagaagctgccacggacaccaatgggaccaagtccaaatggattaatccaggacagaatagccacttgcttaattttctgtgaagaaatatcaatatacaaataaaagacatccctgtagcatatggtttccagctgtttctccagtggcattgccattgcccaggaggggcccagtcaccatgagagctcccttgccttacctggaggaagaatgtgccttcaggccacagtcgtgctgctagaacagtctcgtagctgcagttcagctgtgcttcctcagcctactatcataggcttcctcagccctctgtcatatggctgttttgcaaacctgtggagtctgttactgttctttctgcaaggactcacctccttgagccttggtttttgttgtagggattaaatgagataatatgagtggcagctcttcatgagtcctgcagtgctaagcaaatgtcagaaattggtgtattagactatttatctttgatcttctgaatggattgctgtcatggacacggacacggatcttcatctggttcattgtatttatatgtgagggatggatggctgcggggctccaagtaagttattgggatgtttttatattccaggtgtgctgtacattcttattttattttcacaatagctctgtgatgtaagtgctatctccatgagaaaattcataaagggtgttttgttcctttgaaatgtataatgtaaagacattaaatctcctcatttaag

SEQ ID NO: 178026 - DNA, 1459 bp, Homo sapiens
  Payload ID: 14921
  Gene Symbol: RCL1
  Gene Name: RNA terminal phosphate cyclase-like 1
  Uniprot ID: Q9Y2P8
  ENST ID: ENST00000448872
  CDS Start-End: 96-659
ggattacagaggtaaagcccttgcccttatagagtgtgtggtctcattgaagagcaagaacaaaatgtgcatatgtgaagagagatgtatgcagaatgacatccttaactccaggctgcaggtactctgtacgtgtgtcacctcagatggcgaaccggattgtggattctgcaaggagcatcctcaacaagttcatacctgatatctatatttacacagatcacatgaaaggagtcaactctgggaagtctccgggctttgggttgtcactggttgctgagaccaccagtggcaccttcctcagtgctgaactggcctccaacccccagggccagggagcagcagtacttccagaggaccttggcaggaactgtgcccggctgctgctggaggaaatctacaggggtggatgcgtagactcgaccaaccaaagcctggcgctactactcatgacccttggacagcaggatgtttccaaagtcctgctaggccctctctctccctacacgatagaatttttgcggcatttgaagagctttttccagattatgtttaaaattgaaaccaagccatgtggtgaagaactcaagggtggggataaagtgctgatgacctgtgttggcattggtttctccaaccttagcaagaccctcaagtgataaccatcacaagataaggccccaatgcctacagacaaagcagaagctgccacggacaccaatgggaccaagtccaaatggattaatccaggacagaatagccacttgcttaattttctgtgaagaaatatcaatatacaaataaaagacatccctgtagcatatggtttccagctgtttctccagtggcattgccattgcccaggaggggcccagtcaccatgagagctcccttgccttacctggaggaagaatgtgccttcaggccacagtcgtgctgctagaacagtctcgtagctgcagttcagctgtgcttcctcagcctactatcataggcttcctcagccctctgtcatatggctgttttgcaaacctgtggagtctgttactgttctttctgcaaggactcacctccttgagccttggtttttgttgtagggattaaatgagataatatgagtggcagctcttcatgagtcctgcagtgctaagcaaatgtcagaaattggtgtattagactatttatctttgatcttctgaatggattgctgtcatggacacggacacggatcttcatctggttcattgtatttatatgtgagggatggatggctgcggggctccaagtaagttattgggatgtttttatattccaggtgtgctgtacattcttattttattttcacaatagctctgtgatgtaagtgctatctccatgagaaaattcataaagggtgttttgttcctttgaaatgtataatgtaaagacattaaatctcctcatttaaggatctaagtgt

SEQ ID NO: 178027 - DNA, 1644 bp, Homo sapiens
  Payload ID: 14921
  Gene Symbol: RCL1
  Gene Name: RNA terminal phosphate cyclase-like 1
  ENST ID: ENST00000442869
  CDS Start-End: 411-1058
ccgagccgccgccgtcggtgtcgccgccaccaccaccatcggagtcacgagtcccgcgtctgtccgaagtcgccgctctcgggctgctcacgtctcttcggagagcgcgcacatggcgactcaggcgcactccctcagctacgcagggtgcaacttcttgcgccaacgtctggtcctgtctaccctgagcgggcgccccgtcaaaatccgaaagattcgggccagagacgacaacccgggcctccgagattttgaagccagcttcataaggctattggacaaaataacgaatggttctcgaattgaaataaaccaaacaggttgatgttcttaaggcaacagcactccctttgttgaaacaatttgggattgatggtgaatcatttgaactgaagattgtgcgacggggaatgcctcccggaggaggaggcgaagtggttttctcatgtcctgtgaggaaggtcttgaagcccattcaactcacagatccaggaaaaatcaaacgtattagaggaatggcgtactctgtacgtgtgtcacctcagatggcgaaccggattgtggattctgcaaggagcatcctcaacaagttcatacctgatatctatatttacacagatcacatgaaaggagtcaactctgggaagtctccgggctttgggttgtcactggttgctgagaccaccagtggcaccttcctcagtgctgaactggcctccaacccccagggccagggagcagcagtacttccagaggaccttggcaggaactgtgcccggctgctgctggaggaaatctacaggggtggatgcgtagactcgaccaaccaaagcctggcgctactactcatgacccttggacagcaggatgtttccaaagtcctgctaggccctctctctccctacacgatagaatttttgcggcatttgaagagctttttccagattatgtttaaaattgaaaccaagccatgtggtgaagaactcaagggtggggataaagtgctgatgacctgtgttggcattggtttctccaaccttagcaagaccctcaagtgataaccatcacaagataaggccccaatgcctacagacaaagcagaagctgccacggacaccaatgggaccaagtccaaatggattaatccaggacagaatagccacttgcttaattttctgtgaagaaatatcaatatacaaataaaagacatccctgtagcatatggtttccagctgtttctccagtggcattgccattgcccaggaggggcccagtcaccatgagagctcccttgccttacctggaggaagaatgtgccttcaggccacagtcgtgctgctagaacagtctcgtagctgcagttcagctgtgcttcctcagcctactatcataggcttcctcagccctctgtcatatggctgttttgcaaacctgtggagtctgttactgttctttctgcaaggactcacctccttgagccttggtttttgttgtagggattaaatgagataatatgagtggcagctcttcatgagtcctgcagtgctaagcaaatgtcagaaattggtgtattagactatttatctttgatcttctgaatggattgctgtcatggacacggacacggatcttcatctggttcat

SEQ ID NO: 178028 - DNA, 497 bp, Homo sapiens
  Payload ID: 14921
  Gene Symbol: RCL1
  Gene Name: RNA terminal phosphate cyclase-like 1
  ENST ID: ENST00000441844
  CDS Start-End: 85-497
gaggtaaagcccttgcccttatagagtgtgtggtctcattgaagagcaagaacaaaatgtgcatatgtgaagagagatgtatgaatgacatccttaactccaggctgcaggtactctgtacgtgtgtcacctcagatggcgaaccggattgtggattctgcaaggagcatcctcaacaagttcatacctgatatctatatttacacagatcacatgaaaggagtcaactctgggaagtctccgggctttgggttgtcactggttgctgagaccaccagtggcaccttcctcagtgctgaactggcctccaacccccagggccagggagcagcagtacttccagaggaccttggcaggaactgtgcccggctgctgctggaggaaatctacaggggtggatgcgtagactcgaccaaccaaagcctggcgctactactcatgacccttggacagcaggatgtttccaaagtcctgctaggccctctctctccctacac

SEQ ID NO: 178029 - DNA, 1872 bp, Homo sapiens
  Payload ID: 14922
  Gene Symbol: RNPC3
  Gene Name: RNA-binding region (RNP1, RRM) containing 3
  Uniprot ID: Q96LT9
  ENST ID: ENST00000423855
  CDS Start-End: 101-1654
tagcgcgaggcggaaaaaatatttctcccagcttgtgttgatgccgcgattttgactgagacttcttcccacgatttctgtttttgcttctccaaggaaaatggcagctcccgagcagccgcttgcgatatcaaggggatgcacgagctcctcctcgctttccccgcctcggggcgaccgaacccttctggtcaggcacctgccggctgagcttactgctgaggagaaagaggacttgctgaagtacttcggggctcagtctgtgcgggtcctgtcagataaggggcgactgaaacatacagcttttgccacattccctaatgaaaaagcagctataaaggcattgacaagactccatcaactgaaacttttaggtcatactttagtcgttgaatttgcaaaagagcaagatcgagttcactccccatgtcccacttcaggctctgaaaaaaaaaaaaggtctgatgaccctgtcgaagatgataaagaaaaaaaagaacttggttatttaacagtagaaaatggaattgcaccaaaccatgggctgacttttcctttaaattcatgcctcaagtatatgtacccaccaccttccagcacaatcctagcaaacattgtaaatgccttggcaagcgtgcctaagttctatgtacaggtccttcatcttatgaataaaatgaatttgcccacaccttttggaccaattactgcgcgacctcccatgtatgaagactatatgccattgcatgcacctcttccacccacatctcctcagccacctgaggaacctcctttgccagacgaggatgaggaattatctagtgaagaatcagaatatgaaagcactgatgatgaggaccgacagagaatgaacaaattaatggaactagcaaatcttcagcccaaaagacctaaaacaataaagcagcgccatgtgagaaaaaagagaaaaataaaggatatgttgaatacacctttgtgtccttcacacagcagtttacatccagtgctgttaccttcagatgtatttgaccaaccacaacctgtaggtaacaaaagaattgaattccatatatctaccgacatgccagctgcatttaagaaagatttagaaaaggaacaaaattgtgaggaaaaaaatcatgatttacctgctactgaagttgatgcatccaatataggatttggaaaaatcttccccaaacctaatttggacatcacagaggagattaaagaagactctgatgaaatgccttcagaatgtatttctagaagggaattggaaaagggcagaatttctagagaagaaatggaaacactttcagttttcagaagttatgaaccgggtgaaccaaactgtagaatttatgtaaagaatttagctaaacatgttcaagaaaaggaccttaaatatatttttggaagatatgttgacttttcatcagaaacacagcggatcatgtttgatatacgtttgatgaaagaaggtcgtatgaaaggacaagctttcattggacttcctaatgaaaaagcagcagcaaaagccttaaaggaagctaatggatatgtgctttttggaaaacccatggtggttcagtttgctcgatctgctagaccaaaacaagatcctaaggaaggaaaaagaaagtgttaaaaattaataaaggtttttttgaatcccgtgtccttcaagtgctttctaactttgagaggaagaaattgaccacctggactatggaactgtgcgtaacagctttgaaagtgtatttaaaaattaaatctatatgcctttaaatcagtgaattggaaacatattacatgtattttaatgattttcctcaaatataataaattgtttcctttccaataaaa

SEQ ID NO: 178030 - DNA, 686 bp, Homo sapiens
  Payload ID: 14922
  Gene Symbol: RNPC3
  Gene Name: RNA-binding region (RNP1, RRM) containing 3
  ENST ID: ENST00000531883
  CDS Start-End: 132-686
gcgcagtcgtgagtcctcttgtccttgagcgtcaaccttctttccctgaagtggctggggttcctgtttccttctttgattgacaacttgtgttaaccctcgcacatctctgggccaatttttgcttgaaaatggcagctcccgagcagccgcttgcgatatcaaggggatgcacgagctcctcctcgctttccccgcctcggggcgaccgaacccttctggtcaggcacctgccggctgagcttactgctgaggagaaagaggacttgctgaagtacttcggggctcagtctgtgcgggtcctgtcagataaggggcgactgaaacatacagcttttgccacattccctaatgaaaaagcagctataaaggcattgacaagactccatcaactgaaacttttaggtcatactttagtcgttgaatttgcaaaagagcaagatcgagttcactccccatgtcccacttcaggctctgaaaaaaaaaaaaggtctgatgaccctgtcgaagatgataaagaaaaaaaagaacttggttatttaacagtagaaaatggaattgcaccaaaccatgggctgacttttcctttaaattcatgcctcaagtatatgtacccaccaccttccagcacaatcctagcaaacattgtaaatgccttggcaagcgtgcctaagttctatgtacag

SEQ ID NO: 178031 - DNA, 3641 bp, Homo sapiens
  Payload ID: 14922
  Gene Symbol: RNPC3
  Gene Name: RNA-binding region (RNP1, RRM) containing 3
  Uniprot ID: Q96LT9
  ENST ID: ENST00000533099
  CDS Start-End: 237-1790
gcagtcgtgagtcctcttgtccttgagcgtcaaccttctttccctgaagtggctggggttcctgtttccttctttgattgacaacttgtgttaaccctcgcacatctctgggccaatttttgcttgtaagtctttccggagacccctggaatttaaatcattagcaccgcgcccttccccgaagagtcttcgaagggttgccgcttttcggtggcgcagttctcgcgagaaggaaaatggcagctcccgagcagccgcttgcgatatcaaggggatgcacgagctcctcctcgctttccccgcctcggggcgaccgaacccttctggtcaggcacctgccggctgagcttactgctgaggagaaagaggacttgctgaagtacttcggggctcagtctgtgcgggtcctgtcagataaggggcgactgaaacatacagcttttgccacattccctaatgaaaaagcagctataaaggcattgacaagactccatcaactgaaacttttaggtcatactttagtcgttgaatttgcaaaagagcaagatcgagttcactccccatgtcccacttcaggctctgaaaaaaaaaaaaggtctgatgaccctgtcgaagatgataaagaaaaaaaagaacttggttatttaacagtagaaaatggaattgcaccaaaccatgggctgacttttcctttaaattcatgcctcaagtatatgtacccaccaccttccagcacaatcctagcaaacattgtaaatgccttggcaagcgtgcctaagttctatgtacaggtccttcatcttatgaataaaatgaatttgcccacaccttttggaccaattactgcgcgacctcccatgtatgaagactatatgccattgcatgcacctcttccacccacatctcctcagccacctgaggaacctcctttgccagacgaggatgaggaattatctagtgaagaatcagaatatgaaagcactgatgatgaggaccgacagagaatgaacaaattaatggaactagcaaatcttcagcccaaaagacctaaaacaataaagcagcgccatgtgagaaaaaagagaaaaataaaggatatgttgaatacacctttgtgtccttcacacagcagtttacatccagtgctgttaccttcagatgtatttgaccaaccacaacctgtaggtaacaaaagaattgaattccatatatctaccgacatgccagctgcatttaagaaagatttagaaaaggaacaaaattgtgaggaaaaaaatcatgatttacctgctactgaagttgatgcatccaatataggatttggaaaaatcttccccaaacctaatttggacatcacagaggagattaaagaagactctgatgaaatgccttcagaatgtatttctagaagggaattggaaaagggcagaatttctagagaagaaatggaaacactttcagttttcagaagttatgaaccgggtgaaccaaactgtagaatttatgtaaagaatttagctaaacatgttcaagaaaaggaccttaaatatatttttggaagatatgttgacttttcatcagaaacacagcggatcatgtttgatatacgtttgatgaaagaaggtcgtatgaaaggacaagctttcattggacttcctaatgaaaaagcagcagcaaaagccttaaaggaagctaatggatatgtgctttttggaaaacccatggtggttcagtttgctcgatctgctagaccaaaacaagatcctaaggaaggaaaaagaaagtgttaaaaattaataaagaagcattcctgcgtaaatactgctgtaatactgtcatgcaaagtgtatcctttcttgtcgtatcctttttggggcagtgtttttttgtttttttcctagaaatgtttgtccttcccccacctgttgatccaggttaaggaatacttttttacactttattcaaatgaaatatttctaaaattatttgtatagactgaacagatcttttatgtgtttttagatttgttgttgaattttctgtgctgtcctttatataattttttgagggaaagttagtgaatcaggtcaacttacttagagaatgtgttcatttactttaacccagaatacagtcttgtttcttctatttgtatgtttcctaaacctaattcaataacatatgctttctgttgtgtaatatatctggtttaggtatttataatgtgtttaaaatttgggcaaaggaaatgtttttcttttaaaaagtacttacattgaaaattaagatgtctggattactatgtaaattctagagagtagcagacctctcatctgaagtcttagtgaatctcttttgacatagatagcaatagaagtatctttcttctttcccctttctttttctaaacaagagaagaaaagcgtaatagaggggagaacacataatgcccactaagggtagtgcattaaggaaaaacagtcttggcaggtatataggaatagtggtttccagactggttgatgaccgtaatcaccaagaacagtggttctcagtcttggctgcacattgcagtgatctggaacttaaatactaattttaaaagggtgcagtggctcatacctgtaatcccagcactttgcaagtccgagatgggagaatcacttgagcccaggagtttgagaccagcctgggcaatgtagggagaccctgtccctacaaaaaatacaaaaattagccaagtgtggtggcttgcacctctggtctcagctacttgggatgctaaggcaggaggattacttgagccccagaggttgaggttgcagtgaaccatgatcacaccactgcattctagcctgggtgacagagtgagaccctctccctcctaaaaaaatccttaagaaatatattgatgcttggttcctttggtcagaattttgatttaaggtgttgggagtgtagcacagatgttggaataaacctctcaaactgattttaatatacaaacaaggtcgagaaccaccaaggaagagtttttatgcataaagattcctgtactctaccctagaactaatacatctgaatctctgggaatggagtataacaatcagatttgaaaaggtttctttagtaattttaaggactgaccagtttagacactgctttgttagagtaaaatgattaggtacctagtatcaacctagccatccaaccttatattaataactaggaaaataaagggttggagcctctgtgtttctttgttgaaaaatctgctactattattagatctgtgaaaacaattgaaaattcggttattatcaccttaaaagtacaaaacctatagattttgaaaatgtaattatttttctgtaggcatagttaaaaagattttgtaaatgttataaatcagtttctttataagcggtttatttagataaattttgttatactgacatgattcactaattttctaaatataaatggttcagctcttagttatttttaaactaatgacctgtgttatacttcctatttttaatgggcttttatgatgttttaggtttttttgaatcccgtgtccttcaagtgctttctaactttgagaggaagaaattgaccacctggactatggaactgtg

SEQ ID NO: 178032 - DNA, 237 bp, Homo sapiens
  Payload ID: 14922
  Gene Symbol: RNPC3
  Gene Name: RNA-binding region (RNP1, RRM) containing 3
  ENST ID: ENST00000532117
  CDS Start-End: 1-57
tttgctcgatctgctagaccaaaacaagatcctaaggaaggaaaaagaaagtgttaaaaattaataaagaagcattcctgcgtaaatactgctgtaatactgtcatgcaaagtgtatcctttcttgtctcttgtttcttctatttgtatgtttcctaaacctaattcaataacatatgctttctgttgtgtaatatatctggtttaggtatttataatgtgtttaaaatttgggcaa

SEQ ID NO: 178033 - DNA, 547 bp, Homo sapiens
  Payload ID: 14922
  Gene Symbol: RNPC3
  Gene Name: RNA-binding region (RNP1, RRM) containing 3
  ENST ID: ENST00000524641
  CDS Start-End: 1-547
taatggaactagcaaatcttcagcccaaaagacctaaaacaataaagcagcgccatgtgagaaaaaagagaaaaataaaggatatgttgaatacacctttgtgtccttcacacagcagtttacatccagtgctgttaccttcagatgtatttgaccaaccacaacctgtaggtaacaaaagaattgaattccatatatctaccgacatgccagctgcatttaagaaagatttagaaaaggaacaaaattgtgaggaaaaaaatcatggatttggaaaaatcttccccaaacctaatttggacatcacagaggagattaaagaagactctgatgaaatgccttcagaatgtatttctagaagggaattggaaaagggcagaatttctagagaagaaatggaaacactttcagttttcagaagttatgaaccgggtgaaccaaactgtagaatttatgtaaagaatttagctaaacatgttcaagaaaaggaccttaaatatatttttggaagatatgttgacttttcatcagaaacacagcggatcat

SEQ ID NO: 178034 - DNA, 768 bp, Homo sapiens
  Payload ID: 14922
  Gene Symbol: RNPC3
  Gene Name: RNA-binding region (RNP1, RRM) containing 3
  ENST ID: ENST00000527062
  CDS Start-End: 353-768
ttcctgtttccttctttgattgacaacttgtgttaaccctcgcacatctctgggccaatttttgcttaaacatacagcttttgccacattccctaatgaaaaagcagctataaaggcattgacaagactccatcaactgaaacttttaggtcatactttagtcgttgaatttgcaaaagagcaagatcgagttcactccccatgtcccacttcaggctctgaaaaaaaaaaaaggtctgatgaccctgtcgaagatgataaagaaaaaaaagaacttggttatttaacagtagaaaatggaattgcaccaaaccatgggctgacttttcctttaaattcatgcctcaagtatatgtacccaccaccttccagcacaatcctagcaaacattgtaaatgccttggcaagcgtgcctaagttctatgtacaggtccttcatcttatgaataaaatgaatttgcccacaccttttggaccaattactgcgcgacctcccatgtatgaagactatatgccattgcatgcacctcttccacccacatctcctcagccacctgaggaacctcctttgccagacgaggatgaggaattatctagtgaagaatcagaatatgaaagcactgatgatgaggaccgacagagaatgaacaaattaatggaactagcaaatcttcagcccaaaagacctaaaacaataaagcagcgccatgtgagaaaaaagagaaaaataaaggatatgttgaatacacctttgtgtccttcacacag

SEQ ID NO: 178035 - DNA, 2013 bp, Homo sapiens
  Payload ID: 14922
  Gene Symbol: RNPC3
  Gene Name: RNA-binding region (RNP1, RRM) containing 3
  Uniprot ID: Q96LT9
  ENST ID: ENST00000524631
  CDS Start-End: 381-1931
gcacatgcgcagtcgtgagtcctcttgtccttgagcgtcaaccttctttccctgaagtggctggggttcctgtttccttctttgattgacaacttgtgttaaccctcgcacatctctgggccaatttttgcttgtaagtctttccggagacccctggaatttaaatcattagcaccgcgcccttccccgaagagtcttcgaagggttgccgcttttcggtggcgcagttctcgcgagaaggtgactttctttctcggtatttcctggtttccagaatccttagcgcgaggcggaaaaaatatttctcccagcttgtgttgatgccgcgattttgactgagacttcttcccacgatttctgtttttgcttctccaaggaaaatggcagctcccgagcagccgcttgcgatatcaaggggatgcacgagctcctcctcgctttccccgcctcggggcgaccgaacccttctggtcaggcacctgccggctgagcttactgctgaggagaaagaggacttgctgaagtacttcggggctcagtctgtgcgggtcctgtcagataaggggcgactgaaacatacagcttttgccacattccctaatgaaaaagcagctataaaggcattgacaagactccatcaactgaaacttttaggtcatactttagtcgttgaatttgcaaaagagcaagatcgagttcactccccatgtcccacttcaggctctgaaaaaaaaaaaaggtctgatgaccctgtcgaagatgataaagaaaaaaaagaacttggttatttaacagtagaaaatggaattgcaccaaaccatgggctgacttttcctttaaattcatgcctcaagtatatgtacccaccaccttccagcacaatcctagcaaacattgtaaatgccttggcaagcgtgcctaagttctatgtacaggtccttcatcttatgaataaaatgaatttgcccacaccttttggaccaattactgcgcgacctcccatgtatgaagactatatgccattgcatgcacctcttccacccacatctcctcagccacctgaggaacctcctttgccagacgaggatgaggaattatctagtgaagaatcagaatatgaaagcactgatgatgaggaccgacagagaatgaacaaattaatggaactagcaaatcttcagcccaaaagacctaaaacaataaagcagcgccatgtgagaaaaaagagaaaaataaaggatatgttgaatacacctttgtgtccttcacacagtttacatccagtgctgttaccttcagatgtatttgaccaaccacaacctgtaggtaacaaaagaattgaattccatatatctaccgacatgccagctgcatttaagaaagatttagaaaaggaacaaaattgtgaggaaaaaaatcatgatttacctgctactgaagttgatgcatccaatataggatttggaaaaatcttccccaaacctaatttggacatcacagaggagattaaagaagactctgatgaaatgccttcagaatgtatttctagaagggaattggaaaagggcagaatttctagagaagaaatggaaacactttcagttttcagaagttatgaaccgggtgaaccaaactgtagaatttatgtaaagaatttagctaaacatgttcaagaaaaggaccttaaatatatttttggaagatatgttgacttttcatcagaaacacagcggatcatgtttgatatacgtttgatgaaagaaggtcgtatgaaaggacaagctttcattggacttcctaatgaaaaagcagcagcaaaagccttaaaggaagctaatggatatgtgctttttggaaaacccatggtggttcagtttgctcgatctgctagaccaaaacaagatcctaaggaaggaaaaagaaagtgttaaaaattaataaagaagcattcctgcgtaaatactgctgtaatactgtcatgcaaagtgtatcctttcttgtcgtatccttttt

SEQ ID NO: 178036 - DNA, 784 bp, Homo sapiens
  Payload ID: 14923
  Gene Symbol: RNASEK-C17orf49
  Gene Name: RNASEK-C17orf49 readthrough
  ENST ID: ENST00000547302
  CDS Start-End: 1-701
aagattttgagaatggcccccagaacatatacaacctttacgagcaagtcagctacaactgtttcatcgctgcaggcctttacctcctcctcggaggcttctctttctgccaagttcggctcaataagcgcaaggaatacatggtcggagagatcttctcggcggccggcgccgccttcacgaagctcggggagctgacgatgcagctgcatcccgtggccgactcttctcctgcgggtgcgaagtggacggagacggaaatagagatgctgagggctgctgtgaagcgatttggggacgatcttaatcacatcagctgtgtcatcaaggaacggacagtggcccagataaaggccactgtgaaacgcaaggtatatgaagattctggcatcccccttccagctgagtcacccaagaaagggcccaagaaggtggcatctggtgtcttgtcacctcctccagctgcccctcctcccagcagctccagtgtccctgaggccgggggtccccccataaagaaacagaaggctgatgtgacactcagtgctctgaacgactccgatgccaacagtgacgtggtggatattgaagggctaggagaaactcctccagctaagaaactcaacttcgaccaggacagcctgaccctggattctggccttctcatgacctctgctgatcctcctctcctctcctgctgagccttccacctctgacctctcactgttcatgccggacctgtggatctcctgggactccgagcaaggcctgcacgagagagggc

SEQ ID NO: 178037 - DNA, 805 bp, Homo sapiens
  Payload ID: 14924
  Gene Symbol: RNF103-CHMP3
  Gene Name: RNF103-CHMP3 readthrough
  ENST ID: ENST00000440757
  CDS Start-End: 143-805
ggccggccagtgacggcgccgggtggcccgcgcgtggacacggggccctcgcccaagctgccaccgagccgcggcccccgccctcgacccttctctctcccgtattccgagctctctggaaagagaggaaactccagggaagatgtggctgaagctttttttcttgctcctctatttcctggtcctgttcgtcctggccaggttttttgaggccattgtgtggtatgaaactggcatctttgccacccagctggtggatccggtggcgctgagcttcaagaagctgaagaccattttggagtgccgggggttgggctactcagggttgcccgagaagaaggatgtccgggagctggtggaaaagtcaggtgacttgatggagggtgagctctattctgctctcaaggaagaagaagcatccgaatcggtttctagtaccaatttcagtggtgaaatgcacttctatgagcttgtggaagacacaaaagatggcatctggctggttcaggtcaatgagtggtcattgaagataagaaaggaaatgagagttgttgacaggcaaataagggatatccaaagagaagaagaaaaagtgaaacgatctgtgaaagatgctgccaagaagggccagaaggatgtctgcatagttctggccaaggagatgatcaggtcaaggaaggctgtgagcaagctgtatgcatccaaagcacacatgaactcagtgctcatggggatgaagaaccagctcgcggtcttgcgagtggctggttccctgcagaagagcacagaagtgatgaaggccatg

SEQ ID NO: 178038 - DNA, 1135 bp, Homo sapiens
  Payload ID: 14924
  Gene Symbol: RNF103-CHMP3
  Gene Name: RNF103-CHMP3 readthrough
  ENST ID: ENST00000604011
  CDS Start-End: 244-999
actcgggggtcggcagtttgcaggtgcgatgggcggccccctcacccacgtttatccggactggagcccgccgctcccggctgggtttccgggtggttcgcgctccttctgaattggcagcgaggtcgcggcaggttcgaggctttgacaccagcacctctctatgaagaaaagagtgtgttgtgaacgaagtcagaatttcctgtgttccctttgccgctcctggagttcactggtgacttgatggagggtgagctctattctgctctcaaggaagaagaagcatccgaatcggtttctagtaccaatttcagtggtgaaatgcacttctatgagcttgtggaagacacaaaagatggcatctggctggttcaggtcaatgagtggtcattgaagataagaaaggaaatgagagttgttgacaggcaaataagggatatccaaagagaagaagaaaaagtgaaacgatctgtgaaagatgctgccaagaagggccagaaggatgtctgcatagttctggccaaggagatgatcaggtcaaggaaggctgtgagcaagctgtatgcatccaaagcacacatgaactcagtgctcatggggatgaagaaccagctcgcggtcttgcgagtggctggttccctgcagaagagcacagaagtgatgaaggccatgcaaagtcttgtgaagattccagagattcaggccaccatgagggagttgtccaaagaaatgatgaaggctgggatcatagaggagatgttagaggacacttttgaaagcatggacgatcaggaagaaatggaggaagaagcagaaatggaaattgacagaattctctttgaaattacagcaggggccttgggcaaagcacccagtaaagtgactgatgcccttccagagccagaacctccaggagcgatggctgcctcagaggatgaggaggaggaggaagaggctctggaggccatgcagtcccggctggccacactccgcagctaggggctgcctaccccgctgggtgtgcacacactcctctcaagagctgccattttatgtgtctcttgcactacacctctgttgtgaggactaccattttggagaaggttctgtttgtctcttttcattctctgcccag

SEQ ID NO: 178039 - DNA, 1735 bp, Homo sapiens
  Payload ID: 14925
  Gene Symbol: ROGDI
  Gene Name: rogdi homolog
  Uniprot ID: Q9GZN7
  ENST ID: ENST00000322048
  CDS Start-End: 380-1243
tcctgggggcgccccgggagctccgcccccaagcgggcgccccaggctggtgccggccgcgtccctggccagccggagcaagcctgactcgtgcagccgccggccgcgtccctggccaggcggagcgagcctcactcccgcagccgccagtctggttccagggctcccgcaggtttcgggggccgaggcggaccgacaggcgccagccaatcgcgagcacggagccggcctgggggcggggtggtacccgctccgccaatcgggtgggggcggagccagacgccgggggcggacgggaggaccggaggaccgaggacagaaagattggtggacaggagcagcggccggtggggagggcgctcggcggcggcctgcggccatggccaccgtgatggcagcgacggcggcggagcgggcggtgctggaggaggagttccgctggctgctgcacgacgaggtgcacgctgtgttgaagcagctgcaggacatcctcaaggaggcctctctgcgcttcactctgccgggctccggcactgaggggcccgccaagcaagagaacttcatcctaggcagctgtggcacagaccaggtgaagggtgtgctgactctgcagggggatgccctcagccaggcggatgtgaacctgaagatgccccggaacaaccagctgctgcacttcgccttccgggaggacaagcagtggaagctgcagcagatccaggatgccagaaaccatgtgagccaagccatttacctgcttaccagccgggaccagagctaccagttcaagacgggcgctgaggtcctcaagctgatggacgcagtgatgctgcagctgaccagagcccgaaaccggctcaccacccccgccaccctcaccctccccgagatcgccgccagcggcctcacgcggatgttcgcccctgccctgccgtccgacctgctggtcaacgtctacatcaacctcaacaagctctgcctcacggtgtaccagctgcatgccctgcagcccaactccaccaagaacttccgcccagctgggggcgcggtgctgcatagccctggggccatgttcgagtggggctctcagcgcctggaggtgagccacgtgcacaaagtggagtgcgtgatcccctggctcaacgacgccctggtctacttcaccgtctccctgcagctctgccagcagctcaaggacaagatctccgtgttctccagctactggagctacagacccttctgatcacagcacccaggagcttgtctccaggaaggcggccccgtcccctactcatacccaccacagagcaccagccagtgccaacgccaggctgctatttatctccctatcccaccccctaccccacctaacacatttgcactgccgggaatggacactggaagtgccaggaggaaggaaggctggtttggtggggtagtggggaggtcagggaggcggggccaagggtgtcccacattcccaacaccgccctctgatcaccatgggaatctttggactcaggacagggccaggcgcagggctctccctcctctccccttcgctgtcccctccccctggagggcatggtgtcggggggtggcactgagctatgagtcccggggatggtgaggaacgccacagacagagccaccctaggagtgagtatagtgctggtgactgtgtttcatagccccagtccagggctgtctaagaaataaagatcatcagactcca

SEQ ID NO: 178040 - DNA, 457 bp, Homo sapiens
  Payload ID: 14925
  Gene Symbol: ROGDI
  Gene Name: rogdi homolog
  ENST ID: ENST00000586153
  CDS Start-End: 1-366
gatgtgaacctgaagatgccccggaacaaccagctgctgcacttcgccttccgggaggacaagcagtggaagctgcagcagatccaggatgccagaaaccatgtgagccaagccatttacctgcttaccagccgggaccagagctaccagttcaagacgggcgctgaggtcctcaagcggatgttcgcccctgccctgccgtccgacctgctggtcaacgtctacatcaacctcaacaagctctgcctcacggtgtaccagctgcatgccctgcagcccaactccaccaagaacttccgcccagctgggggcgcggtgctgcatagccctggggccatgtttggggctctcagcgcctggaggtgagccacgtgcacaaagtggagtgcgtgatcccctggctcaacgacgccctggtctacttcaccgtctccctgcagctctgccagcagctcaa

SEQ ID NO: 178041 - DNA, 651 bp, Homo sapiens
  Payload ID: 14925
  Gene Symbol: ROGDI
  Gene Name: rogdi homolog
  ENST ID: ENST00000586504
  CDS Start-End: 1-651
tgctgactctgcagggggatgccctcagccaggcggatgtgaacctgaagatgccccggaacaaccagctgctgcacttcgccttccgggaggacaagcagtggaagctgcagcagatccaggatgccagaaaccatgtgagccaagccatttacctgcttaccagccgggaccagagctaccagttcaagacgggcgctgaggtcctcaagctgatggacgcagtgatgctgcagctgaccagagcccgaaaccggctcaccacccccgccaccctcaccctccccgagatcgccgccagcggcctcacgcggatgttcgcccctgccctgccgtccgacctgctggtcaacgtctacatcaacctcaacaagctctgcctcacggtgtaccagctgcatgccctgcagcccaactccaccaagcgagtggggctctcagcgcctggaggtgagccacgtgcacaaagtggagtgcgtgatcccctggctcaacgacgccctggtctacttcaccgtctccctgcagctctgccagcagctcaaggacaagatctccgtgttctccagctactggagctacagacccttctgatcacagcacccaggagcttgtctccaggaaggcggccccgtcccctactcataccca

SEQ ID NO: 178042 - DNA, 1362 bp, Homo sapiens
  Payload ID: 14925
  Gene Symbol: ROGDI
  Gene Name: rogdi homolog
  ENST ID: ENST00000587843
  CDS Start-End: 63-269
agaaagattggtggacaggagcagcggccggtggggagggcgctcggcggcggcctgcggccatggccaccgtgatggcagcgacggcggcggagcgggcggtgctggaggaggagttccgctggctgctgcacgacgaggtgcacgctgtgttgaagcagctgcaggacatcctcaaggaggcctctctgcgcttcactctgccgggctccggcactgaggggcccgccaagcaagagaacttcatcctaggcagctgtgggatgtgaacctgaagatgccccggaacaaccagctgctgcacttcgccttccgggaggacaagcagtggaagctgcagcagatccaggatgccagaaaccatgtgagccaagccatttacctgcttaccagccgggaccagagctaccagttcaagacgggcgctgaggtcctcaagctgatggacgcagtgatgctgcagctgaccagagcccgaaaccggctcaccacccccgccaccctcaccctccccgagatcgccgccagcggcctcacgcggatgttcgcccctgccctgccgtccgacctgctggtcaacgtctacatcaacctcaacaagctctgcctcacggtgtaccagctgcatgccctgcagcccaactccaccaagaacttccgcccagctgggggcgcggtgctgcatagccctggggccatgttcgagtggggctctcagcgcctggaggtgagccacgtgcacaaagtggagtgcgtgatcccctggctcaacgacgccctggtctacttcaccgtctccctgcagctctgccagcagctcaaggacaagatctccgtgttctccagctactggagctacagacccttctgatcacagcacccaggagcttgtctccaggaaggcggccccgtcccctactcatacccaccacagagcaccagccagtgccaacgccaggctgctatttatctccctatcccaccccctaccccacctaacacatttgcactgccgggaatggacactggaagtgccaggaggaaggaaggctggtttggtggggtagtggggaggtcagggaggcggggccaagggtgtcccacattcccaacaccgccctctgatcaccatgggaatctttggactcaggacagggccaggcgcagggctctccctcctctccccttcgctgtcccctccccctggagggcatggtgtcggggggtggcactgagctatgagtcccggggatggtgaggaacgccacagacagagccaccctaggagtgagtatagtgctggtgactgtgtttcatagccccagtccagggctgtctaagaaataaagatcatcagactcc

SEQ ID NO: 178043 - DNA, 1530 bp, Homo sapiens
  Payload ID: 14925
  Gene Symbol: ROGDI
  Gene Name: rogdi homolog
  ENST ID: ENST00000588201
  CDS Start-End: 103-462
agacgccgggggcggacgggaggaccggaggaccgaggacagaaagattggtggacaggagcagcggccggtggggagggcgctcggcggcggcctgcggccatggccaccgtgatggcagcgacggcggcggagcgggcggtgctggaggaggagttccgctggctgctgcacgacgaggtgcacgctgtgttgaagcagctgcaggacatcctcaaggaggcctctctgcgcttcactctgccgggctccggcactgaggggcccgccaagcaagagaacttcatcctaggcagctgtggcacagaccaggtgaagggtgtgctgactctgcagggggatgccctcagccaggcggtgagtcccccggccctgtcccctcccatcctgccaatggggaagagcatgggagctcccactttctctctgtacaagccctgcgactctgggcgggacccttgatctctctggcctcagttttctcctttggaaaatgacagcaaccctcacaccttctcccgggatcggtgtgcagattcagtaagaggtgcaggagaggggttctttgcacacggatgtgaacctgaagatgccccggaacaaccagctgctgcacttcgccttccgggaggacaagcagtggaagctgcagcagatccaggatgccagaaaccatgtgagccaagccatttacctgcttaccagccgggaccagagctaccagttcaagacgggcgctgaggtcctcaaggtccctgctgccgggtttcgggacctgggaacagtagccactgggctgggtgggagtgggagctaccatgtctgttgttccttaatgcatggggacacgggaggacgcagagccaaccccgcctctccctgcagctgatggacgcagtgatgctgcagctgaccagagcccgaaaccggctcaccacccccgccaccctcaccctccccgagatcgccgccagcggcctcacgcggatgttcgcccctgccctgccgtccgacctgctggtcaacgtctacatcaacctcaacaagctctgcctcacggtgtaccagctgcatgccctgcagcccaactccaccaagaacttccgcccagctgggggcgcggtgctgcatagccctggggccatgttcgagtggggctctcagcgcctggaggtgagccacgtgcacaaagtggagtgcgtgatcccctggctcaacgacgccctggtctacttcaccgtctccctgcagctctgccagcagctcaaggacaagatctccgtgttctccagctactggagctacagacccttctgatcacagcacccaggagcttgtctccaggaaggcggccccgtcccctactcatacccaccacagagcaccagccagtgccaacgccaggctgctatttatctccctatcccaccccctaccccacctaacacatttgcactgccgggaatggacactggaagtgccaggaggaaggaaggctggtttggtggggtagtggggaggtcagggagg

SEQ ID NO: 178044 - DNA, 570 bp, Homo sapiens
  Payload ID: 14925
  Gene Symbol: ROGDI
  Gene Name: rogdi homolog
  ENST ID: ENST00000587711
  CDS Start-End: 57-570
attggtggacaggagcagcggccggtggggagggcgctcggcggcggcctgcggccatggccaccgtgatggcagcgacggcggcggagcgggcggtgctggaggaggagttccgctggctgctgcacgacgaggtgcacgctgtgttgaagcagctgcaggacatcctcaagctgatggacgcagtgatgctgcagctgaccagagcccgaaaccggctcaccacccccgccaccctcaccctccccgagatcgccgccagcggcctcacgcggatgttcgcccctgccctgccgtccgacctgctggtcaacgtctacatcaacctcaacaagctctgcctcacggtgtaccagctgcatgccctgcagcccaactccaccaagaacttccgcccagctgggggcgcggtgctgcatagccctggggccatgttcgagtggggctctcagcgcctggaggtgagccacgtgcacaaagtggagtgcgtgatcccctggctcaacgacgccctggtctacttcaccgtctccctgcagctctgccagcagctcaaggacaaggtgggcc

SEQ ID NO: 178045 - DNA, 811 bp, Homo sapiens
  Payload ID: 14925
  Gene Symbol: ROGDI
  Gene Name: rogdi homolog
  ENST ID: ENST00000591392
  CDS Start-End: 51-811
ggacaggagcagcggccggtggggagggcgctcggcggcggcctgcggccatggccaccgtgatggcagcgacggcggcggagcgggcggtgctggaggcctctctgcgcttcactctgccgggctccggcactgaggggcccgccaagcaagagaacttcatcctaggcagctgtggcacagaccaggtgaagggtgtgctgactctgcagggggatgccctcagccaggcggatgtgaacctgaagatgccccggaacaaccagctgctgcacttcgccttccgggaggacaagcagtggaagctgcagcagatccaggatgccagaaaccatgtgagccaagccatttacctgcttaccagccgggaccagagctaccagttcaagacgggcgctgaggtcctcaagctgatggacgcagtgatgctgcagctgaccagagcccgaaaccggctcaccacccccgccaccctcaccctccccgagatcgccgccagcggcctcacgcggatgttcgcccctgccctgccgtccgacctgctggtcaacgtctacatcaacctcaacaagctctgcctcacggtgtaccagctgcatgccctgcagcccaactccaccaagaacttccgcccagctgggggcgcggtgctgcatagccctggggccatgttcgagtggggctctcagcgcctggaggtgagccacgtgcacaaagtggagtgcgtgatcccctggctcaacgacgccctggtctacttcaccgtctccctgcagctctgccagcagctcaaggacaaggtgggcccggg

SEQ ID NO: 178046 - DNA, 371 bp, Homo sapiens
  Payload ID: 14925
  Gene Symbol: ROGDI
  Gene Name: rogdi homolog
  ENST ID: ENST00000592019
  CDS Start-End: 1-220
caaccagctgctgcacttcgccttccgggaggacaagcagtggaagctgcagcagatccaggatgccagaaaccatgtgagccacgtgcacaaagtggagtgcgtgatcccctggctcaacgacgccctggtctacttcaccgtctccctgcagctctgccagcagctcaaggacaagatctccgtgttctccagctactggagctacagacccttctgatcacagcacccaggagcttgtctccaggaaggcggccccgtcccctactcatacccaccacagagcaccagccagtgccaacgccaggctgctatttatctccctatcccaccccctaccccacctaacacatttgcactgccgggaatgg

SEQ ID NO: 178047 - DNA, 1394 bp, Homo sapiens
  Payload ID: 14925
  Gene Symbol: ROGDI
  Gene Name: rogdi homolog
  ENST ID: ENST00000587377
  CDS Start-End: 45-737
gagcagcggccggtggggagggcgctcggcggcggcctgcggccatggccaccgtgatggcagcgacggcggcggagcgggcggtgctggaggaggagttccgctggctgctgcacgacgaggtgcacgctgtgttgaagcagctgcaggacatcctcaaggaggcctctctgcgcttcactctgccgggctccggcactgaggggcccgccaagcaagagaacttcatcctaggcagctgtggcacagaccaggtgaagggtgtgctgactctgcagggggatgccctcagccaggcggatgtgaacctgaagatgccccggaacaaccagctgctgcacttcgccttccgggaggacaagcagtggaagctgcagcagatccaggatgccagaaaccatgtgagccaagccatttacctgcttaccagccgggaccagagctaccagttcaagacgggcgctgagccaaccccgcctctccctgcagctgatggacgcagtgatgctgcagctgaccagagcccgaaaccggctcaccacccccgccaccctcaccctccccgagatcgccgccagcggcctcacgcggatgttcgcccctgccctgccgtccgacctgctggtcaacgtctacatcaacctcaacaagctctgcctcacggtgtaccagctgcatgccctgcagcccaactccaccaagaacttccgcccagctgggggcgcggtgctgcatagccctggggccatgttcgagtggggctctcagcgcctggaggtgagccacgtgcacaaagtggagtgcgtgatcccctggctcaacgacgccctggtctacttcaccgtctccctgcagctctgccagcagctcaaggacaagatctccgtgttctccagctactggagctacagacccttctgatcacagcacccaggagcttgtctccaggaaggcggccccgtcccctactcatacccaccacagagcaccagccagtgccaacgccaggctgctatttatctccctatcccaccccctaccccacctaacacatttgcactgccgggaatggacactggaagtgccaggaggaaggaaggctggtttggtggggtagtggggaggtcagggaggcggggccaagggtgtcccacattcccaacaccgccctctgatcaccatgggaatctttggactcaggacagggccaggcgcagggctctccctcctctccccttcgctgtcccctccccctggagggcatggtgtcggggggtggcactgagctatgagtcccggggatggtgaggaacgccacagacagagccaccctaggagtgagtatagtgctggtgactgtgtttcatagccccagtccagggctgtctaagaaa

SEQ ID NO: 178048 - DNA, 7417 bp, Homo sapiens
  Payload ID: 14926
  Gene Symbol: ROS1
  Gene Name: ROS proto-oncogene 1 , receptor tyrosine kinase
  ENST ID: ENST00000368507
  CDS Start-End: 200-7225
caagctttcaagcattcaaaggtctaaatgaaaaaggctaagtattatttcaaaaggcaagtatatcctaatatagcaaaacaaacaaagcaaaatccatcagctactcctccaattgaagtgatgaagcccaaataattcatatagcaaaatggagaaaattagaccggccatctaaaaatctgccattggtgaagtgatgaagaacatttactgtcttattccgaagcttgtcaattttgcaactcttggctgcctatggatttctgtggtgcagtgtacagttttaaatagctgcctaaagtcgtgtgtaactaatctgggccagcagcttgaccttggcacaccacataatctgagtgaaccgtgtatccaaggatgtcacttttggaactctgtagatcagaaaaactgtgctttaaagtgtaatgatacttatgccaccgtttgtgagcgggagtcgtgtgaggttggctgtagcagcgcggaaggtgcatatgaagaggaagtactggaaaatgcagacctaccaactgctccctttgcttcttccattggaagccacaatatgacattacgatggaaatctgcaaacttctctggagtaaaatacatcattcagtggaaatatgcacaacttctgggaagctggacttatactaagactgtgtccagaccgtcctatgtggtcaagcccctgcaccccttcactgagtacattttccgagtggtttggatcttcacagcgcagctgcagctctactcccctccaagtcccagttacaggactcatcctcatggagttcctgaaactgcacctttgattaggaatattgagagctcaagtcccgacactgtggaagtcagctgggatccacctcaattcccaggtggacctattttgggttataacttaaggctgatcagcaaaaatcaaaaattagatgcagggacacagagaaccagtttccagttttactccactttaccaaatactatctacaggttttctattgcagcagtaaatgaagttggtgagggtccagaagcagaatctagtattaccacttcatcttcagcagttcaacaagaggaacagtggctctttttatccagaaaaacttctctaagaaagagatctttaaaacatttagtagatgaagcacattgccttcggttggatgctatataccataatattacaggaatatctgttgatgtccaccagcaaattgtttatttctctgaaggaactctcatatgggcgaagaaggctgccaacatgtctgatgtatctgacctgagaattttttacagaggttcaggattaatttcttctatctccatagattggctttatcaaagaatgtatttcatcatggatgaactggtatgtgtctgtgatttagagaactgctcaaacatcgaggaaattactccaccctctattagtgcacctcaaaaaattgtggctgattcatacaatgggtatgtcttttacctcctgagagatggcatttatagagcagaccttcctgtaccatctggccggtgtgcagaagctgtgcgtattgtggagagttgcacgttaaaggactttgcaatcaagccacaagccaagcgaatcatttacttcaatgacactgcccaagtcttcatgtcaacatttctggatggctctgcttcccatctcatcctacctcgcatcccctttgctgatgtgaaaagttttgcttgtgaaaacaatgactttcttgtcacagatggcaaggtcattttccaacaggatgctttgtcttttaatgaattcatcgtgggatgtgacctgagtcacatagaagaatttgggtttggtaacttggtcatctttggctcatcctcccagctgcaccctctgccaggccgcccgcaggagctttcggtgctgtttggctctcaccaggctcttgttcaatggaagcctcctgcccttgccataggagccagcccttctgcctggcagaactggacctatgaggtgaaagtatccacccaagaccctcctgaagtcactcatattttcttgaacataagtggaaccatgctgaatgtacctgagctgcagagtgctatgaaatacaaggtttctgtgagagcaagttctccaaagaggccaggcccctggtcagagccctcagtgggtactaccctggtgccagctagtgaaccaccatttatcatggctgtgaaagaagatgggctttggagtaaaccattaaatagctttggcccaggagagttcttatcctctgatataggaaatgtgtcagacatggattggtataacaacagcctctactacagtgacacgaaaggcgacgtttttgtgtggctgctgaatgggacggatatctcagagaattatcacctacccagcattgcaggagcaggggctttagcttttgagtggctgggtcactttctctactgggctggaaagacatatgtgatacaaaggcagtctgtgttgacgggacacacagacattgttacccacgtgaagctattggtgaatgacatggtggtggattcagttggtggatatctctactggaccacactctattcagtggaaagcaccagactaaatggggaaagttcccttgtactacagacacagccttggttttctgggaaaaaggtaattgctctaactttagacctcagtgatgggctcctgtattggttggttcaagacagtcaatgtattcacctgtacacagctgttcttcggggacagagcactggggataccaccatcacagaatttgcagcctggagtacttctgaaatttcccagaatgcactgatgtactatagtggtcggctgttctggatcaatggctttaggattatcacaactcaagaaataggtcagaaaaccagtgtctctgttttggaaccagccagatttaatcagttcacaattattcagacatcccttaagcccctgccagggaacttttcctttacccctaaggttattccagattctgttcaagagtcttcatttaggattgaaggaaatgcttcaagttttcaaatcctgtggaatggtccccctgcggtagactggggtgtagttttctacagtgtagaatttagtgctcattctaagttcttggctagtgaacaacactctttacctgtatttactgtggaaggactggaaccttatgccttatttaatctttctgtcactccttatacctactggggaaagggccccaaaacatctctgtcacttcgagcacctgaaacagttccatcagcaccagagaaccccagaatatttatattaccaagtggaaaatgctgcaacaagaatgaagttgtggtggaatttaggtggaacaaacctaagcatgaaaatggggtgttaacaaaatttgaaattttctacaatatatccaatcaaagtattacaaacaaaacatgtgaagactggattgctgtcaatgtcactccctcagtgatgtcttttcaacttgaaggcatgagtcccagatgctttattgccttccaggttagggcctttacatctaaggggccaggaccatatgctgacgttgtaaagtctacaacatcagaaatcaacccatttcctcacctcataactcttcttggtaacaagatagtttttttagatatggatcaaaatcaagttgtgtggacgttttcagcagaaagagttatcagtgccgtttgctacacagctgataatgagatgggatattatgctgaaggggactcactctttcttctgcacttgcacaatcgctctagctctgagcttttccaagattcactggtttttgatatcacagttattacaattgactggatttcaaggcacctctactttgcactgaaagaatcacaaaatggaatgcaagtatttgatgttgatcttgaacacaaggtgaaatatcccagagaggtgaagattcacaataggaattcaacaataatttctttttctgtatatcctcttttaagtcgcttgtattggacagaagtttccaattttggctaccagatgttctactacagtattatcagtcacaccttgcaccgaattctgcaacccacagctacaaaccaacaaaacaaaaggaatcaatgttcttgtaatgtgactgaatttgagttaagtggagcaatggctattgatacctctaacctagagaaaccattgatatactttgccaaagcacaagagatctgggcaatggatctggaaggctgtcagtgttggagagttatcacagtacctgctatgctcggaaaaacccttgttagcttaactgtggatggagatcttatatactggatcatcacagcaaaggacagcacacagatttatcaggcaaagaaaggaaatggggccatcgtttcccaggtgaaggccctaaggagtaggcatatcttggcttacagttcagttatgcagccttttccagataaagcgtttctgtctctagcttcagacactgtggaaccaactatacttaatgccactaacactagcctcacaatcagattacctctggccaagacaaacctcacatggtatggcatcaccagccctactccaacatacctggtttattatgcagaagttaatgacaggaaaaacagctctgacttgaaatatagaattctggaatttcaggacagtatagctcttattgaagatttacaaccattttcaacatacatgatacagatagctgtaaaaaattattattcagatcctttggaacatttaccaccaggaaaagagatttggggaaaaactaaaaatggagtaccagaggcagtgcagctcattaatacaactgtgcggtcagacaccagcctcattatatcttggagagaatctcacaagccaaatggacctaaagaatcagtccgttatcagttggcaatctcacacctggccctaattcctgaaactcctctaagacaaagtgaatttccaaatggaaggctcactctccttgttactagactgtctggtggaaatatttatgtgttaaaggttcttgcctgccactctgaggaaatgtggtgtacagagagtcatcctgtcactgtggaaatgtttaacacaccagagaaaccttattccttggttccagagaacactagtttgcaatttaattggaaggctccattgaatgttaacctcatcagattttgggttgagctacagaagtggaaatacaatgagttttaccatgttaaaacttcatgcagccaaggtcctgcttatgtctgtaatatcacaaatctacaaccttatacttcatataatgtcagagtagtggtggtttataagacgggagaaaatagcacctcacttccagaaagctttaagacaaaagctggagtcccaaataaaccaggcattcccaaattactagaagggagtaaaaattcaatacagtgggagaaagctgaagataatggatgtagaattacatactatatccttgagataagaaagagcacttcaaataatttacagaaccagaatttaaggtggaagatgacatttaatggatcctgcagtagtgtttgcacatggaagtccaaaaacctgaaaggaatatttcagttcagagtagtagctgcaaataatctagggtttggtgaatatagtggaatcagtgagaatattatattagttggagatgatttttggataccagaaacaagtttcatacttactattatagttggaatatttctggttgttacaatcccactgacctttgtctggcatagaagattaaagaatcaaaaaagtgccaaggaaggggtgacagtgcttataaacgaagacaaagagttggctgagctgcgaggtctggcagccggagtaggcctggctaatgcctgctatgcaatacatactcttccaacccaagaggagattgaaaatcttcctgccttccctcgggaaaaactgactctgcgtctcttgctgggaagtggagcctttggagaagtgtatgaaggaacagcagtggacatcttaggagttggaagtggagaaatcaaagtagcagtgaagactttgaagaagggttccacagaccaggagaagattgaattcctgaaggaggcacatctgatgagcaaatttaatcatcccaacattctgaagcagcttggagtttgtctgctgaatgaaccccaatacattatcctggaactgatggagggaggagaccttcttacttatttgcgtaaagcccggatggcaacgttttatggtcctttactcaccttggttgaccttgtagacctgtgtgtagatatttcaaaaggctgtgtctacttggaacggatgcatttcattcacagggatctggcagctagaaattgccttgtttccgtgaaagactataccagtccacggatagtgaagattggagactttggactcgccagagacatctataaaaatgattactatagaaagagaggggaaggcctgctcccagttcggtggatggctccagaaagtttgatggatggaatcttcactactcaatctgatgtatggtcttttggaattctgatttgggagattttaactcttggtcatcagccttatccagctcattccaaccttgatgtgttaaactatgtgcaaacaggagggagactggagccaccaagaaattgtcctgatgatctgtggaatttaatgacccagtgctgggctcaagaacccgaccaaagacctacttttcatagaattcaggaccaacttcagttattcagaaattttttcttaaatagcatttataagtccagagatgaagcaaacaacagtggagtcataaatgaaagctttgaaggtgaagatggcgatgtgatttgtttgaattcagatgacattatgccagttgctttaatggaaacgaagaaccgagaagggttaaactatatggtacttgctacagaatgtggccaaggtgaagaaaagtctgagggtcctctaggctcccaggaatctgaatcttgtggtctgaggaaagaagagaaggaaccacatgcagacaaagatttctgccaagaaaaacaagtggcttactgcccttctggcaagcctgaaggcctgaactatgcctgtctcactcacagtggatatggagatgggtctgattaatagcgttgtttgggaaatagagagttgagataaacactctcattcagtagttactgaaagaaaactctgctagaatgataaatgtcatggtggtctataactccaaataaacaatgcaacgttcctgatttctaatcttggttctgagagccatttggtttcagttgtagcaatccccataccagctgcctg

SEQ ID NO: 178049 - DNA, 7435 bp, Homo sapiens
  Payload ID: 14926
  Gene Symbol: ROS1
  Gene Name: ROS proto-oncogene 1 , receptor tyrosine kinase
  Uniprot ID: P08922
  ENST ID: ENST00000368508
  CDS Start-End: 200-7243
caagctttcaagcattcaaaggtctaaatgaaaaaggctaagtattatttcaaaaggcaagtatatcctaatatagcaaaacaaacaaagcaaaatccatcagctactcctccaattgaagtgatgaagcccaaataattcatatagcaaaatggagaaaattagaccggccatctaaaaatctgccattggtgaagtgatgaagaacatttactgtcttattccgaagcttgtcaattttgcaactcttggctgcctatggatttctgtggtgcagtgtacagttttaaatagctgcctaaagtcgtgtgtaactaatctgggccagcagcttgaccttggcacaccacataatctgagtgaaccgtgtatccaaggatgtcacttttggaactctgtagatcagaaaaactgtgctttaaagtgtcgggagtcgtgtgaggttggctgtagcagcgcggaaggtgcatatgaagaggaagtactggaaaatgcagacctaccaactgctccctttgcttcttccattggaagccacaatatgacattacgatggaaatctgcaaacttctctggagtaaaatacatcattcagtggaaatatgcacaacttctgggaagctggacttatactaagactgtgtccagaccgtcctatgtggtcaagcccctgcaccccttcactgagtacattttccgagtggtttggatcttcacagcgcagctgcagctctactcccctccaagtcccagttacaggactcatcctcatggagttcctgaaactgcacctttgattaggaatattgagagctcaagtcccgacactgtggaagtcagctgggatccacctcaattcccaggtggacctattttgggttataacttaaggctgatcagcaaaaatcaaaaattagatgcagggacacagagaaccagtttccagttttactccactttaccaaatactatctacaggttttctattgcagcagtaaatgaagttggtgagggtccagaagcagaatctagtattaccacttcatcttcagcagttcaacaagaggaacagtggctctttttatccagaaaaacttctctaagaaagagatctttaaaacatttagtagatgaagcacattgccttcggttggatgctatataccataatattacaggaatatctgttgatgtccaccagcaaattgtttatttctctgaaggaactctcatatgggcgaagaaggctgccaacatgtctgatgtatctgacctgagaattttttacagaggttcaggattaatttcttctatctccatagattggctttatcaaagaatgtatttcatcatggatgaactggtatgtgtctgtgatttagagaactgctcaaacatcgaggaaattactccaccctctattagtgcacctcaaaaaattgtggctgattcatacaatgggtatgtcttttacctcctgagagatggcatttatagagcagaccttcctgtaccatctggccggtgtgcagaagctgtgcgtattgtggagagttgcacgttaaaggactttgcaatcaagccacaagccaagcgaatcatttacttcaatgacactgcccaagtcttcatgtcaacatttctggatggctctgcttcccatctcatcctacctcgcatcccctttgctgatgtgaaaagttttgcttgtgaaaacaatgactttcttgtcacagatggcaaggtcattttccaacaggatgctttgtcttttaatgaattcatcgtgggatgtgacctgagtcacatagaagaatttgggtttggtaacttggtcatctttggctcatcctcccagctgcaccctctgccaggccgcccgcaggagctttcggtgctgtttggctctcaccaggctcttgttcaatggaagcctcctgcccttgccataggagccaatgtcatcctgatcagtgatattattgaactctttgaattaggcccttctgcctggcagaactggacctatgaggtgaaagtatccacccaagaccctcctgaagtcactcatattttcttgaacataagtggaaccatgctgaatgtacctgagctgcagagtgctatgaaatacaaggtttctgtgagagcaagttctccaaagaggccaggcccctggtcagagccctcagtgggtactaccctggtgccagctagtgaaccaccatttatcatggctgtgaaagaagatgggctttggagtaaaccattaaatagctttggcccaggagagttcttatcctctgatataggaaatgtgtcagacatggattggtataacaacagcctctactacagtgacacgaaaggcgacgtttttgtgtggctgctgaatgggacggatatctcagagaattatcacctacccagcattgcaggagcaggggctttagcttttgagtggctgggtcactttctctactgggctggaaagacatatgtgatacaaaggcagtctgtgttgacgggacacacagacattgttacccacgtgaagctattggtgaatgacatggtggtggattcagttggtggatatctctactggaccacactctattcagtggaaagcaccagactaaatggggaaagttcccttgtactacagacacagccttggttttctgggaaaaaggtaattgctctaactttagacctcagtgatgggctcctgtattggttggttcaagacagtcaatgtattcacctgtacacagctgttcttcggggacagagcactggggataccaccatcacagaatttgcagcctggagtacttctgaaatttcccagaatgcactgatgtactatagtggtcggctgttctggatcaatggctttaggattatcacaactcaagaaataggtcagaaaaccagtgtctctgttttggaaccagccagatttaatcagttcacaattattcagacatcccttaagcccctgccagggaacttttcctttacccctaaggttattccagattctgttcaagagtcttcatttaggattgaaggaaatgcttcaagttttcaaatcctgtggaatggtccccctgcggtagactggggtgtagttttctacagtgtagaatttagtgctcattctaagttcttggctagtgaacaacactctttacctgtatttactgtggaaggactggaaccttatgccttatttaatctttctgtcactccttatacctactggggaaagggccccaaaacatctctgtcacttcgagcacctgaaacagttccatcagcaccagagaaccccagaatatttatattaccaagtggaaaatgctgcaacaagaatgaagttgtggtggaatttaggtggaacaaacctaagcatgaaaatggggtgttaacaaaatttgaaattttctacaatatatccaatcaaagtattacaaacaaaacatgtgaagactggattgctgtcaatgtcactccctcagtgatgtcttttcaacttgaaggcatgagtcccagatgctttattgccttccaggttagggcctttacatctaaggggccaggaccatatgctgacgttgtaaagtctacaacatcagaaatcaacccatttcctcacctcataactcttcttggtaacaagatagtttttttagatatggatcaaaatcaagttgtgtggacgttttcagcagaaagagttatcagtgccgtttgctacacagctgataatgagatgggatattatgctgaaggggactcactctttcttctgcacttgcacaatcgctctagctctgagcttttccaagattcactggtttttgatatcacagttattacaattgactggatttcaaggcacctctactttgcactgaaagaatcacaaaatggaatgcaagtatttgatgttgatcttgaacacaaggtgaaatatcccagagaggtgaagattcacaataggaattcaacaataatttctttttctgtatatcctcttttaagtcgcttgtattggacagaagtttccaattttggctaccagatgttctactacagtattatcagtcacaccttgcaccgaattctgcaacccacagctacaaaccaacaaaacaaaaggaatcaatgttcttgtaatgtgactgaatttgagttaagtggagcaatggctattgatacctctaacctagagaaaccattgatatactttgccaaagcacaagagatctgggcaatggatctggaaggctgtcagtgttggagagttatcacagtacctgctatgctcgcaggaaaaacccttgttagcttaactgtggatggagatcttatatactggatcatcacagcaaaggacagcacacagatttatcaggcaaagaaaggaaatggggccatcgtttcccaggtgaaggccctaaggagtaggcatatcttggcttacagttcagttatgcagccttttccagataaagcgtttctgtctctagcttcagacactgtggaaccaactatacttaatgccactaacactagcctcacaatcagattacctctggccaagacaaacctcacatggtatggcatcaccagccctactccaacatacctggtttattatgcagaagttaatgacaggaaaaacagctctgacttgaaatatagaattctggaatttcaggacagtatagctcttattgaagatttacaaccattttcaacatacatgatacagatagctgtaaaaaattattattcagatcctttggaacatttaccaccaggaaaagagatttggggaaaaactaaaaatggagtaccagaggcagtgcagctcattaatacaactgtgcggtcagacaccagcctcattatatcttggagagaatctcacaagccaaatggacctaaagaatcagtccgttatcagttggcaatctcacacctggccctaattcctgaaactcctctaagacaaagtgaatttccaaatggaaggctcactctccttgttactagactgtctggtggaaatatttatgtgttaaaggttcttgcctgccactctgaggaaatgtggtgtacagagagtcatcctgtcactgtggaaatgtttaacacaccagagaaaccttattccttggttccagagaacactagtttgcaatttaattggaaggctccattgaatgttaacctcatcagattttgggttgagctacagaagtggaaatacaatgagttttaccatgttaaaacttcatgcagccaaggtcctgcttatgtctgtaatatcacaaatctacaaccttatacttcatataatgtcagagtagtggtggtttataagacgggagaaaatagcacctcacttccagaaagctttaagacaaaagctggagtcccaaataaaccaggcattcccaaattactagaagggagtaaaaattcaatacagtgggagaaagctgaagataatggatgtagaattacatactatatccttgagataagaaagagcacttcaaataatttacagaaccagaatttaaggtggaagatgacatttaatggatcctgcagtagtgtttgcacatggaagtccaaaaacctgaaaggaatatttcagttcagagtagtagctgcaaataatctagggtttggtgaatatagtggaatcagtgagaatattatattagttggagatgatttttggataccagaaacaagtttcatacttactattatagttggaatatttctggttgttacaatcccactgacctttgtctggcatagaagattaaagaatcaaaaaagtgccaaggaaggggtgacagtgcttataaacgaagacaaagagttggctgagctgcgaggtctggcagccggagtaggcctggctaatgcctgctatgcaatacatactcttccaacccaagaggagattgaaaatcttcctgccttccctcgggaaaaactgactctgcgtctcttgctgggaagtggagcctttggagaagtgtatgaaggaacagcagtggacatcttaggagttggaagtggagaaatcaaagtagcagtgaagactttgaagaagggttccacagaccaggagaagattgaattcctgaaggaggcacatctgatgagcaaatttaatcatcccaacattctgaagcagcttggagtttgtctgctgaatgaaccccaatacattatcctggaactgatggagggaggagaccttcttacttatttgcgtaaagcccggatggcaacgttttatggtcctttactcaccttggttgaccttgtagacctgtgtgtagatatttcaaaaggctgtgtctacttggaacggatgcatttcattcacagggatctggcagctagaaattgccttgtttccgtgaaagactataccagtccacggatagtgaagattggagactttggactcgccagagacatctataaaaatgattactatagaaagagaggggaaggcctgctcccagttcggtggatggctccagaaagtttgatggatggaatcttcactactcaatctgatgtatggtcttttggaattctgatttgggagattttaactcttggtcatcagccttatccagctcattccaaccttgatgtgttaaactatgtgcaaacaggagggagactggagccaccaagaaattgtcctgatgatctgtggaatttaatgacccagtgctgggctcaagaacccgaccaaagacctacttttcatagaattcaggaccaacttcagttattcagaaattttttcttaaatagcatttataagtccagagatgaagcaaacaacagtggagtcataaatgaaagctttgaaggtgaagatggcgatgtgatttgtttgaattcagatgacattatgccagttgctttaatggaaacgaagaaccgagaagggttaaactatatggtacttgctacagaatgtggccaaggtgaagaaaagtctgagggtcctctaggctcccaggaatctgaatcttgtggtctgaggaaagaagagaaggaaccacatgcagacaaagatttctgccaagaaaaacaagtggcttactgcccttctggcaagcctgaaggcctgaactatgcctgtctcactcacagtggatatggagatgggtctgattaatagcgttgtttgggaaatagagagttgagataaacactctcattcagtagttactgaaagaaaactctgctagaatgataaatgtcatggtggtctataactccaaataaacaatgcaacgttcctgatttctaatcttggttctgagagccatttggtttcagttgtagcaatccccataccagctgcctg

SEQ ID NO: 178050 - DNA, 681 bp, Homo sapiens
  Payload ID: 14926
  Gene Symbol: ROS1
  Gene Name: ROS proto-oncogene 1 , receptor tyrosine kinase
  ENST ID: ENST00000403284
  CDS Start-End: 1-294
tggaaatacaatgagttttaccatgttaaaacttcatgcagccaaggtcctgcttatgtctgtaatatcacaaatctacaaccttatacttcatataatgtcagagtagtggtggtttataagacgggagaaaatagcacctcacttccagaaagctttaagacaaaagctggagtcccaaataaaccaggcattcccaaattactagaagggagtaaaaattcaatacagtgggagaaagctgaagataatggatgtagaattacatactatatccttgagataagggactgaaaacacaccgtcgatgaaaaccagccactgatgaacagcctcagacctggccagtacggggagcacgtgaaccataactggcttagaaggactgatttcatgccaacttgaggggagaattccaaattccaaagacactcctctcacaggactatgaaaccatcttttaagaagttccaaggacaaaagtcacttccataattatagtcctggcaacttgatctttagatctatttttgcttcatctggctctggcattcccataaccttaaaaaatgttcctgttcatactagagaattcccttggcccttatttctaattgaaacctccttgaagtttctgttgctgcttttcatgcagagtgaaatacattctaacctgcagaa

SEQ ID NO: 178051 - DNA, 7326 bp, Homo sapiens
  Payload ID: 14927
  Gene Symbol: RTTN
  Gene Name: rotatin
  Uniprot ID: Q86VV8
  ENST ID: ENST00000255674
  CDS Start-End: 288-6968
ggccaacgctggttctatccctgcttgttgcttttttttttccctccgcttcttgcgacggagactgctgtccaggaagtgcgcagtagtgattctagagaggctggaagctctcctggcgacgctggggccgcgaagggctcacgtaatgactcctactcctggtgagcgcaggcgttgcggaactcaccgtcccacaggacgtgtttccgggggtacattaattgtggctggacgcagtggcgcggcagtttaattctccggcggctgcagattgacgggacgagatggtcctggcagggctcatcaggaaactcggtcatcagctggccgagatcagggagcgcgctctcaagagtattctctgcaagattgagcacaacttaatctgctacgctgatctcattcaggagaggcaactttttcttcatttgctggaatggttcaatttcccgtccgttccgatgaaggaagaggttctgaacctgttaagcagattggttaagtatcccccagcagtccaacatttggttgacgttggtgcagtagagttcttatctaagcttcggtctaatgtggagccaaatctgcaggctgaaattgatggcattctggatggactttttcttcttccttcggaagttcctgcactatcttctgcctcataccaaaccaatcaaactgaattgtcaaaaaaccctgaaatcttaacaggatattttccccaagacaaaagtaatttccagcagatggaagtgccgccacgaccagtggtaaatcagactgtgaagtgcttgaagttttctacatttccttggctacccctgaccaccacagacagacatgtcctctcctctaatgaaagctctttaagaagtagtaaccacactttaatctggaacacctgtgaactattgaaggatgttatcatgcaagattttcctgctgagattttccttcaaaggccaaaaattgttcagagccttttatctctgttgaaactggcctttggagatggaaagcatcgcctggcattacagtcggtgtcctgcctgcagcagctgtgcatgtatttaagaaacagacttaactttcaccgagatccaggttttttctccaataaacacgacacagtttcccaaaattcttctttgtcttattgtcatgaagcaagaggtactcatcattcccagaatccttccccaggaagcagcagccctcggccttctgtggttgggcgcacaggccagcgacccagaggagatggccaggactgggatgcagcgtcctctagtggaagtagtagtcatgctcatgtaaactccaggatatccgttcattcacctttggatatgggacacatagatctgccagagctggaaactgaagacacattggaactacaattccagcagctcagtcttccccagttttgtgtctccattctggaatcagctgttcctctcttaagaacaggtagcagacaagtgataataagagttctggaattgcttacagaggatatgacacttattggtgaagcaatttcaacagatatctgggatgacagcagcctttttggtatagatatgaaggagaaactactcctggtgttgggagcccttggagaaaccatgtgctaccataaaagtagtatcagtttggagcagccagaggtgatgcttgtgcaccacagaatggcctttatcagcatttccctgtttgcagttcgactgctacaaacgcttctccctgttgaaaaggcaagcgagtttttatcagagcctatgtcaacagcattatttctcctttctttggacatgcctatttctttggaatatccaaatattcatgaagctgttgtggcctatttggaacagctgaattctgaaaactacagtatttataaacgaactgcagaggccgtttattcaattgaatgcacctgtaacttcctgtctgatattgggaaagagggagagaagaatctcttagaattagtggagctggcagaccaagccttgcgtagcttttcctatcatcagcatttcccgctaataaaggaaatcatcagcatttgttcaaagatctggaaatctgctcaggccagtccattactacaaggagaaagtcagaaggtgcttctccatatgttgtctcacccattgccacgagtgaaagctgaaacttaccactgctgtctggaaatcacgaaggaatgtttaggtgtccataatgtcactaaacccgtgtcttcactttgcaatggaattcattttctacttcatccaaaagttctgtatgaaatctctgtatttggcattcaagagcccgaaagtgaggtgaacactgctgccaaggccattctgttatacctgcttcagggacgattgatgatgacagcattgacctggaacaagtttattgaatctctctgtcctgtcatcccaatactacagggctatgccgacacagaagatcctctgggtaactgcattctccttctaagcaaagcaagttctgacacagaagagatgcttccgtgtactacccgattaaagtccatgctgcgacttttgctagtgaaaaagccatcggtccgttcgctagcattaaagcttttagcattccatcttaccagtgaagaaggggctgatacaaagcgtcctctaatagacgccagagttctctccagagttactgatttattcattgggaagaaacctattgaactcagactggatgacagaagagagctggttattaagttggagactgttgaaaaggtatatgaaatcttcacctcagatgatgttgatctcgttttgagaaagtcagctgctgaacagttagctgtgattatgcaagatattaaaatgcatgctgtggtgaaaaagttatgcttaattgacaaaataattgagtatttaaatgaatgtgtgagtcaagatggcaaggttgtagaatgtttggtacaaccatgcctcacactcttgaggaaggttttatgtggtgatccagtcatgcgtgtttcgctctcgcaacagtcttctcttttgaccgtgttattcagagtttccttaatatttcatgaagattgtagtgtcgtgactgaagttggagcactattttgtcttctattatttgatgaagtatcgagaatggatatgtggtctgttaatccttccaataaaccttctttgccatcggtcttcagtttgcctgtttccgtttttagaaggtaccatctacctgttcatgtaattggacaccatgctgtgagtccttactccatagttttgcccttatctgctgattgtttggccttgaagccggtgtcagatatgctgagaatagcttggaacctgtcatggtatcatgggagtgataatctgttgaagcaaatgaactctgaaactaaaacgcaagaaattttagatgcattgaagttatctacagaggacatcctcactctgaagataacacacatggctagtgggctgcaggactgcctccattccattgttcaggctgcaacccacagggaagttagggctgctgtcaccaggatgagtttttatcttctgaatgacagattgtctttaaagggttgccctggtccatgtggggttaccttgaagtccttggcttggcacaccgcactaaacaggtttttacaggtgcttcctgcttgcactgaagatgagaaactgctaatagatatcatacattttttaaataaattaataaaggaacaaagaaaaaattcttcactagaacttctaaactggattctcgaattacttcttagacatagtgcaaacccactgttagacctcttggttctgacagagtcacaggcacgagaagaaacagatgatatccggactgctgtcaggcaacaacttcagaaagaactgattgctctttttgataccttgctgctcaatttcatggaagttactgacaggaaatgctcggaacttctttacgtttttcaaacgcagctggctctgaaactgctccagtgtctgaaagtgacggatgcgcctcatttctatggcctgccgtcccttgagcggaccttacgagggatggctaacctcactgcgtttccgggatggagctcacactctcctctcacaaagcctctagatatctgtgtgaagtacttgtcaggtctccttgaggtcattacttctttttatgtggagcgtggaggaaatgctatgtccttcatgggaaaaggtgttacaaagagcacaattctttgcttgcttcacttatcccatgagatgatggcccaggctgggagcttggagtggatgtcactttggttcttgcctttgggtagtcatagtgaagaacatattcctactcaacaaggattggcttggttgattccattatgggttgatcgggacccagaggtgagattcacttcactgggattaggatcagcactgaccacccttgaaacgggctgtgtggccttagcaaacagttgtcagaacatttccggtgggctctggggaactgtggtgaacattcttctggaccagtcagaatgtagtatggtgcgccgggaggcggcatttattcttcagaatctccttgtaattccaatgcctacagaaattataaaggattatacttggcagggtccctgtgttcatgatgaggactctggcctatcgctcattggaaaacctgcccttcaggctcttttatatcactgccatttttatgaacatttgaatcagatggtaaagcattgttacctaggacggtgtatgtttgatttgaatttttctgcttttgatagaaattcagaaagcaatgatttaaatggtttagatgactcattcaagttttggagggctccatctaggacaagtcaggatcgagatccaagttctctctccacctcagaaacaacggtggcaccttcattggggagtactgaatttcagccacttgtgcagtcaacaacacttctacctgaagcctcccatgaccagtttgtggctcaaggtcaccaggaaagtacatcaccacggccacctcatgattcatctctttctgctcccctgcccaaactgtgtgtttttgttactccatctcttctttcagcaatgtgcagcctcttggacaacctcttgacgattgctcccagagacactgcaaaggcttttcgacaagctcatctcatagaacttctctgtagcattgcagatgctaccctcatacagacatgtgtccaggaactcagagccctgctgccttcatcacctccagctgaacacactcaggctcaggtttcctttctcctggaatacctatcctctttgtccaggcttctgcagtcatgtttattggtggagcctgaccttgtgattcaggatgagcttgtgaaacctcttatcaccaatatcattggaattctcaccatatgtaccaaagatgtattagataaagagttaatatcagctttttatcacacatggacacatttatttaatcttctggccatgctcctgaggaaagctggtgccatcacactcccgtttgttaccgtggccctggccaagcactggacagcggcgattgatatgttctgcacatgtgcaggcttgtctgccacgtgtcctgccctgtatactgccagcttgcaattcctttctgttctcttgaccgaagaagcaaaagggcatctccaggctaagagcaaaacacatttatgctgtagtccaacagtggcttcacttcttgatgactctcaggaaaatcagaaatctctagaacaacttagtgatgtaatccttcagtgctatgaagggaaatcctccaaagatatcctgaaaagagtagctgcaaatgcattgatgtcactgctggctgtcagtagaagagcacagaaacatgctttgaaagccaatcttatagacaattgcatggagcagatgaaacacataaatgcacaactgaacctagattctctgaggcctgggaaagcagcattgaaaaaaaaggaggatggtgttattaaagagttaagcattgccatgcagctcctaagaaactgtctttatcaaaatgaggaatgtaaagaagcagctcttgaagctcaccttgtccctgtcttgcactctctctggccttggattttgatggatgattcattgatgcaaatttctctgcagctcctttgtgtctatactgcaaattttccaaatggttgcagttctctttgttggtcaagttgtggacaacaccctgttcaagctacacatagaggagccgtgagcaactctctgatgctgtgtatcctaaagttggcttcccagatgccactggagaacaccacggttcagcagatggtttttatgcttctttcaaacctggccttgtcgcatgactgtaaaggagtaattcagaagagtaacttcttacagaacttcctctctctagcattgccaaaaggaggaaataaacatctaagtaatctgactattctttggttgaagttactcctgaatatatcatctggagaagatgggcaacaaatgattctgaggcttgatggctgtctagacttactaacagagatgagcaaatacaagcacaagagcagccctttattgcctcttcttatctttcataatgtttgcttcagtcctgcaaataaacccaagatcctggctaatgaaaaagtcattactgtgcttgctgcctgtctggaaagtgagaatcaaaatgctcagaggattggagcagctgccctttgggctctgatttacaattatcagaaggcaaaaacagctttgaaaagcccatcagtaaaaagaagagtggatgaagcatactccttagcaaagaaaactttcccaaactcagaagcaaaccctctaaatgcctattatttgaaatgtcttgaaaacctcgtgcagctccttaattcttcctgagtgccatgggatgctacaccttgaagctgacagtcatcaacaggggagctaaagttgaagccagctgtgtgtagcagctgttacctgaagacgtgctacctctctacaaagtgttgatccccttctttcccatgagagagagaactggtgatactccaacaccgtccagttgtggcagctctccagaagtaatagcagctgacaactttctgtgccttttcctttctgttgaaaaggcatagaaagttctgggaacataaacatttttacccttttctatgccatttattttgtaaaaatcctatttaacagttatttaataaaacaatatttttagaaactaaaaattgactaataa

SEQ ID NO: 178052 - DNA, 911 bp, Homo sapiens
  Payload ID: 14927
  Gene Symbol: RTTN
  Gene Name: rotatin
  ENST ID: ENST00000578780
  CDS Start-End: 1-554
tggcttcccagatgccactggagaacaccacggttcagcagatggtttttatgcttctttcaaacctggccttgtcgcatgactgtaaaggagtaattcagaagagtaacttcttacagaacttcctctctctagcattgccaaaaggaggaaataaacatctaagtaatctgactattctttggttgaagttactcctgaatatatcatctggagaagatgggcaacaaatgattctgaggcttgatggctgtctagacttactaacagagatgagcaaatacaagcacaagagcagccctttattgcctcttcttatctttcataatgtttgcttcagtcctgcaaataaacccaagatcctggctaatgaaaaagtcattactgtgcttgctgcctgtctggaaagtgagaatcaaaatgctcagaggattggagcagctgccctttgggctctgatttacaattatcagaaggcaaaaacagctttgaaaagcccatcagtaaaaagaagagtggatgaagcatactccttagcaaagaaaactccttaattcttcctgagtgccatgggatgctacaccttgaagctgacagtcatcaacaggggagctaaagttgaagccagctgtgtgtagcagctgttacctgaagacgtgctacctctctacaaagtgttgatccccttctttcccatgagagagagaactggtgatactccaacaccgtccagttgtggcagctctccagaagtaatagcagctgacaactttctgtgccttttcctttctgttgaaaaggcatagaaagttctgggaacataaacatttttacccttttctatgccatttattttgtaaaaatcctatttaacagttatttaataaaacaatatttttagaaactaaaaa

SEQ ID NO: 178053 - DNA, 6278 bp, Homo sapiens
  Payload ID: 14927
  Gene Symbol: RTTN
  Gene Name: rotatin
  ENST ID: ENST00000583043
  CDS Start-End: 1-2010
aaggatgttatcatgcaagattttcctgctgagattttccttcaaaggccaaaaattgttcagagccttttatctctgttgaaactggcctttggagatggaaagcatcgcctggcattacagtcggtgtcctgcctgcagcagctgtgcatgtatttaagaaacagacttaactttcaccgagatccaggttttttctccaataaacacgacacagtttcccaaaattcttctttgtcttattgtcatgaagcaagaggtactcatcattcccagaatccttccccaggaagcagcagccctcggccttctgtggttgggcgcacaggccagcgacccagaggagatggccaggactgggatgcagcgtcctctagtggaagtagtagtcatgctcatgtaaactccaggatatccgttcattcacctttggatatgggacacatagatctgccagagctggaaactgaagacacattggaactacaattccagcagctcagtcttccccagttttgtgtctccattctggaatcagctgttcctctcttaagaacaggtagcagacaagtgataataagagttctggaattgcttacagaggatatgacacttattggtgaagcaatttcaacagatatctgggatgacagcagcctttttggtatagatatgaaggagaaactactcctggtgttgggagcccttggagaaaccatgtgctaccataaaagtagtatcagtttggagcagccagaggtgatgcttgtgcaccacagaatggcctttatcagcatttccctgtttgcagttcgactgctacaaacgcttctccctgttgaaaaggcaagcgagtttttatcagagcctatgtcaacagcattatttctcctttctttggacatgcctatttctttggaatatccaaatattcatgaagctgttgtggcctatttggaacagctgaattctgaaaactacagtatttataaacgaactgcagaggccgtttattcaattgaatgcacctgtaacttcctgtctgatattgggaaagagggagagaagaatctcttagaattagtggagctggcagaccaagccttgcgtagcttttcctatcatcagcatttcccgctaataaaggaaatcatcagcatttgttcaaagatctggaaatctgctcaggccagtccattactacaaggagaaagtcagaaggtgcttctccatatgttgtctcacccattgccacgagtgaaagctgaaacttaccactgctgtctggaaatcacgaaggaatgtttaggtgtccataatgtcactaaacccgtgtcttcactttgcaatggaattcattttctacttcatccaaaagttctgtatgaaatctctgtatttggcattcaagagcccgaaagtgaggtgaacactgctgccaaggccattctgttatacctgcttcagggacgattgatgatgacagcattgacctggaacaagtttattgaatctctctgtcctgtcatcccaatactacagggctatgccgacacagaagatcctctgggtaactgcattctccttctaagcaaagcaagttctgacacagaagagatgcttccgtgtactacccgattaaagtccatgctgcgacttttgctagtgaaaaagccatcggtccgttcgctagcattaaagcttttagcattccatcttaccagtgaagaaggggctgatacaaagcgtcctctaatagacgccagagttctctccagagttactgatttattcattgggaagaaacctattgaactcagactggatgacagaagagagctggttattaagttggagactgttgaaaaggtatatgaaatcttcacctcagatgatgttgatctcgttttgagaaagtcagctgctgaacagttagctgtgattatgcaaggttgtagaatgtttggtacaaccatgcctcacactcttgaggaaggttttatgtggtgatccagtcatgcgtgtttcgctctcgcaacagtcttctcttttgaccgtgttattcagagtttccttaatatttcatgaagattgtagtgtcgtgactgaagttggagcactattttgtcttctattatttgatgaagtatcgagaatggatatgtggtctgttaatccttccaataaaccttctttgccatcggtcttcagtttgcctgtttccgtttttagaaggtaccatctacctgttcatgtaattggacaccatgctgtgagtccttactccatagttttgcccttatctgctgattgtttggccttgaagccggtgtcagatatgctgagaatagcttggaacctgtcatggtatcatgggagtgataatctgttgaagcaaatgaactctgaaactaaaacgcaagaaattttagatgcattgaagttatctacagaggacatcctcactctgaagataacacacatggctagtgggctgcaggactgcctccattccattgttcaggctgcaacccacagggaagttagggctgctgtcaccaggatgagtttttatcttctgaatgacagattgtctttaaagggttgccctggtccatgtggggttaccttgaagtccttggcttggcacaccgcactaaacaggtttttacaggtgcttcctgcttgcactgaagatgagaaactgctaatagatatcatacattttttaaataaattaataaaggaacaaagaaaaaattcttcactagaacttctaaactggattctcgaattacttcttagacatagtgcaaacccactgttagacctcttggttctgacagagtcacaggcacgagaagaaacagatgatatccggactgctgtcaggcaacaacttcagaaagaactgattgctctttttgataccttgctgctcaatttcatggaagttactgacaggaaatgctcggaacttctttacgtttttcaaacgcagctggctctgaaactgctccagtgtctgaaagtgacggatgcgcctcatttctatggcctgccgtcccttgagcggaccttacgagggatggctaacctcactgcgtttccgggatggagctcacactctcctctcacaaagcctctagatatctgtgtgaagtacttgtcaggtctccttgaggtcattacttctttttatgtggagcgtggaggaaatgctatgtccttcatgggaaaaggtgttacaaagagcacaattctttgcttgcttcacttatcccatgagatgatggcccaggctgggagcttggagtggatgtcactttggttcttgcctttgggtagtcatagtgaagaacatattcctactcaacaaggattggcttggttgattccattatgggttgatcgggacccagaggtgagattcacttcactgggattaggatcagcactgaccacccttgaaacgggctgtgtggccttagcaaacagttgtcagaacatttccggtgggctctggggaactgtggtgaacattcttctggaccagtcagaatgtagtatggtgcgccgggaggcggcatttattcttcagaatctccttgtaattccaatgcctacagaaattataaaggattatacttggcagggtccctgtgttcatgatgaggactctggcctatcgctcattggaaaacctgcccttcaggctcttttatatcactgccatttttatgaacatttgaatcagatggtaaagcattgttacctaggacggtgtatgtttgatttgaatttttctgcttttgatagaaattcagaaagcaatgatttaaatggtttagatgactcattcaagttttggagggctccatctaggacaagtcaggatcgagatccaagttctctctccacctcagaaacaacggtggcaccttcattggggagtactgaatttcagccacttgtgcagtcaacaacacttctacctgaagcctcccatgaccagtttgtggctcaaggtcaccaggaaagtacatcaccacggccacctcatgattcatctctttctgctcccctgcccaaactgtgtgtttttgttactccatctcttctttcagcaatgtgcagcctcttggacaacctcttgacgattgctcccagagacactgcaaaggcttttcgacaagctcatctcatagaacttctctgtagcattgcagatgctaccctcatacagacatgtgtccaggaactcagagccctgctgccttcatcacctccagctgaacacactcaggctcaggtttcctttctcctggaatacctatcctctttgtccaggcttctgcagtcatgtttattggtggagcctgaccttgtgattcaggatgagcttgtgaaacctcttatcaccaatatcattggaattctcaccatatgtaccaaagatgtattagataaagagttaatatcagctttttatcacacatggacacatttatttaatcttctggccatgctcctgaggaaagctggtgccatcacactcccgtttgttaccgtggccctggccaagcactggacagcggcgattgatatgttctgcacatgtgcaggcttgtctgccacgtgtcctgccctgtatactgccagcttgcaattcctttctgttctcttgaccgaagaagcaaaagggcatctccaggctaagagcaaaacacatttatgctgtagtccaacagtggcttcacttcttgatgactctcaggaaaatcagaaatctctagaacaacttagtgatgtaatccttcagtgctatgaagggaaatcctccaaagatatcctgaaaagagtagctgcaaatgcattgatgtcactgctggctgtcagtagaagagcacagaaacatgctttgaaagccaatcttatagacaattgcatggagcagatgaaacacataaatgcacaactgaacctagattctctgaggcctgggaaagcagcattgaaaaaaaaggaggatggtgttattaaagagttaagcattgccatgcagctcctaagaaactgtctttatcaaaatgaggaatgtaaagaagcagctcttgaagctcaccttgtccctgtcttgcactctctctggccttggattttgatggatgattcattgatgcaaatttctctgcagctcctttgtgtctatactgcaaattttccaaatggttgcagttctctttgttggtcaagttgtggacaacaccctgttcaagctacacatagaggagccgtgagcaactctctgatgctgtgtatcctaaagttggcttcccagatgccactggagaacaccacggttcagcagatggtttttatgcttctttcaaacctggccttgtcgcatgactgtaaaggagtaattcagaagcattgccaaaaggaggaaataaacatctaagtaatctgactattctttggttgaagttactcctgaatatatcatctggagaagatgggcaacaaatgattctgaggcttgatggctgtctagacttactaacagagatgagcaaatacaagcacaagagcagccctttattgcctcttcttatctttcataatgtttgcttcagtcctgcaaataaacccaagatcctggctaatgaaaaagtcattactgtgcttgctgcctgtctggaaagtgagaatcaaaatgctcagaggattggagcagctgccctttgggctctgatttacaattatcagaaggcaaaaacagctttgaaaagcccatcagtaaaaagaagagtggatgaagcatactccttagcaaagaaaactttcccaaactcagaagcaaaccctctaaatgcctattatttgaaatgtcttgaaaacctcgtgcagctccttaattcttcctgagtgccatgggatgctacaccttgaagctgacagtcatcaacaggggagctaaagttgaagccagctgtgtgtagcagctgttacctgaagacgtgctacctctctacaaagtgttgatccccttctttcccatgagagagagaactggtgatactccaacaccgtccagttgtggcagctctccagaagtaatagcagctgacaactttctgtgccttttcctttctgttgaaaaggcatagaaagttctgggaacataaacatttttacccttttctatgccatttattttgtaaaaatcctatttaacagttatttaataaaacaatatttttagaaactaaaaa

SEQ ID NO: 178054 - DNA, 6722 bp, Homo sapiens
  Payload ID: 14927
  Gene Symbol: RTTN
  Gene Name: rotatin
  ENST ID: ENST00000581161
  CDS Start-End: 43-1545
cggcagtttaattctccggcggctgcagattgacgggacgagatggtcctggcagggctcatcaggaaactcggtcatcagctggccgagatcagggagcgcgctctcaagagtattctctgcaagattgagcacaacttaatctgctacgctgatctcattcaggagaggcaactttttcttcatttgctggaatggttcaatttcccgtccgttccgatgaaggaagaggttctgaacctgttaagcagattggttaagtatcccccagcagtccaacatttggttgacgttggtgcagtagagttcttatctaagcttcggtctaatgtggagccaaatctgcaggctgaaattgatggcattctggatggactttttcttcttccttcggaagttcctgcactatcttctgcctcataccaaaccaatcaaactgaattgtcaaaaaaccctgaaatcttaacaggatattttccccaagacaaaagtaatttccagcagatggaagtgccgccacgaccagtggtaaatcagactgtgaagtgcttgaagttttctacatttccttggctacccctgaccaccacagacagacatgtcctctcctctaatgaaagctctttaagaagtagtaaccacactttaatctggaacacctgtgaactattgaaggatgttatcatgcaagattttcctgctgagattttccttcaaaggccaaaaattgttcagagccttttatctctgttgaaactggcctttggagatggaaagcatcgcctggcattacagtcggtgtcctgcctgcagcagctgtgcatgtatttaagaaacagacttaactttcaccgagatccaggttttttctccaataaacacgacacagtttcccaaaattcttctttgtcttattgtcatgaagcaagaggtactcatcattcccagaatccttccccaggaagcagcagccctcggccttctgtggttgggcgcacaggccagcgacccagaggagatggccaggactgggatgcagcgtcctctagtggaagtagtagtcatgctcatgtaaactccaggatatccgttcattcacctttggatatgggacacatagatctgccagagctggaaactgaagacacattggaactacaattccagcagctcagtcttccccagttttgtgtctccattctggaatcagctgttcctctcttaagaacaggtagcagacaagtgataataagagttctggaattgcttacagaggatatgacacttattggtgaagcaatttcaacagatatctgggatgacagcagcctttttggtatagatatgaaggagaaactactcctggtgttgggagcccttggagaaaccatgtgctaccataaaagtagtatcagtttggagcagccagaggtgatgcttgtgcaccacagaatggcctttatcagcatttccctgtttgcagttcgactgctacaaacgcttctccctgttgaaaagctgttgtggcctatttggaacagctgaattctgaaaactacagtatttataaacgaactgcagaggccgtttattcaattgaatgcacctgtaacttcctgtctgatattgggaaagagggagagaagaatctcttagaattagtggagctggcagaccaagccttgcgtagcttttcctatcatcagcatttcccgctaataaaggaaatcatcagcatttgttcaaagatctggaaatctgctcaggccagtccattactacaaggagaaagtcagaaggtgcttctccatatgttgtctcacccattgccacgagtgaaagctgaaacttaccactgctgtctggaaatcacgaaggaatgtttaggtgtccataatgtcactaaacccgtgtcttcactttgcaatggaattcattttctacttcatccaaaagttctgtatgaaatctctgtatttggcattcaagagcccgaaagtgaggtgaacactgctgccaaggccattctgttatacctgcttcagggacgattgatgatgacagcattgacctggaacaagtttattgaatctctctgtcctgtcatcccaatactacagggctatgccgacacagaagatcctctgggtaactgcattctccttctaagcaaagcaagttctgacacagaagagatgcttccgtgtactacccgattaaagtccatgctgcgacttttgctagtgaaaaagccatcggtccgttcgctagcattaaagcttttagcattccatcttaccagtgaagaaggggctgatacaaagcgtcctctaatagacgccagagttctctccagagttactgatttattcattgggaagaaacctattgaactcagactggatgacagaagagagctggttattaagttggagactgttgaaaaggtatatgaaatcttcacctcagatgatgttgatctcgttttgagaaagtcagctgctgaacagttagctgtgattatgcaaggttgtagaatgtttggtacaaccatgcctcacactcttgaggaaggttttatgtggtgatccagtcatgcgtgtttcgctctcgcaacagtcttctcttttgaccgtgttattcagagtttccttaatatttcatgaagattgtagtgtcgtgactgaagttggagcactattttgtcttctattatttgatgaagtatcgagaatggatatgtggtctgttaatccttccaataaaccttctttgccatcggtcttcagtttgcctgtttccgtttttagaaggtaccatctacctgttcatgtaattggacaccatgctgtgagtccttactccatagttttgcccttatctgctgattgtttggccttgaagccggtgtcagatatgctgagaatagcttggaacctgtcatggtatcatgggagtgataatctgttgaagcaaatgaactctgaaactaaaacgcaagaaattttagatgcattgaagttatctacagaggacatcctcactctgaagataacacacatggctagtgggctgcaggactgcctccattccattgttcaggctgcaacccacagggaagttagggctgctgtcaccaggatgagtttttatcttctgaatgacagattgtctttaaagggttgccctggtccatgtggggttaccttgaagtccttggcttggcacaccgcactaaacaggtttttacaggtgcttcctgcttgcactgaagatgagaaactgctaatagatatcatacattttttaaataaattaataaaggaacaaagaaaaaattcttcactagaacttctaaactggattctcgaattacttcttagacatagtgcaaacccactgttagacctcttggttctgacagagtcacaggcacgagaagaaacagatgatatccggactgctgtcaggcaacaacttcagaaagaactgattgctctttttgataccttgctgctcaatttcatggaagttactgacaggaaatgctcggaacttctttacgtttttcaaacgcagctggctctgaaactgctccagtgtctgaaagtgacggatgcgcctcatttctatggcctgccgtcccttgagcggaccttacgagggatggctaacctcactgcgtttccgggatggagctcacactctcctctcacaaagcctctagatatctgtgtgaagtacttgtcaggtctccttgaggtcattacttctttttatgtggagcgtggaggaaatgctatgtccttcatgggaaaaggtgttacaaagagcacaattctttgcttgcttcacttatcccatgagatgatggcccaggctgggagcttggagtggatgtcactttggttcttgcctttgggtagtcatagtgaagaacatattcctactcaacaaggattggcttggttgattccattatgggttgatcgggacccagaggtgagattcacttcactgggattaggatcagcactgaccacccttgaaacgggctgtgtggccttagcaaacagttgtcagaacatttccggtgggctctggggaactgtggtgaacattcttctggaccagtcagaatgtagtatggtgcgccgggaggcggcatttattcttcagaatctccttgtaattccaatgcctacagaaattataaaggattatacttggcagggtccctgtgttcatgatgaggactctggcctatcgctcattggaaaacctgcccttcaggctcttttatatcactgccatttttatgaacatttgaatcagatggtaaagcattgttacctaggacggtgtatgtttgatttgaatttttctgcttttgatagaaattcagaaagcaatgatttaaatggtttagatgactcattcaagttttggagggctccatctaggacaagtcaggatcgagatccaagttctctctccacctcagaaacaacggtggcaccttcattggggagtactgaatttcagccacttgtgcagtcaacaacacttctacctgaagcctcccatgaccagtttgtggctcaaggtcaccaggaaagtacatcaccacggccacctcatgattcatctctttctgctcccctgcccaaactgtgtgtttttgttactccatctcttctttcagcaatgtgcagcctcttggacaacctcttgacgattgctcccagagacactgcaaaggcttttcgacaagctcatctcatagaacttctctgtagcattgcagatgctaccctcatacagacatgtgtccaggaactcagagccctgctgccttcatcacctccagctgaacacactcaggctcaggtttcctttctcctggaatacctatcctctttgtccaggcttctgcagtcatgtttattggtggagcctgaccttgtgattcaggatgagcttgtgaaacctcttatcaccaatatcattggaattctcaccatatgtaccaaagatgtattagataaagagttaatatcagctttttatcacacatggacacatttatttaatcttctggccatgctcctgaggaaagctggtgccatcacactcccgtttgttaccgtggccctggccaagcactggacagcggcgattgatatgttctgcacatgtgcaggcttgtctgccacgtgtcctgccctgtatactgccagcttgcaattcctttctgttctcttgaccgaagaagcaaaagggcatctccaggctaagagcaaaacacatttatgctgtagtccaacagtggcttcacttcttgatgactctcaggaaaatcagaaatctctagaacaacttagtgatgtaatccttcagtgctatgaagggaaatcctccaaagatatcctgaaaagagtagctgcaaatgcattgatgtcactgctggctgtcagtagaagagcacagaaacatgctttgaaagccaatcttatagacaattgcatggagcagatgaaacacataaatgcacaactgaacctagattctctgaggcctgggaaagcagcattgaaaaaaaaggaggatggtgttattaaagagttaagcattgccatgcagctcctaagaaactgtctttatcaaaatgaggaatgtaaagaagcagctcttgaagctcaccttgtccctgtcttgcactctctctggccttggattttgatggatgattcattgatgcaaatttctctgcagctcctttgtgtctatactgcaaattttccaaatggttgcagttctctttgttggtcaagttgtggacaacaccctgttcaagctacacatagaggagccgtgagcaactctctgatgctgtgtatcctaaagttggcttcccagatgccactggagaacaccacggttcagcagatggtttttatgcttctttcaaacctggccttgtcgcatgactgtaaaggagtaattcagaagagtaacttcttacagaacttcctctctctagcattgccaaaaggaggaaataaacatctaagtaatctgactattctttggttgaagttactcctgaatatatcatctggagaagatgggcaacaaatgattctgaggcttgatggctgtctagacttactaacagagatgagcaaatacaagcacaagagcagccctttattgcctcttcttatctttcataatgtttgcttcagtcctgcaaataaacccaagatcctggctaatgaaaaagtcattactgtgcttgctgcctgtctggaaagtgagaatcaaaatgctcagaggattggagcagctgccctttgggctctgatttacaattatcagaaggcaaaaacagctttgaaaagcccatcagtaaaaagaagagtggatgaagcatactccttagcaaagaaaactttcccaaactcagaagcaaaccctctaaatgcctattatttgaaatgtcttgaaaacctcgtgcagctccttaattcttcctgagtgccatgggatgctacaccttgaagctgacagtcatcaacaggggagctaaagttgaagccagctgtgtgtagcagctgttacctgaagacgtgctacctctctacaaagtgttgatccccttctttcccatgagagagagaactggtgatactccaacaccgtccagttgtggcagctct

SEQ ID NO: 178055 - DNA, 6621 bp, Homo sapiens
  Payload ID: 14928
  Gene Symbol: RSBN1
  Gene Name: round spermatid basic protein 1
  Uniprot ID: Q5VWQ0
  ENST ID: ENST00000261441
  CDS Start-End: 65-2473
gctttacaatagaagctcggttggagaggcctgcggagaaaagctgggaacggccgcttccggcatgttcatctctggacgaagaacggccgacaagtggagggcggaggagagactccaatgcccagcgggcagtgcgcgggcggcgcttgcgcgatgcgcggacgggggggcggtcgggccatttaaatgtgtgtttgtgggtgaaatggctgcgcaggtcggagcggtgcgcgtagtacgggcggtggcggcgcaggaggagccggacaaagaggggaaggagaaacctcatgctggggtctccccgcggggagttaaacggcagcgccgatctagcagtggggggtctcaggagaagcgggggcggccgagccaggagccccctctcgctccccctcaccggcggcgtcgcagccgccaacatcctgggccgctgccgccaacgaatgcagccccaactgtcccaggccctgttgagcctcttctcctgccgcctccgccgccaccttcgctggcacccgccgggcccgctgtcgctgcccctctcccggccccaagcacctcggccctcttcaccttctcgcctctgacggtgagcgcggccgggcccaagcataagggccacaaggagcggcacaagcaccatcaccaccgcggccccgatggtgatcccagctcctgcggaaccgatctcaagcacaaggacaagcaggaaaacggcgagaggactggaggggtgcctctgatcaaagcccccaagagagaaacaccagatgaaaatggtaaaacccagagagccgatgattttgtcttgaagaaaataaagaagaaaaagaaaaagaaacaccgagaagacatgcgaggaagacgccttaaaatgtacaataaggaagtacaaaccgtctgtgctggcctgacccgcatcagtaaagaaattctcacccaaggacaaataaatagcacttcaggacttaataaggagtccttcaggtatctgaaagatgaacagctgtgccgattaaatttgggtatgcaagaatatcgggtaccccagggagtacaaacaccttttatgactcaccaggaacattctattcgtagaaatttcttaaaaacaggtactaaatttagcaactttattcatgaggaacaccagtccaatggtggtgctcttgtccttcatgcttacatggatgaactctcatttttgtctccaatggagatggagagattttctgaggagtttcttgctttgacattcagtgaaaatgagaaaaatgctgcttactatgctttagcaatagtgcatggagcggctgcttatctcccagacttcttggactactttgcttttaatttccccaacactccagtgaaaatggaaattctgggcaagaaagatattgaaacaaccaccatttcaaattttcacactcaggtcaacaggacatactgctgtggcacctaccgagcaggtcctatgcggcagataagtctcgttggagcagtagatgaagaagttggtgattatttcccagagttccttgatatgttagaagaatcaccatttctgaaaatgactttgccctggggtacactttctagcctccgactccagtgtaggtcccagagtgatgatgggcctataatgtgggtaaggccaggagaacagatgatccctacagcagatatgccaaagtcacccttcaaaagacgacgatcaatgaatgaaataaaaaatctccagtacctacctcggaccagtgaaccccgcgaagttctctttgaagataggactagagctcatgctgatcatgtcggtcaggggtttgactggcagagtacggctgctgttggagttttgaaagctgtacaatttggtgaatggagtgaccaacctcgcataaccaaagatgtgatttgttttcatgctgaggattttactgatgttgtacaaagacttcagttagatcttcatgaacctccagtttcccagtgcgtacagtgggtagatgaagctaaactaaaccaaatgaggcgggaaggcattcgttatgctagaattcagctttgcgacaatgatatctacttcatccctagaaatgtcattcatcagttcaaaacagtttcggcggtgtgcagcttagcctggcatataaggcttaaacagtaccaccctgttgtggaagccactcaaaacacagaaagcaattctaacatggactgtggtttaactggaaagcgagaattagaagttgactcccaatgtgtgaggataaaaactgaatctgaagaagcatgcacagagattcagctgttaacaactgcttcatcatctttcccacctgcatcagaacttaatctacagcaagatcagaagactcagcctattccagttttaaaagtggaaagtagactggactctgaccagcaacacaatctgcaagaacattcaaccacttctgtgtgatatgtacatattcaaacacattttttaacttttttaaattttgatgtgaagttatagttttataactggcttaagttaagttttattggagaaatcttgcctataattctataaagagaaatgacattccacaaatgtcaagcatatcttttttacacagattatgcaaagttaagagttgtatcttatcccgttagtacagtatgtaatagtgggtctgctgctactttctgttttaaggtgtgaggtaacaattcaatctcttcttcaaatcaaaatgagaattctctggaataacagattcttgtttggtaaattattcacttcccttaattttatcttgccttgtctcttgccatatttgctgtttttatggataaataagatttatggtttagtacttgtgtctttatggcacaggttcaatttctacagtgaaaatggcataggttgcaggaaagaatttctgcatctggtacatgggcaagtaagttatttagttctaaccacaaataacaagtagtttccaaggaaatttcagtggctctctggtttcttaacaaaagagaaagcacagcactttctgatccaaactgtcttttttttgtatctgttatttaaagcccagtggatatttcaattaaaaaaaaaatctaaagatgaatagtccttggtcattcattatccatggctcattaatctcttctagaatatatgctaactgttgaagatattttgggtaaaagagataatgttgacatgatactctattgttctgcttcctggcatcctcacattttgtggggataattttgcttcctaaactgatcacaactattaaacttagagaataataatagtctttctgatgaggctgccatattttgagcatcaatcttatgataaactattcttgtcacttggcatcaacctcttcatgataaatatctactactgagacacttcaattcacagttttaactggtgaatacctgggtttatttactattactctgtgttgctattttctaagaaagaatacagcactagacttcatcctagagtttcaggtaggctaatgcttagtgcctgagtatttaaattttcttttcaaacaggcacagttcacattgctagtatggtcctaactttctgttattttagaatgttaacatgattcacattatactttctcttagttaataatacagtaggccttttgtttattaatggaagagtactccccacacctaagaccagattcttatatctccctggttacagtgcaatttggagattttttttttttcctggatggtaagatttgaaatatttacattaacataggcaaaaaaaaaaaaaaatacaagatgctgctttattatgtctgtcaccatgaaaacttagctgcatcttttgaaatatcaaatatgaattttctctaaaatattctgaaataggttaaatcttatataaatattactttgtgcaatattgttgtgtagttaaatgcatattagcaaagtatagaggtcactgtgtaaaccgatagaaaagtaaccatcagcaaatactgcagtgattagttagaatctgtattattccttatatatatgtatatgtatgtattctctgttacaaaggatgaagacaaatagggatacatttcaatgtaaaccatttatgaattggaagtgatgttggctttagttatctttgtaaataaggtaattagaatggtatgaaaggtaatgtgattattgcaggggtgtttttaaatcttgggtataaattctagggtaaattccagtttatccagactagtttttaacgggacctgcctttgagggtgttttttgttattttgttggggaggggtttaatcacaaagtgtgtgggtttgggttatttcttgtttttatttttctgtccagaagagctttaccaggctgtgcaaagtaaaattcttctcaggcaacatttgcttttaaaaataatcatgaagagaaggctgttaaagcaaaaattttttttttttaattttttcttgtcttccaagatccgatttccccatctcccacttgccatccagcagatgccatctgtcatccaagctggtcattgctaataaacaaggagactgtctcctgacagccagcactgtgtattatcactcaggaaccagcggatctgcaaagacctacaatcaaaagcaaatccccattttccttttataaaacattctaccctcacctccaatataaacacattaaaagagtacaataaaaatgtttaaaatcatgtactaataaattcattgtatgttagaattgcaatagaatgaagagaaacatttagctagtaacgtgatctgaaaactgaatgtcctatgtgagtattagattttaatagcatgctttaaagactgatgagtataaaagcagaagttttgcgttttttactgctttcaaagctgtatcctagtttagtgatacaaatgattgcaatttttctaaatcattaaattatttggtttggtggagtgaggcatggagcaatctggcgtcttctgatttgttaaagtagtgatggcagtgaagttgtaactgaaatttaagctgatcttcctttttggtatattatccgttgtgccagctcttgagattacttgcacaatgtggctataagttttaatattttgtggagcagagggatggtttttaaatgtgcttatggaaaggacccaataaatgaatattcctaacttagtaaagtagaataatttcatggtattcattaaaaagcataaaagtcttcctcttgccccagaagtaattctctataccaagatatgctaggagtaggatgatgattcaaagtggtaacccaaattcataaagcaataataataaaaacctatatagtatgttctctcctccaaagttttaactctaaaaattggttcctaggtttaattgtacctttaatttgcttattcagtacttagaatttgtttaactggtacttttattattttttagtgaaagacttttgaaaagtgccctttccccttaagagacagttggaataccagttgactaatattacaagctcttgtagggggaaaaaggagcttattaaagttgtttactaaactttaggaaaagatgtcttgcatcagtcttactaggcataaaagtcacacttaatgactggaaaaaacttgcttattgcctttccctatataaatattaattgtctagaatgaaagctaatataggaacaagactcccaaatccatgaaaacgcttagtgaatatattcttaatcattaataaattagcccattatattttcatctgtatttgccataaaaaatttatttgcatttatgcctttaggataattttgtatctttctaatctgttttatcattgctacaggtttttaaaaaagaacctttcactagctagcacatgccagaggttcacatctgttttgtttttcaaacaggtcgtagctgtatttattggccatgcaagtagaggaaatgcacagtacaaatgtttttctttagcacgtaagggacctatccttgtcttgaaagtttgttgctttaaaagcaagtatctctccataaatattatggccttccattttcttcatacattttttaggatccacttgtgcatgtagttgagaccactgtctcttaaaatatagcacttttcaattctctctaaagaaatacttatgtactactatcacatgttgtaaattttcatgtaatagtgttttctgtgagtaaactccattttgattggcagctaagactttttttcctgtggcttttatttatctaagaggtctttgcatatagatgaaatgtatatttgcctggcggactatttgcgttgtgtggccttagtttgtttattgacattaacgagtgttttaaaaaggtttttaatgaatagtcttaaatctaaatttgtgtgaataatccttttaacacagtgcttttttgtagctgtctaagtgtgttaaattgttaagctatttctttgtaaaataggacaatggaatgcatagtttttttttttcctgtaaagtatttttttaataaaaaaagtctgatttgtccttta

SEQ ID NO: 178056 - DNA, 3772 bp, Homo sapiens
  Payload ID: 14928
  Gene Symbol: RSBN1
  Gene Name: round spermatid basic protein 1
  ENST ID: ENST00000476412
  CDS Start-End: 26-1261
atttaaatgtgtgtttgtgggtgaaatggctgcgcaggtcggagcggtgcgcgtagtacgggcggtggcggcgcaggaggagccggacaaagaggggaaggagaaacctcatgctggggtctccccgcggggagttaaacggcagcgccgatctagcagtggggggtctcaggagaagcgggggcggccgagccaggagccccctctcgctccccctcaccggcggcgtcgcagccgccaacatcctgggccgctgccgccaacgaatgcagccccaactgtcccaggccctgttgagcctcttctcctgccgcctccgccgccaccttcgctggcacccgccgggcccgctgtcgctgcccctctcccggccccaagcacctcggccctcttcaccttctcgcctctgacggtgagcgcggccgggcccaagcataagggccacaaggagcggcacaagcaccatcaccaccgcggccccgatggtgatcccagctcctgcggaaccgatctcaagcacaaggacaagcaggaaaacggcgagaggactggaggggtgcctctgatcaaagcccccaagagagaaacaccagatgaaaatggtaaaacccagagagccgatgattttgtcttgaagaaaataaagaagaaaaagaaaaagaaacaccgagaagacatgcgaggaagacgccttaaaatgtacaataaggaagtacaaaccgtctgtgctggcctgacccgcatcagtaaagaaattctcacccaaggacaaataaatagcacttcaggacttaataaggagtccttcaggtatctgaaagatgaacagctgtgccgattaaatttgggtatgcaagaatatcgggtaccccagggagtacaaacaccttttatgactcaccaggaacattctattcgtagaaatttcttaaaaacaggtactaaatttagcaactttattcatgaggaacaccagtccaatggtggtgctcttgtccttcatgcttacatggatgaactctcatttttgtctccaatggagatggagagattttctgaggagtttcttgctttgacattcagtgaaaatgagaaaaatgctgcttactatgctttagcaatagtgcatggagcggctgcttatctcccagacttcttggactactttgcttttaatttccccaacactccagtgaaaatggaaattctgggcaagaaagatattgaaacaaccaccatttcaaattttcacactcagtagagagagcaggagcagccaatgtggagaggtcgcaagatggggctgcccaagatgttggaacaccatgtgcaataaagggcttcgtcttggattttggccttattaccacaaccaggtcaacaggacatactgctgtggcacctaccgagcaggtcctatgcggcagataagtctcgttggagcagtagatgaagaagttggtgattatttcccagagttccttgatatgttagaagaatcaccatttctgaaaatgactttgccctggggtacactttctagcctccgactccagtgtaggtcccagagtgatgatgggcctataatgtgggtaaggccaggagaacagatgatccctacagcagatatgccaaagtcacccttcaaaagacgacgatcaatgaatgaaataaaaaatctccagtacctacctcggaccagtgaaccccgcgaagttctctttgaagataggactagagctcatgctgatcatgtcggtcaggggtttgactggcagagtacggctgctgttggagttttgaaagctgtacaatttggtgaatggagtgaccaacctcgcataaccaaagatgtgatttgttttcatgctgaggattttactgatgttgtacaaagacttcagttagatcttcatgaacctccagtttcccagtgcgtacagtgggtagatgaagctaaactaaaccaaatgaggcgggaaggcattcgttatgctagaattcagctttgcgacaatgatatctacttcatccctagaaatgtcattcatcagttcaaaacagtttcggcggtgtgcagcttagcctggcatataaggcttaaacagtaccaccctgttgtggaagccactcaaaacacagaaagcaattctaacatggactgtggtttaactggaaagcgagaattagaagttgactcccaatgtgtgaggataaaaactgaatctgaagaagcatgcacagagattcagctgttaacaactgcttcatcatctttcccacctgcatcagaacttaatctacagcaagatcagaagactcagcctattccagttttaaaagtggaaagtagactggactctgaccagcaacacaatctgcaagaacattcaaccacttctgtgtgatatgtacatattcaaacacattttttaacttttttaaattttgatgtgaagttatagttttataactggcttaagttaagttttattggagaaatcttgcctataattctataaagagaaatgacattccacaaatgtcaagcatatcttttttacacagattatgcaaagttaagagttgtatcttatcccgttagtacagtatgtaatagtgggtctgctgctactttctgttttaaggtgtgaggtaacaattcaatctcttcttcaaatcaaaatgagaattctctggaataacagattcttgtttggtaaattattcacttcccttaattttatcttgccttgtctcttgccatatttgctgtttttatggataaataagatttatggtttagtacttgtgtctttatggcacaggttcaatttctacagtgaaaatggcataggttgcaggaaagaatttctgcatctggtacatgggcaagtaagttatttagttctaaccacaaataacaagtagtttccaaggaaatttcagtggctctctggtttcttaacaaaagagaaagcacagcactttctgatccaaactgtcttttttttgtatctgttatttaaagcccagtggatatttcaattaaaaaaaaaatctaaagatgaatagtccttggtcattcattatccatggctcattaatctcttctagaatatatgctaactgttgaagatattttgggtaaaagagataatgttgacatgatactctattgttctgcttcctggcatcctcacattttgtggggataattttgcttcctaaactgatcacaactattaaacttagagaataataatagtctttctgatgaggctgccatattttgagcatcaatcttatgataaactattcttgtcacttggcatcaacctcttcatgataaatatctactactgagacacttcaattcacagttttaactggtgaatacctgggtttatttactattactctgtgttgctattttctaagaaagaatacagcactagacttcatcctagagtttcaggtaggctaatgcttagtgcctgagtatttaaattttcttttcaaacaggcacagttcacattgctagtatggtcctaactttctgttattttagaatgttaacatgattcacattatactttctcttagttaataatacagtaggccttttgtttattaatggaagagtactccccacacctaagaccagattcttatatctccctggttacagtgcaatttggagattttttttttttcctggatggtaagatttgaaatatttacattaacataggcaaaaaaaaaaaaaaa

SEQ ID NO: 178057 - DNA, 2703 bp, Homo sapiens
  Payload ID: 14928
  Gene Symbol: RSBN1
  Gene Name: round spermatid basic protein 1
  ENST ID: ENST00000616024
  CDS Start-End: 8-2065
gggtgaaatggctgcgcaggtcggagcgctgccgccaacgaatgcagccccaactgtcccaggccctgttgagcctcttctcctgccgcctccgccgccaccttcgctggcacccgccgggcccgctgtcgctgcccctctcccggccccaagcacctcggccctcttcaccttctcgcctctgacggtgagcgcggccgggcccaagcataagggccacaaggagcggcacaagcaccatcaccaccgcggccccgatggtgatcccagctcctgcggaaccgatctcaagcacaaggacaagcaggaaaacggcgagaggactggaggggtgcctctgatcaaagcccccaagagagaaacaccagatgaaaatggtaaaacccagagagccgatgattttgtcttgaagaaaataaagaagaaaaagaaaaagaaacaccgagaagacatgcgaggaagacgccttaaaatgtacaataaggaagtacaaaccgtctgtgctggcctgacccgcatcagtaaagaaattctcacccaaggacaaataaatagcacttcaggacttaataaggagtccttcaggtatctgaaagatgaacagctgtgccgattaaatttgggtatgcaagaatatcgggtaccccagggagtacaaacaccttttatgactcaccaggaacattctattcgtagaaatttcttaaaaacaggtactaaatttagcaactttattcatgaggaacaccagtccaatggtggtgctcttgtccttcatgcttacatggatgaactctcatttttgtctccaatggagatggagagattttctgaggagtttcttgctttgacattcagtgaaaatgagaaaaatgctgcttactatgctttagcaatagtgcatggagcggctgcttatctcccagacttcttggactactttgcttttaatttccccaacactccagtgaaaatggaaattctgggcaagaaagatattgaaacaaccaccatttcaaattttcacactcaggtcaacaggacatactgctgtggcacctaccgagcaggtcctatgcggcagataagtctcgttggagcagtagatgaagaagttggtgattatttcccagagttccttgatatgttagaagaatcaccatttctgaaaatgactttgccctggggtacactttctagcctccgactccagtgtaggtcccagagtgatgatgggcctataatgtgggtaaggccaggagaacagatgatccctacagcagatatgccaaagtcacccttcaaaagacgacgatcaatgaatgaaataaaaaatctccagtacctacctcggaccagtgaaccccgcgaagttctctttgaagataggactagagctcatgctgatcatgtcggtcaggggtttgactggcagagtacggctgctgttggagttttgaaagctgtacaatttggtgaatggagtgaccaacctcgcataaccaaagatgtgatttgttttcatgctgaggattttactgatgttgtacaaagacttcagttagatcttcatgaacctccagtttcccagtgcgtacagtgggtagatgaagctaaactaaaccaaatgaggcgggaaggcattcgttatgctagaattcagctttgcgacaatgatatctacttcatccctagaaatgtcattcatcagttcaaaacagtttcggcggtgtgcagcttagcctggcatataaggcttaaacagtaccaccctgttgtggaagccactcaaaacacagaaagcaattctaacatggactgtggtttaactggaaagcgagaattagaagttgactcccaatgtgtgaggataaaaactgaatctgaagaagcatgcacagagattcagctgttaacaactgcttcatcatctttcccacctgcatcagaacttaatctacagcaagatcagaagactcagcctattccagttttaaaagtggaaagtagactggactctgaccagcaacacaatctgcaagaacattcaaccacttctgtgtgatatgtacatattcaaacacattttttaacttttttaaattttgatgtgaagttatagttttataactggcttaagttaagttttattggagaaatcttgcctataattctataaagagaaatgacattccacaaatgtcaagcatatcttttttacacagattatgcaaagttaagagttgtatcttatcccgttagtacagtatgtaatagtgggtctgctgctactttctgttttaaggtgtgaggtaacaattcaatctcttcttcaaatcaaaatgagaattctctggaataacagattcttgtttggtaaattattcacttcccttaattttatcttgccttgtctcttgccatatttgctgtttttatggataaataagatttatggtttagtacttgtgtctttatggcacaggttcaatttctacagtgaaaatggcataggttgcaggaaagaatttctgcatctggtacatgggcaagtaagttatttagttctaaccacaaataacaagtagtttccaaggaaatttcagtggctctctggtttcttaacaaaagagaaagcacagcactttctgatccaaactgtcttttttttgtatctgttatttaaagcccagtggatatttc

SEQ ID NO: 178058 - DNA, 6592 bp, Homo sapiens
  Payload ID: 14928
  Gene Symbol: RSBN1
  Gene Name: round spermatid basic protein 1
  Uniprot ID: Q5VWQ0
  ENST ID: ENST00000612242
  CDS Start-End: 37-2445
gcctgcggagaaaagctgggaacggccgcttccggcatgttcatctctggacgaagaacggccgacaagtggagggcggaggagagactccaatgcccagcgggcagtgcgcgggcggcgcttgcgcgatgcgcggacgggggggcggtcgggccatttaaatgtgtgtttgtgggtgaaatggctgcgcaggtcggagcggtgcgcgtagtacgggcggtggcggcgcaggaggagccggacaaagaggggaaggagaaacctcatgctggggtctccccgcggggagttaaacggcagcgccgatctagcagtggggggtctcaggagaagcgggggcggccgagccaggagccccctctcgctccccctcaccggcggcgtcgcagccgccaacatcctgggccgctgccgccaacgaatgcagccccaactgtcccaggccctgttgagcctcttctcctgccgcctccgccgccaccttcgctggcacccgccgggcccgctgtcgctgcccctctcccggccccaagcacctcggccctcttcaccttctcgcctctgacggtgagcgcggccgggcccaagcataagggccacaaggagcggcacaagcaccatcaccaccgcggccccgatggtgatcccagctcctgcggaaccgatctcaagcacaaggacaagcaggaaaacggcgagaggactggaggggtgcctctgatcaaagcccccaagagagaaacaccagatgaaaatggtaaaacccagagagccgatgattttgtcttgaagaaaataaagaagaaaaagaaaaagaaacaccgagaagacatgcgaggaagacgccttaaaatgtacaataaggaagtacaaaccgtctgtgctggcctgacccgcatcagtaaagaaattctcacccaaggacaaataaatagcacttcaggacttaataaggagtccttcaggtatctgaaagatgaacagctgtgccgattaaatttgggtatgcaagaatatcgggtaccccagggagtacaaacaccttttatgactcaccaggaacattctattcgtagaaatttcttaaaaacaggtactaaatttagcaactttattcatgaggaacaccagtccaatggtggtgctcttgtccttcatgcttacatggatgaactctcatttttgtctccaatggagatggagagattttctgaggagtttcttgctttgacattcagtgaaaatgagaaaaatgctgcttactatgctttagcaatagtgcatggagcggctgcttatctcccagacttcttggactactttgcttttaatttccccaacactccagtgaaaatggaaattctgggcaagaaagatattgaaacaaccaccatttcaaattttcacactcaggtcaacaggacatactgctgtggcacctaccgagcaggtcctatgcggcagataagtctcgttggagcagtagatgaagaagttggtgattatttcccagagttccttgatatgttagaagaatcaccatttctgaaaatgactttgccctggggtacactttctagcctccgactccagtgtaggtcccagagtgatgatgggcctataatgtgggtaaggccaggagaacagatgatccctacagcagatatgccaaagtcacccttcaaaagacgacgatcaatgaatgaaataaaaaatctccagtacctacctcggaccagtgaaccccgcgaagttctctttgaagataggactagagctcatgctgatcatgtcggtcaggggtttgactggcagagtacggctgctgttggagttttgaaagctgtacaatttggtgaatggagtgaccaacctcgcataaccaaagatgtgatttgttttcatgctgaggattttactgatgttgtacaaagacttcagttagatcttcatgaacctccagtttcccagtgcgtacagtgggtagatgaagctaaactaaaccaaatgaggcgggaaggcattcgttatgctagaattcagctttgcgacaatgatatctacttcatccctagaaatgtcattcatcagttcaaaacagtttcggcggtgtgcagcttagcctggcatataaggcttaaacagtaccaccctgttgtggaagccactcaaaacacagaaagcaattctaacatggactgtggtttaactggaaagcgagaattagaagttgactcccaatgtgtgaggataaaaactgaatctgaagaagcatgcacagagattcagctgttaacaactgcttcatcatctttcccacctgcatcagaacttaatctacagcaagatcagaagactcagcctattccagttttaaaagtggaaagtagactggactctgaccagcaacacaatctgcaagaacattcaaccacttctgtgtgatatgtacatattcaaacacattttttaacttttttaaattttgatgtgaagttatagttttataactggcttaagttaagttttattggagaaatcttgcctataattctataaagagaaatgacattccacaaatgtcaagcatatcttttttacacagattatgcaaagttaagagttgtatcttatcccgttagtacagtatgtaatagtgggtctgctgctactttctgttttaaggtgtgaggtaacaattcaatctcttcttcaaatcaaaatgagaattctctggaataacagattcttgtttggtaaattattcacttcccttaattttatcttgccttgtctcttgccatatttgctgtttttatggataaataagatttatggtttagtacttgtgtctttatggcacaggttcaatttctacagtgaaaatggcataggttgcaggaaagaatttctgcatctggtacatgggcaagtaagttatttagttctaaccacaaataacaagtagtttccaaggaaatttcagtggctctctggtttcttaacaaaagagaaagcacagcactttctgatccaaactgtcttttttttgtatctgttatttaaagcccagtggatatttcaattaaaaaaaaaatctaaagatgaatagtccttggtcattcattatccatggctcattaatctcttctagaatatatgctaactgttgaagatattttgggtaaaagagataatgttgacatgatactctattgttctgcttcctggcatcctcacattttgtggggataattttgcttcctaaactgatcacaactattaaacttagagaataataatagtctttctgatgaggctgccatattttgagcatcaatcttatgataaactattcttgtcacttggcatcaacctcttcatgataaatatctactactgagacacttcaattcacagttttaactggtgaatacctgggtttatttactattactctgtgttgctattttctaagaaagaatacagcactagacttcatcctagagtttcaggtaggctaatgcttagtgcctgagtatttaaattttcttttcaaacaggcacagttcacattgctagtatggtcctaactttctgttattttagaatgttaacatgattcacattatactttctcttagttaataatacagtaggccttttgtttattaatggaagagtactccccacacctaagaccagattcttatatctccctggttacagtgcaatttggagattttttttttttcctggatggtaagatttgaaatatttacattaacataggcaaaaaaaaaaaaaaatacaagatgctgctttattatgtctgtcaccatgaaaacttagctgcatcttttgaaatatcaaatatgaattttctctaaaatattctgaaataggttaaatcttatataaatattactttgtgcaatattgttgtgtagttaaatgcatattagcaaagtatagaggtcactgtgtaaaccgatagaaaagtaaccatcagcaaatactgcagtgattagttagaatctgtattattccttatatatatgtatatgtatgtattctctgttacaaaggatgaagacaaatagggatacatttcaatgtaaaccatttatgaattggaagtgatgttggctttagttatctttgtaaataaggtaattagaatggtatgaaaggtaatgtgattattgcaggggtgtttttaaatcttgggtataaattctagggtaaattccagtttatccagactagtttttaacgggacctgcctttgagggtgttttttgttattttgttggggaggggtttaatcacaaagtgtgtgggtttgggttatttcttgtttttatttttctgtccagaagagctttaccaggctgtgcaaagtaaaattcttctcaggcaacatttgcttttaaaaataatcatgaagagaaggctgttaaagcaaaaattttttttttttaattttttcttgtcttccaagatccgatttccccatctcccacttgccatccagcagatgccatctgtcatccaagctggtcattgctaataaacaaggagactgtctcctgacagccagcactgtgtattatcactcaggaaccagcggatctgcaaagacctacaatcaaaagcaaatccccattttccttttataaaacattctaccctcacctccaatataaacacattaaaagagtacaataaaaatgtttaaaatcatgtactaataaattcattgtatgttagaattgcaatagaatgaagagaaacatttagctagtaacgtgatctgaaaactgaatgtcctatgtgagtattagattttaatagcatgctttaaagactgatgagtataaaagcagaagttttgcgttttttactgctttcaaagctgtatcctagtttagtgatacaaatgattgcaatttttctaaatcattaaattatttggtttggtggagtgaggcatggagcaatctggcgtcttctgatttgttaaagtagtgatggcagtgaagttgtaactgaaatttaagctgatcttcctttttggtatattatccgttgtgccagctcttgagattacttgcacaatgtggctataagttttaatattttgtggagcagagggatggtttttaaatgtgcttatggaaaggacccaataaatgaatattcctaacttagtaaagtagaataatttcatggtattcattaaaaagcataaaagtcttcctcttgccccagaagtaattctctataccaagatatgctaggagtaggatgatgattcaaagtggtaacccaaattcataaagcaataataataaaaacctatatagtatgttctctcctccaaagttttaactctaaaaattggttcctaggtttaattgtacctttaatttgcttattcagtacttagaatttgtttaactggtacttttattattttttagtgaaagacttttgaaaagtgccctttccccttaagagacagttggaataccagttgactaatattacaagctcttgtagggggaaaaaggagcttattaaagttgtttactaaactttaggaaaagatgtcttgcatcagtcttactaggcataaaagtcacacttaatgactggaaaaaacttgcttattgcctttccctatataaatattaattgtctagaatgaaagctaatataggaacaagactcccaaatccatgaaaacgcttagtgaatatattcttaatcattaataaattagcccattatattttcatctgtatttgccataaaaaatttatttgcatttatgcctttaggataattttgtatctttctaatctgttttatcattgctacaggtttttaaaaaagaacctttcactagctagcacatgccagaggttcacatctgttttgtttttcaaacaggtcgtagctgtatttattggccatgcaagtagaggaaatgcacagtacaaatgtttttctttagcacgtaagggacctatccttgtcttgaaagtttgttgctttaaaagcaagtatctctccataaatattatggccttccattttcttcatacattttttaggatccacttgtgcatgtagttgagaccactgtctcttaaaatatagcacttttcaattctctctaaagaaatacttatgtactactatcacatgttgtaaattttcatgtaatagtgttttctgtgagtaaactccattttgattggcagctaagactttttttcctgtggcttttatttatctaagaggtctttgcatatagatgaaatgtatatttgcctggcggactatttgcgttgtgtggccttagtttgtttattgacattaacgagtgttttaaaaaggtttttaatgaatagtcttaaatctaaatttgtgtgaataatccttttaacacagtgcttttttgtagctgtctaagtgtgttaaattgttaagctatttctttgtaaaataggacaatggaatgcatagtttttttttttcctgtaaagtatttttttaataaaaaaagtctgatttgtccttt

SEQ ID NO: 178059 - DNA, 2418 bp, Homo sapiens
  Payload ID: 14928
  Gene Symbol: RSBN1
  Gene Name: round spermatid basic protein 1
  ENST ID: ENST00000615321
  CDS Start-End: 22-2286
aaatgtgtgtttgtgggtgaaatggctgcgcaggtcggagcggtgcgcgtagtacgggcggtggcggcgcaggaggagccggacaaagaggggaaggagaaacctcatgctggggtctccccgcggggagttaaacggcagcgccgatctagcagtggggggtctcaggagaagcgggggcggccgagccaggagccccctctcgctccccctcaccggcggcgtcgcagccgccaacatcctgggccgctgccgccaacgaatgcagccccaactgtcccaggccctgttgagcctcttctcctgccgcctccgccgccaccttcgctggcacccgccgggcccgctgtcgctgcccctctcccggccccaagcacctcggccctcttcaccttctcgcctctgacggtgagcgcggccgggcccaagcataagggccacaaggagcggcacaagcaccatcaccaccgcggccccgatggtgatcccagctcctgcggaaccgatctcaagcacaaggacaagcaggaaaacggcgagaggactggaggggtgcctctgatcaaagcccccaagagagaaacaccagatgaaaatggtaaaacccagagagccgatgattttgtcttgaagaaaataaagaagaaaaagaaaaagaaacaccgagaagacatgcgaggaagacgccttaaaatgtacaataaggaagtacaaaccgtctgtgctggcctgacccgcatcagtaaagaaattctcacccaaggacaaataaatagcacttcaggacttaataaggagtccttcaggtatctgaaagatgaacagctgtgccgattaaatttgggtatgcaagaatatcgggtaccccagggagtacaaacaccttttatgactcaccaggaacattctattcgtagaaatttcttaaaaacaggtactaaatttagcaactttattcatgaggaacaccagtccaatggtggtgctcttgtccttcatgcttacatggatgaactctcatttttgtctccaatggagatggagagattttctgaggagtttcttgctttgacattcagtgaaaatgagaaaaatgctgcttactatgctttagcaatagtgcatggagcggctgcttatctcccagacttcttggactactttgcttttaatttccccaacactccagtgaaaatggaaattctgggcaagaaagatattgaaacaaccaccatttcaaattttcacactcaggtcaacaggacatactgctgtggcacctaccgagcaggtcctatgcggcagataagtctcgttggagcagtagatgaagaagttggtgattatttcccagagttccttgatatgttagaagaatcaccatttctgaaaatgactttgccctggggtacactttctagcctccgactccagtgtaggtcccagagtgatgatgggcctataatgtgggtaaggccaggagaacagatgatccctacagcagatatgccaaagtcacccttcaaaagacgacgatcaatgaatgaaataaaaaatctccagtacctacctcggaccagtgaaccccgcgaagttctctttgaagataggactagagctcatgctgatcatgtcggtcaggggtttgactggcagagtacggctgctgttggagttttgaaagctgtacaatttggtgaatggagtgaccaacctcgcataaccaaagatgtgatttgttttcatgctgaggattttactgatgttgtacaaagacttcagttagatcttcatgaacctccagtttcccagtgcgtacagtgggtagatgaagctaaactaaaccaaatgaggcgggaaggcattcgttatgctagaattcagctttgcgacaatgatatctacttcatccctagaaatgtcattcatcagttcaaaacagtttcggcggtgtgcagcttagcctggcatataaggcttaaacagtaccaccctgttgtggaagccactcaaaacacagaaagcaattctaacatggactgtggtttaactggaaagcgagaattagaagttgactcccaatgtgtgaggataaaaactgaatctgaagaagcatgcacagagattcagctgttaacaactgcttcatcatctttcccacctgcatcagaacttaatctacagcaagatcagaagactcagcctattccagttttaaaagtggaaagtagactggactctgaccagcaacacaatctgcaagaacattcaaccacttctgtgtgatatgtacatattcaaacacattttttaacttttttaaattttgatgtgaagttatagttttataactggcttaagttaagttttattggagaaatcttgcctataattctataaagagaaatgacattccac

SEQ ID NO: 178060 - DNA, 6422 bp, Homo sapiens
  Payload ID: 14929
  Gene Symbol: RSBN1L
  Gene Name: round spermatid basic protein 1-like
  Uniprot ID: Q6PCB5
  ENST ID: ENST00000334955
  CDS Start-End: 28-2568
ggagagtaaatacaacaggagcgcaaaatggcggaaccgccgagccccgtgcactgtgtcgctgccgcggcccccaccgccaccgtctcggagaaagaaccgtttggcaagctgcaactctcctcccgggaccctccgggttctctgtccgccaagaaggtccggactgaggagaagaaggcaccgcggagagtgaacggagaagggggcagcggcgggaacagcaggcagctgcagccgccggcagcaccttcgcctcagagctatggcagccccgcgtcttggagctttgcccctctgtctgctgctccctccccgtcctcttctcggagcagtttctctttctccgctggcacggccgttccctcctcagcctccgcttccttgtctcagccggtgccgcgcaaactgctggtccctcctacgctgctgcacgctcagcctcaccatctcctcctgcccgccgccgccgccgctgcctcggctaacgccaagtcgcgcagacctaaggagaagcgggagaaggagaggaggaggcacggtctcggtggggcccgagaggccggcggggcctcccgggaggagaacggggaggtgaagccgctgccccgagataaaatcaaagacaaaattaaagagagagacaaagaaaaagaaagagaaaaaaagaaacataaagtaatgaatgagatcaagaaagagaatggagaagtaaagattttgctgaaaagtgggaaggagaaaccaaaaacaaatatagaagacttacaaattaaaaaggtaaagaagaaaaagaaaaagaaacacaaagagaatgaaaaacggaagcgtccgaaaatgtatagcaaatctattcagaccatctgctcaggattgctaactgatgttgaagatcaagcagccaaaggcatcctaaatgataacataaaagattacgttgggaagaatttggataccaagaactatgattccaaaattccagagaacagtgagtttccatttgtctcattaaaggagccacgagttcagaataacctcaaaaggttggacactttggaatttaaacaactcattcatatagagcaccagcctaatggaggtgcatcggttatccatgcctacagtaacgaactctcccacctgtctcctatggagatggagaggtttgcagaagagtttgtgggtctagtgttcagtgaaaatgaaaactctgcagctttctacgtgatgggtattgttcatggggcagctacttatttacctgactttttagactatttttcatttaattttcccaattcaccagtgaaaatggagatattgggaaagaaagatatagagacaacgactatgtccaattttcatgctcaggtaaaaagaacgtattctcatggtacttacagagctggcccaatgagacaaataagcttggtgggagcagttgatgaagaagtaggagattatttccctgagttccttgacatgttggaagagtcaccatttttaaaatgtacactgccatgggggacgctatctagtctaaaattacagagtcgaaaagatagtgatgatggtcccatcatgtgggttcgtccaggagaacaaatgatccctgtggctgatatgccaaagtcacctttcaaaaggaaaagaactaccaatgaaataaaaaatcttcagtacctacctcgaacaagtgagccccgtgagatgctctttgaagacaggacaagagctcatgcagatcatataggacaaggttttgaacgacagactacagctgctgttggagtgctgaaggctgtgcactgtggagagtggcctgatcaaccccgtataaccaaagatgtaatttgttttcatgctgaagatttcttagaagtagttcaacgaatgcagttagatttacatgaacctccactgtcccagtgtgtccaatgggttgatgatgcaaaactgaatcaactgaggagggaaggcattcgctatgccaggattcagctatatgataatgacatttattttattccaaggaatgttgttcatcagttcaagacagtttcagctgtatgcagtttagcatggcatattcggctcaaattatatcactcagaggaggacacttctcagaatacagctactcatgaaacaggcacatcatcagattccacatcatctgttcttggacctcacactgacaacatgatttgtgctgtaagcaaagcctccttggattctgttttttcagataaacttcattctaaatatgaattacagcagattaaacatgaacctattgcatctgtaagaatcaaggaagaacctgtgaatgttaatattcctgaaaagactacagcactgaataatatggatggcaagaatgttaaagcaaaattggatcatgttcaatttgcagaatttaagattgacatggattctaaatttgaaaatagcaacaaagatttaaaggaagaattgtgccctggaaatctaagtctagttgatacaaggcaacacagttcagcacattcaaatcaagataaaaaagacgatgacattttgtgctaaatttgcatataccatctaaaatccttttttaaaaaaatttaatgtaataaagattcatgaattctgaaagcaagccaaggacttgctcctatgtctgttacaaaacatagtttatgtagctttgtaacattcctcagtgcctgtccataactgtgaagtattaagcacttagggccagatgcactgtaaacattgcaggtttaaacataaaggagtctttaaaaaaaaatcatttacgttggaattttaggttttagaatagagctgacattaacatatatatatatatataaatatatatatatattttgtaatatgagccagaattctttttcaacaatttaaagcttttccatagagcttatttatatccttttttttcattttaaatgtgtcagcactgtagtgtaaatagcttttaaatatctttttagtgtgatttatactgaaatgtgagccacttaataaaggttcatatgttcatattaataaatatgttttctgttgagtctgtaaagacaaactgacaattcatttaagtcatttgataatgattctctgctggtatatctatttagtgtggtattgtagtgcaaatgtacgtaattcaaatctagtaaatatttaagttcctcacactgtgcaggcttttttttttttttctttttttcttttttttgatacggagtttcattctgtcaccaggctggagttcagtggtgcgatctcggctcactgcaacctctgcctctcgggttcaagtgattattctcctgcctcagcctcctgagtagctgggactacaggcacgcaccacaacacccagctaatttttgtatttttagtagagatggggtttcatcatgttggccaggatggtcttgatctcttgaccttgtgatccgcccaccttggcctcccaaagtgctgggattgcaggggtgagccacagcgcccagcctatgcaggcatttttaacaaccaagactcagttaagaaagtgtgcatctgcgtgtgtgtgaatgtgtatatatatgtatatatatatcatattttgcataattttcttaaattgctgaataagatcaatatgtgaaattccttagcccttctccccaaaatacattgaaaaaagttttatattaaactattaagaaagcagtttaggtaatagaaacagttttagaaagttgggagaaacaaggtatgttaatgataacaaaggcttctaactaatagttacgtggccagattacatagcctaccatagattttttttattgtgtatgggatgataagaagtttagagaattttcttactagtaagtacctttactaagtaatagctaagtataaaatctttagttacagaaagcttgtgagcaattaaaatccttttacatttttcttgcagaatgggagaaaaatatggcaaatacaaaactgtaaaataagggcaatgacaatgactcaactgccatatagagatataattaacaaaatactttgtggtacctcttatctctcaggatctcctccctaccctagcaaggcaaacaacttggagtacttccttttcgaaagaagttctagaaattaaattgaggtaggagacggattgacagtgcctaactaaagatgagtaaaacagacctctttaatgatagactcactatttgacactgcttctactattgtaattaaaaatcagaagtctttgatgtatgcgttgctgtaagaaactctgctcattgcaaatctattttgtttgtttttggtattattctgggcacatactttggttgatgactttcaattggggttctttgtgctgccttttgggttactgttggtatttccatttctggcttaatttatggtaaccatcaaaactgcttatatttctggttagggcgaagccatttaggaagaagcatttcaccagaacaagtaaaagttaattgcagcaatgatgtcagttttggcccctagtttaataaaaggataggcaaatatcataggaaatcttcatggtttgtaggaaatcagtgtttgcaacgtaggaagtttcatgggatagggaaggtataaatcaagatagtaagggttttgttttatatgtcattgtcttaccatgctccccacctatttaatcttctgttttaagctaaatttatggatttgcacctacctttttgagtggcagaagttcttaacaaaccagtattgagaaataagaagggatgtagttaaaatggttttctgtttctctttaaagttgaagaatgatatatttaacaagagttgtgttttatttccagttttccagtagcatatatgtagatgcattgaggtcatactgtgagaaaatgtctttagggtatccctccaaaataggagccttaaactttttaacttaaaggaaggcatatctaaaaaccatagtggttgcttttaggtatagtttcctatataacctatagtcagacttatctataatatgaaaatttaattgttttaaaaatgcatacatcggccgggtgcagtggctcacgcctgtaatcccagcacttagggaggccgaggcgggcggatcacgaggtcagaagtttgagaccagtctggccaacatggtgaaaccccgtctctactaaaaatacaaaaaaattagttgggcgtggtggcgtgcgcctgtaatcccagctacttgggaggctgaggcaggggaattgcttgaacccgggaggagaaggttgcagtgagccgagatcgccccactgccctccagcctgggcgacagtctcaaaaaaaaaaaaaaaaaaaagcatacatctctgaaggtaaagtataaatcagtgggctcaagatttgcaggtacagccttgttaatgccttcaataatgcttacgttccttgtcttatgggttataattttcacatcctcttcagatacaatctgagaacttgttgactacctttgttacatgcaaaaattttctattttaatattgcattatattaatggtttcatagtacattccagttctttatctgaatacaagcgttttgcttttatttccagtttcttggaccagaacaataaaatacataagacatcgtttctatatggtcatatactatatagaataaagaattgttatgtaaattattaaatgagtatacagacctttacataaaaactaaggtacctcagtggaatctgctacagtgcttccccctccctacccctccattttgtttataaccttttagctatctaaataatacgtattccatactcaggatagctggttagctagcaaaagaattaacatttgtgatatttacttgcaaactttactgaagccatattcattatcttccttgtcaccaaggctgttgaccttaaataaacattaagttgattttgcacaacactgtatttgtgtgtgtgcatgtgcctgtttttgtgtgtgtatgtttgtgggaaataattatgtttgtttccgcatatattcatttttaatgcattctgtaacttttctcgagtggtggtcattgagggtagggaagattttattttttaagttgtcgttaaggtatttcattagtgttcctgagtgtaaaacagttttttcccaaatacttatggcagataagagcatttttgtaaataataaactagcaccgtttgggtaaatttgcattattttttggacaggttcattgtcatgtaaaacaaatatctcaaaattcattttacatttagcaaaggtgcaacatttgtttttggagtttgagagatattttccttgtcttccatcattcaataaatactaaaattgataaccaca

SEQ ID NO: 178061 - DNA, 2667 bp, Homo sapiens
  Payload ID: 14929
  Gene Symbol: RSBN1L
  Gene Name: round spermatid basic protein 1-like
  Uniprot ID: Q6PCB5
  ENST ID: ENST00000445288
  CDS Start-End: 423-2153
cgtgcgccggcctggaggggctgggaggcgtccggttttcagcagaggattttgcagttcccaaggggacaggaaatggagcctgtaatttcggttgcagagagggggatggccgacactcttattttctgtatcgtttcttcctcccagttagtgcgctgcaggatttgtgaaaatccatcttgaggactctcctagataaaatcaaagacaaaattaaagagagagacaaagaaaaagaaagagaaaaaaagaaacataaagtaatgaatgagatcaagaaagagaatggagaagtaaagattttgctgaaaagtgggaaggagaaaccaaaaacaaatatagaagacttacaaattaaaaaggtaaagaagaaaaagaaaaagaaacacaaagagaatgaaaaacggaagcgtccgaaaatgtatagcaaatctattcagaccatctgctcaggattgctaactgatgttgaagatcaagcagccaaaggcatcctaaatgataacataaaagattacgttgggaagaatttggataccaagaactatgattccaaaattccagagaacagtgagtttccatttgtctcattaaaggagccacgagttcagaataacctcaaaaggttggacactttggaatttaaacaactcattcatatagagcaccagcctaatggaggtgcatcggttatccatgcctacagtaacgaactctcccacctgtctcctatggagatggagaggtttgcagaagagtttgtgggtctagtgttcagtgaaaatgaaaactctgcagctttctacgtgatgggtattgttcatggggcagctacttatttacctgactttttagactatttttcatttaattttcccaattcaccagtgaaaatggagatattgggaaagaaagatatagagacaacgactatgtccaattttcatgctcaggtaaaaagaacgtattctcatggtacttacagagctggcccaatgagacaaataagcttggtgggagcagttgatgaagaagtaggagattatttccctgagttccttgacatgttggaagagtcaccatttttaaaatgtacactgccatgggggacgctatctagtctaaaattacagagtcgaaaagatagtgatgatggtcccatcatgtgggttcgtccaggagaacaaatgatccctgtggctgatatgccaaagtcacctttcaaaaggaaaagaactaccaatgaaataaaaaatcttcagtacctacctcgaacaagtgagccccgtgagatgctctttgaagacaggacaagagctcatgcagatcatataggacaaggttttgaacgacagactacagctgctgttggagtgctgaaggctgtgcactgtggagagtggcctgatcaaccccgtataaccaaagatgtaatttgttttcatgctgaagatttcttagaagtagttcaacgaatgcagttagatttacatgaacctccactgtcccagtgtgtccaatgggttgatgatgcaaaactgaatcaactgaggagggaaggcattcgctatgccaggattcagctatatgataatgacatttattttattccaaggaatgttgttcatcagttcaagacagtttcagctgtatgcagtttagcatggcatattcggctcaaattatatcactcagaggaggacacttctcagaatacagctactcatgaaacaggcacatcatcagattccacatcatctgttcttggacctcacactgacaacatgatttgtgctgtaagcaaagcctccttggattctgttttttcagataaacttcattctaaatatgaattacagcagattaaacatgaacctattgcatctgtaagaatcaaggaagaacctgtgaatgttaatattcctgaaaagactacagcactgaataatatggatggcaagaatgttaaagcaaaattggatcatgttcaatttgcagaatttaagattgacatggattctaaatttgaaaatagcaacaaagatttaaaggaagaattgtgccctggaaatctaagtctagttgatacaaggcaacacagttcagcacattcaaatcaagataaaaaagacgatgacattttgtgctaaatttgcatataccatctaaaatccttttttaaaaaaatttaatgtaataaagattcatgaattctgaaagcaagccaaggacttgctcctatgtctgttacaaaacatagtttatgtagctttgtaacattcctcagtgcctgtccataactgtgaagtattaagcacttagggccagatgcactgtaaacattgcaggtttaaacataaaggagtctttaaaaaaaaatcatttacgttggaattttaggttttagaatagagctgacattaacatatatatatatatataaatatatatatatattttgtaatatgagccagaattctttttcaacaatttaaagcttttccatagagcttatttatatccttttttttcattttaaatgtgtcagcactgtagtgtaaatagcttttaaatatctttttagtgtgatttatactgaaatgtgagccacttaataaaggttcatatgttcatattaataaatatgttttctgttgagtctgt

SEQ ID NO: 178062 - DNA, 605 bp, Homo sapiens
  Payload ID: 14929
  Gene Symbol: RSBN1L
  Gene Name: round spermatid basic protein 1-like
  ENST ID: ENST00000441514
  CDS Start-End: 1-534
tgtacactgccatgggggacgctatctagtctaaaattacagagtcgaaaagatagtgatgatggtcccatcatgtgggttcgtccaggagaacaaatgatccctgtggctgatatgccaaagtcacctttcaaaaggaaaagaactaccaatgaaataaaaaatcttcagtacctacctcgaacaagtgagccccgtgagatgctctttgaagacaggacaagagctcatgcagatcatataggacaaggttttgaacgacagactacagctgctgttggagtgctgaaggctgtgcactgtggagagtggcctgatcaaccccgtataaccaaagatgtaatttgttttcatgctgaagatttcttagaagtagttcaacgaatgcagttagatttacatgaacctccactgtcccaggaatgttgttcatcagttcaagacagtttcagctgtatgcagtttagcatggcatattcggctcaaattatatcactcagaggaggacacttctcagaatacagctactcatgaaacaggcacatcatcagattccacatcatctgttcttggacctcacactgacaacatgatttgtgctgtaa

SEQ ID NO: 178063 - DNA, 784 bp, Homo sapiens
  Payload ID: 14929
  Gene Symbol: RSBN1L
  Gene Name: round spermatid basic protein 1-like
  ENST ID: ENST00000445512
  CDS Start-End: 187-784
cagaattgaatcaacagcttctgctcccacccccctcaattctttggctctaataatgatcctgtttttgtattttcttcacattggtgctgatacaagctaaaaatatctgtatctccatatttatggtggatcactatgaaggtaaaaagaacgtattctcatggtacttacagagctggcccaatgagacaaataagcttggtgggagcagttgatgaagaagtaggagattatttccctgagttccttgacatgttggaagagtcaccatttttaaaatgtacactgccatgggggacgctatctagtctaaaattacagagtcgaaaagatagtgatgatggtcccatcatgtgggttcgtccaggagaacaaatgatccctgtggctgatatgccaaagtcacctttcaaaaggaaaagaactaccaatgaaataaaaaatcttcagtacctacctcgaacaagtgagccccgtgagatgctctttgaagacaggacaagagctcatgcagatcatataggacaaggttttgaacgacagactacagctgctgttggagtgctgaaggctgtgcactgtggagagtggcctgatcaaccccgtataaccaaagatgtaatttgttttcatgctgaagatttcttagaagtagttcaacgaatgcagttagatttacatgaacctccactgtcccagtgtgtccaatgggttgatgatgcaaaactgaatcaactgaggagggaaggcattcgctatgccaggattcagctatatgata

SEQ ID NO: 178064 - DNA, 3077 bp, Homo sapiens
  Payload ID: 14929
  Gene Symbol: RSBN1L
  Gene Name: round spermatid basic protein 1-like
  ENST ID: ENST00000614027
  CDS Start-End: 28-2559
ggagagtaaatacaacaggagcgcaaaatggcggaaccgccgagccccgtgcactgtgtcgctgccgcggcccccaccgccaccgtctcggagaaagaaccgtttggcaagctgcaactctcctcccgggaccctccgggttctctgtccgccaagaaggtccggactgaggagaagaaggcaccgcggagagtgaacggagaagggggcagcggcgggaacagcaggcagctgcagccgccggcagcaccttcgcctcagagctatggcagccccgcgtcttggagctttgcccctctgtctgctgctccctccccgtcctcttctcggagcagtttctctttctccgctggcacggccgttccctcctcagcctccgcttccttgtctcagccggtgccgcgcaaactgctggtccctcctacgctgctgcacgctcagcctcaccatctcctcctgcccgccgccgccgccgctgcctcggctaacgccaagtcgcgcagacctaaggagaagcgggagaaggagaggaggaggcacggtctcggtggggcccgagaggccggcggggcctcccgggaggagaacggggaggtgaagccgctgccccgagataaaatcaaagacaaaattaaagagagagacaaagaaaaagaaagagaaaaaaagaaacataaagtaatgaatgagatcaagaaagagaatggagaagtaaagattttgctgaaaagtgggaaggagaaaccaaaaacaaatatagaagacttacaaattaaaaaggtaaagaagaaaaagaaaaagaaacacaaagagaatgaaaaacggaagcgtccgaaaatgtatagcaaatctattcagaccatctgctcaggattgctaactgatgttgaagatcaagcagccaaaggcatcctaaatgataacataaaagattacgttgggaagaatttggataccaagaactatgattccaaaattccagagaacagtgagtttccatttgtctcattaaaggagccacgagttcagaataacctcaaaaggttggacactttggaatttaaacaactcattcatatagagcaccagcctaatggaggtgcatcggttatccatgcctacagtaacgaactctcccacctgtctcctatggagatggagaggtttgcagaagagtttgtgggtctagtgttcagtgaaaatgaaaactctgcagctttctacgtgatgggtattgttcatggggcagctacttatttacctgactttttagactatttttcatttaattttcccaattcaccagtgaaaatggagatagaaagaaagataacaacgactatgtccaattttcatgctcaggtaaaaagaacgtattctcatggtacttacagagctggcccaatgagacaaataagcttggtgggagcagttgatgaagaagtaggagattatttccctgagttccttgacatgttggaagagtcaccatttttaaaatgtacactgccatgggggacgctatctagtctaaaattacagagtcgaaaagatagtgatgatggtcccatcatgtgggttcgtccaggagaacaaatgatccctgtggctgatatgccaaagtcacctttcaaaaggaaaagaactaccaatgaaataaaaaatcttcagtacctacctcgaacaagtgagccccgtgagatgctctttgaagacaggacaagagctcatgcagatcatataggacaaggttttgaacgacagactacagctgctgttggagtgctgaaggctgtgcactgtggagagtggcctgatcaaccccgtataaccaaagatgtaatttgttttcatgctgaagatttcttagaagtagttcaacgaatgcagttagatttacatgaacctccactgtcccagtgtgtccaatgggttgatgatgcaaaactgaatcaactgaggagggaaggcattcgctatgccaggattcagctatatgataatgacatttattttattccaaggaatgttgttcatcagttcaagacagtttcagctgtatgcagtttagcatggcatattcggctcaaattatatcactcagaggaggacacttctcagaatacagctactcatgaaacaggcacatcatcagattccacatcatctgttcttggacctcacactgacaacatgatttgtgctgtaagcaaagcctccttggattctgttttttcagataaacttcattctaaatatgaattacagcagattaaacatgaacctattgcatctgtaagaatcaaggaagaacctgtgaatgttaatattcctgaaaagactacagcactgaataatatggatggcaagaatgttaaagcaaaattggatcatgttcaatttgcagaatttaagattgacatggattctaaatttgaaaatagcaacaaagatttaaaggaagaattgtgccctggaaatctaagtctagttgatacaaggcaacacagttcagcacattcaaatcaagataaaaaagacgatgacattttgtgctaaatttgcatataccatctaaaatccttttttaaaaaaatttaatgtaataaagattcatgaattctgaaagcaagccaaggacttgctcctatgtctgttacaaaacatagtttatgtagctttgtaacattcctcagtgcctgtccataactgtgaagtattaagcacttagggccagatgcactgtaaacattgcaggtttaaacataaaggagtctttaaaaaaaaatcatttacgttggaattttaggttttagaatagagctgacattaacatatatatatatatataaatatatatatatattttgtaatatgagccagaattctttttcaacaatttaaagcttttccatagagcttatttatatccttttttttcattttaaatgtgtcagcactgtagtgtaaatagcttttaaatatctttttagtgtgatttatactgaaatgtgagccacttaataaaggttcatatgttcatattaataaatatgttttctgttgagtctgtaaag

SEQ ID NO: 178065 - DNA, 7501 bp, Homo sapiens
  Payload ID: 14930
  Gene Symbol: ROBO1
  Gene Name: roundabout guidance receptor 1
  ENST ID: ENST00000436010
  CDS Start-End: 1239-5834
aattgagctggagaggaggcagcgtgagagcagaaacttcagacgccgctgatccgggaggagctggggtgagccgcggcggccgtctctcccacccgcagcagcatcctctctgcccttctctgccaccccggggagagccgggagctgcctctttacagcttccacgagccaggggtgcaggcagctgcccccaggaagtttgggcttctgcgtagtttaggggtgcctgcgagcgccccagagggcgaggggccgagggcgatgttgggcgccgcgcggggctgggggcgcccagaagacgtgcgagtgtccgcggtcctgctgctgtctccagtaccctccgcatcccccaagtgatgggaacaagggcccgcccaggcagccgctgtcgccgcaccgccccctcgctcgctctctgcgcgcggagtcacccagtcacactcccggcaccccgagcccttcctccggagctgctgcttctactttggctgctatcgccgccgccgcgggtggcccgctgctgactgggctcgccgggagacggagaagcactttttggccctccctcagcagctctcacaccccaactttgccgccgccgccgcgcctgccctcgcagcggcgctcggccgcacattgtgggggcgcacgccgggaggctccgcaagaccgtggaggcaggaaacggcactactgcgcttctgcctcggctctttgttgttcgctttggatggttcttgaaagtgtctgagcctcctcggaaatcctggggccggagaagacaaaccttggaattcttcctctgcaaaagtctctgagatactgacaagcgtccggaaaggtcgacgagtaattgccctgaaaactcttggctaattgacccacgttgcttatattaagcctttgtgtgtggtgtgtggcttcatacatttggggaccctatttccactccctcctcttggcatgagactgtatacaggatccacccgaggacaatgattgcggagcccgctcacttttacctgtttggattaatatgtctctgttcaggctcccgtcttcgtcaggaagattttccacctcgcattgttgaacacccttcagacctgattgtctcaaaaggagaacctgcaactttgaactgcaaagctgaaggccgccccacacccactattgaatggtacaaagggggagagagagtggagacagacaaagatgaccctcgctcacaccgaatgttgctgccgagtggatctttatttttcttacgtatagtacatggacggaaaagtagacctgatgaaggagtctatgtctgtgtagcaaggaattaccttggagaggctgtgagccacaatgcatcgctggaagtagccatacttcgggatgacttcagacaaaacccttcggatgtcatggttgcagtaggagagcctgcagtaatggaatgccaacctccacgaggccatcctgagcccaccatttcatggaagaaagatggctctccactggatgataaagatgaaagaataactatacgaggaggaaagctcatgatcacttacacccgtaaaagtgacgctggcaaatatgtttgtgttggtaccaatatggttggggaacgtgagagtgaagtagccgagctgactgtcttagagagaccatcatttgtgaagagacccagtaacttggcagtaactgtggatgacagtgcagaatttaaatgtgaggcccgaggtgaccctgtacctacagtacgatggaggaaagatgatggagagctgcccaaatccagatatgaaatccgagatgatcataccttgaaaattaggaaggtgacagctggtgacatgggttcatacacttgtgttgcagaaaatatggtgggcaaagctgaagcatctgctactctgactgttcaagaacctccacattttgttgtgaaaccccgtgaccaggttgttgctttgggacggactgtaacttttcagtgtgaagcaaccggaaatcctcaaccagctattttctggaggagagaagggagtcagaatctacttttctcatatcaaccaccacagtcatccagccgattttcagtctcccagactggcgacctcacaattactaatgtccagcgatctgatgttggttattacatctgccagactttaaatgttgctggaagcatcatcacaaaggcatatttggaagttacagatgtgattgcagatcggcctcccccagttattcgacaaggtcctgtgaatcagactgtagccgtggatggcactttcgtcctcagctgtgtggccacaggcagtccagtgcccaccattctgtggagaaaggatggagtcctcgtttcaacccaagactctcgaatcaaacagttggagaatggagtactgcagatccgatatgctaagctgggtgatactggtcggtacacctgcattgcatcaacccccagtggtgaagcaacatggagtgcttacattgaagttcaagaatttggagttccagttcagcctccaagacctactgacccaaatttaatccctagtgccccatcaaaacctgaagtgacagatgtcagcagaaatacagtcacattatcgtggcaaccaaatttgaattcaggagcaactccaacatcttatattatagaagccttcagccatgcatctggtagcagctggcagaccgtagcagagaatgtgaaaacagaaacatctgccattaaaggactcaaacctaatgcaatttaccttttccttgtgagggcagctaatgcatatggaattagtgatccaagccaaatatcagatccagtgaaaacacaagatgtcctaccaacaagtcagggggtggaccacaagcaggtccagagagagctgggaaatgctgttctgcacctccacaaccccaccgtcctttcttcctcttccatcgaagtgcactggacagtagatcaacagtctcagtatatacaaggatataaaattctctatcggccatctggagccaaccacggagaatcagactggttagtttttgaagtgaggacgccagccaaaaacagtgtggtaatccctgatctcagaaagggagtcaactatgaaattaaggctcgccctttttttaatgaatttcaaggagcagatagtgaaatcaagtttgccaaaaccctggaagaaggcaatgccccaccccaaggtgtaactgtatccaagaatgatggaaacggaactgcaattctagttagttggcagccacctccagaagacactcaaaatggaatggtccaagagtataaggtttggtgtctgggcaatgaaactcgataccacatcaacaaaacagtggatggttccaccttttccgtggtcattccctttcttgttcctggaatccgatacagtgtggaagtggcagccagcactggggctgggtctggggtaaagagtgagcctcagttcatccagctggatgcccatggaaaccctgtgtcacctgaggaccaagtcagcctcgctcagcagatttcagatgtggtgaagcagccggccttcatagcaggtattggagcagcctgttggatcatcctcatggtcttcagcatctggctttatcgacaccgcaagaagagaaacggacttactagtacctacgcgggtatcagaaaagtcccgtcttttaccttcacaccaacagtaacttaccagagaggaggcgaagctgtcagcagtggagggaggcctggacttctcaacatcagtgaacctgccgcgcagccatggctggcagacacgtggcctaatactggcaacaaccacaatgactgctccatcagctgctgcacggcaggcaatggaaacagcgacagcaacctcactacctacagtcgcccagctgattgtatagcaaattataacaaccaactggataacaaacaaacaaatctgatgctccctgagtcaactgtttatggtgatgtggaccttagtaacaaaatcaatgagatgaaaaccttcaatagcccaaatctgaaggatgggcgttttgtcaatccatcagggcagcctactccttacgccaccactcagctcatccagtcaaacctcagcaacaacatgaacaatggcagcggggactctggcgagaagcactggaaaccactgggacagcagaaacaagaagtggcaccagttcagtacaacatcgtggagcaaaacaagctgaacaaagattatcgagcaaatgacacagttcctccaactatcccatacaaccaatcatacgaccagaacacaggaggatcctacaacagctcagaccggggcagtagtacatctggtaatcaggggcacaagaaaggggcaagaacacccaaggtaccaaaacagggtggcatgaactgggcagacctgcttcctcctcccccagcacatcctcctccacacagcaatagcgaagagtacaacatttctgtagatgaaagctatgaccaagaaatgccatgtcccgtgccaccagcaaggatgtatttgcaacaagatgaattagaagaggaggaagatgaacgaggccccactccccctgttcggggagcagcttcttctccagctgccgtgtcctatagccatcagtccactgccactctgactccctccccacaggaagaactccagcccatgttacaggattgtccagaggagactggccacatgcagcaccagcccgacaggagacggcagcctgtgagtcctcctccaccaccacggccgatctcccctccacatacctatggctacatttcaggacccctggtctcagatatggatacggatgcgccagaagaggaagaagacgaagccgacatggaggtagccaagatgcaaaccagaaggcttttgttacgtgggcttgagcagacacctgcctccagtgttggggacctggagagctctgtcacggggtccatgatcaacggctggggctcagcctcagaggaggacaacatttccagcggacgctccagtgttagttcttcggacggctcctttttcactgatgctgactttgcccaggcagtcgcagcagcggcagagtatgctggtctgaaagtagcacgacggcaaatgcaggatgctgctggccgtcgacattttcatgcgtctcagtgccctaggcccacaagtcccgtgtctacagacagcaacatgagtgccgccgtaatgcagaaaaccagaccagccaagaaactgaaacaccagccaggacatctgcgcagagaaacctacacagatgatcttccaccacctcctgtgccgccacctgctataaagtcacctactgcccaatccaagacacagctggaagtacgacctgtagtggtgccaaaactcccttctatggatgcaagaacagacagatcatcagacagaaaaggaagcagttacaaggggagagaagtgttggatggaagacaggttgttgacatgcgaacaaatccaggtgatcccagagaagcacaggaacagcaaaatgacgggaaaggacgtggaaacaaggcagcaaaacgagaccttccaccagcaaagactcatctcatccaagaggatattctaccttattgtagacctacttttccaacatcaaataatcccagagatcccagttcctcaagctcaatgtcatcaagaggatcaggaagcagacaaagagaacaagcaaatgtaggtcgaagaaatattgcagaaatgcaggtacttggaggatatgaaagaggagaagataataatgaagaattagaggaaactgaaagctgaagacaaccaagaggcttatgagatctaatgtgaaaatcatcactcaagatgcctcctgtcagatgacacatgacgccagataaaatgttcagtgcaatcagagtgtacaaattgtcgtttttattcctcttattgggatatcattttaaaaactttattgggtttttattgttgttgtttgatccctaaccctacaaagagccttcctattcccctcgctgttggagcaaaccattataccttacttccagcaagcaaagtgctttgacttcttgcttcagtcatcagccagcaagagggaacaaaactgttcttttgcattttgccgctgagatatggcattgcactgcttatatgccaagctaatttatagcaagatattgatcaaatatagaaagttgatattcaacctcacaagggctctcaaagtataatctttctatagccaactgctaatgcaaattaaaacatatttcattttaacatgatttcaaaatcagtttttcatactaccctttgctggaagaaactaaaaatatagcaaatgcagaaccacaaacaattcgaatggggtagaaacattgtaaatatttactctttgcaaaccctggtggtattttattttggcttcatttcaatcattgaagtatattcttattggaaatgtacttttggataagtagggctaagccagttggatctctggttgtctagtcattgtcataagtaaacctagtaaaaccttgttctatttttcaatcatcaaaaagtaattataaatacgtattacaaacaagtggatgtttttaatgaccaattgagtaagaacatccctgtcttaactggcctaaatttcttctggtagtgtcagttcaactttcagaagtgccacttaaggaagtttgatttttgtttttgtaatgcactgtttttaatctctctctctttttttttttttttttggttttaaaagcacaatcactaaactttatttgtaaaccattgtaactattaaccttttttgtcttattgaaaaaaaaaatgttgagaagcgtttttaacctgttttgttaatgctctatgtttgtatttggaatatttgaataatgacagatggtgaagtaacatgcatactttattgtgggccatgaaccaaatggttcttacttttcctggacttaaagaaaaaaagaggtttaagtttgttgtggccaatgtcgaaacctacaagatttccttaaaatctctaatagaggcattacttgctttcaattgacaaatgatgccctctgactagtagatttctatgatccttttttgtcattttatgaatatcattgattttataattggtgctatttgaagaaaaaaatgtacatttattcatagatagataagtatcaggtctgaccccagtggaaaacaaagccaaacaaaactgaaccacaaaaaaaaaggctggtgttcaccaaaaccaaacttgttcatttagataatttgaaaaagttccatagaaaaggcgtgcagtactaagggaacaatccatgtgattaatgttttcattatgttcatgtaagaagccccttatttttagccataattttgcatactgaaaatccaataatcagaaaagtaattttgtcacattatttattaaaaatgttctc

SEQ ID NO: 178066 - DNA, 4841 bp, Homo sapiens
  Payload ID: 14930
  Gene Symbol: ROBO1
  Gene Name: roundabout guidance receptor 1
  Uniprot ID: Q9Y6N7
  ENST ID: ENST00000467549
  CDS Start-End: 84-4739
gtgtgtggcttcatacatttggggaccctatttccactccctcctcttggcatgagactgtatacaggatccacccgaggacaatgattgcggagcccgctcacttttacctgtttggattaatatgtctctgttcaggctcccgtcttcgtcaggaagattttccacctcgcattgttgaacacccttcagacctgattgtctcaaaaggagaacctgcaactttgaactgcaaagctgaaggccgccccacacccactattgaatggtacaaagggggagagagagtggagacagacaaagatgaccctcgctcacaccgaatgttgctgccgagtggatctttatttttcttacgtatagtacatggacggaaaagtagacctgatgaaggagtctatgtctgtgtagcaaggaattaccttggagaggctgtgagccacaatgcatcgctggaagtagccatacttcgggatgacttcagacaaaacccttcggatgtcatggttgcagtaggagagcctgcagtaatggaatgccaacctccacgaggccatcctgagcccaccatttcatggaagaaagatggctctccactggatgataaagatgaaagaataactatacgaggaggaaagctcatgatcacttacacccgtaaaagtgacgctggcaaatatgtttgtgttggtaccaatatggttggggaacgtgagagtgaagtagccgagctgactgtcttagagagaccatcatttgtgaagagacccagtaacttggcagtaactgtggatgacagtgcagaatttaaatgtgaggcccgaggtgaccctgtacctacagtacgatggaggaaagatgatggagagctgcccaaatccagatatgaaatccgagatgatcataccttgaaaattaggaaggtgacagctggtgacatgggttcatacacttgtgttgcagaaaatatggtgggcaaagctgaagcatctgctactctgactgttcaagttgggtctgaacctccacattttgttgtgaaaccccgtgaccaggttgttgctttgggacggactgtaacttttcagtgtgaagcaaccggaaatcctcaaccagctattttctggaggagagaagggagtcagaatctacttttctcatatcaaccaccacagtcatccagccgattttcagtctcccagactggcgacctcacaattactaatgtccagcgatctgatgttggttattacatctgccagactttaaatgttgctggaagcatcatcacaaaggcatatttggaagttacagatgtgattgcagatcggcctcccccagttattcgacaaggtcctgtgaatcagactgtagccgtggatggcactttcgtcctcagctgtgtggccacaggcagtccagtgcccaccattctgtggagaaaggatggagtcctcgtttcaacccaagactctcgaatcaaacagttggagaatggagtactgcagatccgatatgctaagctgggtgatactggtcggtacacctgcattgcatcaacccccagtggtgaagcaacatggagtgcttacattgaagttcaagaatttggagttccagttcagcctccaagacctactgacccaaatttaatccctagtgccccatcaaaacctgaagtgacagatgtcagcagaaatacagtcacattatcgtggcaaccaaatttgaattcaggagcaactccaacatcttatattatagaagccttcagccatgcatctggtagcagctggcagaccgtagcagagaatgtgaaaacagaaacatctgccattaaaggactcaaacctaatgcaatttaccttttccttgtgagggcagctaatgcatatggaattagtgatccaagccaaatatcagatccagtgaaaacacaagatgtcctaccaacaagtcagggggtggaccacaagcaggtccagagagagctgggaaatgctgttctgcacctccacaaccccaccgtcctttcttcctcttccatcgaagtgcactggacagtagatcaacagtctcagtatatacaaggatataaaattctctatcggccatctggagccaaccacggagaatcagactggttagtttttgaagtgaggacgccagccaaaaacagtgtggtaatccctgatctcagaaagggagtcaactatgaaattaaggctcgccctttttttaatgaatttcaaggagcagatagtgaaatcaagtttgccaaaaccctggaagaagcacccagtgccccaccccaaggtgtaactgtatccaagaatgatggaaacggaactgcaattctagttagttggcagccacctccagaagacactcaaaatggaatggtccaagagtataaggtttggtgtctgggcaatgaaactcgataccacatcaacaaaacagtggatggttccaccttttccgtggtcattccctttcttgttcctggaatccgatacagtgtggaagtggcagccagcactggggctgggtctggggtaaagagtgagcctcagttcatccagctggatgcccatggaaaccctgtgtcacctgaggaccaagtcagcctcgctcagcagatttcagatgtggtgaagcagccggccttcatagcaggtattggagcagcctgttggatcatcctcatggtcttcagcatctggctttatcgacaccgcaagaagagaaacggacttactagtacctacgcgggtatcagaaaagtaacttaccagagaggaggcgaagctgtcagcagtggagggaggcctggacttctcaacatcagtgaacctgccgcgcagccatggctggcagacacgtggcctaatactggcaacaaccacaatgactgctccatcagctgctgcacggcaggcaatggaaacagcgacagcaacctcactacctacagtcgcccagggcagcctactccttacgccaccactcagctcatccagtcaaacctcagcaacaacatgaacaatggcagcggggactctggcgagaagcactggaaaccactgggacagcagaaacaagaagtggcaccagttcagtacaacatcgtggagcaaaacaagctgaacaaagattatcgagcaaatgacacagttcctccaactatcccatacaaccaatcatacgaccagaacacaggaggatcctacaacagctcagaccggggcagtagtacatctgggagtcaggggcacaagaaaggggcaagaacacccaaggtaccaaaacagggtggcatgaactgggcagacctgcttcctcctcccccagcacatcctcctccacacagcaatagcgaagagtacaacatttctgtagatgaaagctatgaccaagaaatgccatgtcccgtgccaccagcaaggatgtatttgcaacaagatgaattagaagaggaggaagatgaacgaggccccactccccctgttcggggagcagcttcttctccagctgccgtgtcctatagccatcagtccactgccactctgactccctccccacaggaagaactccagcccatgttacaggattgtccagaggagactggccacatgcagcaccagcccgacaggagacggcagcctgtgagtcctcctccaccaccacggccgatctcccctccacatacctatggctacatttcaggacccctggtctcagatatggatacggatgcgccagaagaggaagaagacgaagccgacatggaggtagccaagatgcaaaccagaaggcttttgttacgtgggcttgagcagacacctgcctccagtgttggggacctggagagctctgtcacggggtccatgatcaacggctggggctcagcctcagaggaggacaacatttccagcggacgctccagtgttagttcttcggacggctcctttttcactgatgctgactttgcccaggcagtcgcagcagcggcagagtatgctggtctgaaagtagcacgacggcaaatgcaggatgctgctggccgtcgacattttcatgcgtctcagtgccctaggcccacaagtcccgtgtctacagacagcaacatgagtgccgccgtaatgcagaaaaccagaccagccaagaaactgaaacaccagccaggacatctgcgcagagaaacctacacagatgatcttccaccacctcctgtgccgccacctgctataaagtcacctactgcccaatccaagacacagctggaagtacgacctgtagtggtgccaaaactcccttctatggatgcaagaacagacagatcatcagacagaaaaggaagcagttacaaggggagagaagtgttggatggaagacaggttgttgacatgcgaacaaatccaggtgatcccagagaagcacaggaacagcaaaatgacgggaaaggacgtggaaacaaggcagcaaaacgagaccttccaccagcaaagactcatctcatccaagaggatattctaccttattgtagacctacttttccaacatcaaataatcccagagatcccagttcctcaagctcaatgtcatcaagaggatcaggaagcagacaaagagaacaagcaaatgtaggtcgaagaaatattgcagaaatgcaggtacttggaggatatgaaagaggagaagataataatgaagaattagaggaaactgaaagctgaagacaaccaagaggcttatgagatctaatgtgaaaatcatcactcaagatgcctcctgtcagatgacacatgacgccagataaaatgttcagtgcaatcaga

SEQ ID NO: 178067 - DNA, 577 bp, Homo sapiens
  Payload ID: 14930
  Gene Symbol: ROBO1
  Gene Name: roundabout guidance receptor 1
  ENST ID: ENST00000495961
  CDS Start-End: 1-577
gtggatggcactttcgtcctcagctgtgtggccacaggcagtccagtgcccaccattctgtggagaaaggatggagtcctcgtttcaacccaagactctcgaatcaaacagttggagaatggagtactgcagatccgatatgctaagctgggtgatactggtcggtacacctgcattgcatcaacccccagtggtgaagcaacatggagtgcttacattgaagttcaaggtaaagtaaatgaatttggagttccagttcagcctccaagacctactgacccaaatttaatccctagtgccccatcaaaacctgaagtgacagatgtcagcagaaatacagtcacattatcgtggcaaccaaatttgaattcaggagcaactccaacatcttatattatagaagccttcagccatgcatctggtagcagctggcagaccgtagcagagaatgtgaaaacagaaacatctgccattaaaggactcaaacctaatgcaatttaccttttccttgtgagggcagctaatgcatatggaattagtgatccaagccaaatatcagatccagtgaaaacacaag

SEQ ID NO: 178068 - DNA, 569 bp, Homo sapiens
  Payload ID: 14930
  Gene Symbol: ROBO1
  Gene Name: roundabout guidance receptor 1
  ENST ID: ENST00000472273
  CDS Start-End: 1-569
tatttcagaactctgatttattgtttatactgcttgtaagcagatttggtatgtcagaccataataaagaacctggaatgcaactagacgacagattattactgactacattccagtggcaagcttatcatttggattttcacctttgcctaaattatcgagcaaatgacacagttcctccaactatcccatacaaccaatcatacgaccagaacacaggaggatcctacaacagctcagaccggggcagtagtacatctgggagtcaggggcacaagaaaggggcaagaacacccaaggtaccaaaacagggtggcatgaactgggcagacctgcttcctcctcccccagcacatcctcctccacacagcaatagcgaagagtacaacatttctgtagatgaaagctatgaccaagaaatgccatgtcccgtgccaccagcaaggatgtatttgcaacaagatgaattagaagaggaggaagatgaacgaggccccactccccctgttcggggagcagcttcttctccagctgccgtgtcctatagccatcagtccactgccactctg

SEQ ID NO: 178069 - DNA, 444 bp, Homo sapiens
  Payload ID: 14930
  Gene Symbol: ROBO1
  Gene Name: roundabout guidance receptor 1
  ENST ID: ENST00000492990
  CDS Start-End: 32-157
tggctggttgtaatgcaaggaagggacaaagatgaaatggaaacatgttccttttttggtcatgatatcactcctcagcttatccccaaatcacctgtttctggcccagcttattccagggctcaagcctactaaagaaccaagaaaaattctgtaatacaataaaattcgtctccaccctttttaatggtttaaaggatcaattcttctccaagcccatcactgaccttcctgctgaacttcaactggatgcaaaacaaacccacaaattctattttagagaattatggaagtcaaatgacgtatgtattcaggtcacagaaaatgtatgatgcatggtgccatttaaaaaaatatttgctctgtgaagatctgctttctgcattatggaagaaaagcaattcatatttttcaacggcttgcattaaaatcctacactgtgta

SEQ ID NO: 178070 - DNA, 6742 bp, Homo sapiens
  Payload ID: 14930
  Gene Symbol: ROBO1
  Gene Name: roundabout guidance receptor 1
  Uniprot ID: Q9Y6N7
  ENST ID: ENST00000464233
  CDS Start-End: 115-5070
aaagttgcagggctgcgtctgcactacggagcctctagattgctgaaaacagtcttatggaaggataacacattgtctgtcactggctggttgtaatgcaaggaagggacaaagatgaaatggaaacatgttccttttttggtcatgatatcactcctcagcttatccccaaatcacctgtttctggcccagcttattccagaccctgaagatgtagagagggggaacgaccacgggacgccaatccccacctctgataacgatgacaattcgctgggctatacaggctcccgtcttcgtcaggaagattttccacctcgcattgttgaacacccttcagacctgattgtctcaaaaggagaacctgcaactttgaactgcaaagctgaaggccgccccacacccactattgaatggtacaaagggggagagagagtggagacagacaaagatgaccctcgctcacaccgaatgttgctgccgagtggatctttatttttcttacgtatagtacatggacggaaaagtagacctgatgaaggagtctatgtctgtgtagcaaggaattaccttggagaggctgtgagccacaatgcatcgctggaagtagccatacttcgggatgacttcagacaaaacccttcggatgtcatggttgcagtaggagagcctgcagtaatggaatgccaacctccacgaggccatcctgagcccaccatttcatggaagaaagatggctctccactggatgataaagatgaaagaataactatacgaggaggaaagctcatgatcacttacacccgtaaaagtgacgctggcaaatatgtttgtgttggtaccaatatggttggggaacgtgagagtgaagtagccgagctgactgtcttagagagaccatcatttgtgaagagacccagtaacttggcagtaactgtggatgacagtgcagaatttaaatgtgaggcccgaggtgaccctgtacctacagtacgatggaggaaagatgatggagagctgcccaaatccagatatgaaatccgagatgatcataccttgaaaattaggaaggtgacagctggtgacatgggttcatacacttgtgttgcagaaaatatggtgggcaaagctgaagcatctgctactctgactgttcaagaacctccacattttgttgtgaaaccccgtgaccaggttgttgctttgggacggactgtaacttttcagtgtgaagcaaccggaaatcctcaaccagctattttctggaggagagaagggagtcagaatctacttttctcatatcaaccaccacagtcatccagccgattttcagtctcccagactggcgacctcacaattactaatgtccagcgatctgatgttggttattacatctgccagactttaaatgttgctggaagcatcatcacaaaggcatatttggaagttacagatgtgattgcagatcggcctcccccagttattcgacaaggtcctgtgaatcagactgtagccgtggatggcactttcgtcctcagctgtgtggccacaggcagtccagtgcccaccattctgtggagaaaggatggagtcctcgtttcaacccaagactctcgaatcaaacagttggagaatggagtactgcagatccgatatgctaagctgggtgatactggtcggtacacctgcattgcatcaacccccagtggtgaagcaacatggagtgcttacattgaagttcaagaatttggagttccagttcagcctccaagacctactgacccaaatttaatccctagtgccccatcaaaacctgaagtgacagatgtcagcagaaatacagtcacattatcgtggcaaccaaatttgaattcaggagcaactccaacatcttatattatagaagccttcagccatgcatctggtagcagctggcagaccgtagcagagaatgtgaaaacagaaacatctgccattaaaggactcaaacctaatgcaatttaccttttccttgtgagggcagctaatgcatatggaattagtgatccaagccaaatatcagatccagtgaaaacacaagatgtcctaccaacaagtcagggggtggaccacaagcaggtccagagagagctgggaaatgctgttctgcacctccacaaccccaccgtcctttcttcctcttccatcgaagtgcactggacagtagatcaacagtctcagtatatacaaggatataaaattctctatcggccatctggagccaaccacggagaatcagactggttagtttttgaagtgaggacgccagccaaaaacagtgtggtaatccctgatctcagaaagggagtcaactatgaaattaaggctcgccctttttttaatgaatttcaaggagcagatagtgaaatcaagtttgccaaaaccctggaagaagcacccagtgccccaccccaaggtgtaactgtatccaagaatgatggaaacggaactgcaattctagttagttggcagccacctccagaagacactcaaaatggaatggtccaagagtataaggtttggtgtctgggcaatgaaactcgataccacatcaacaaaacagtggatggttccaccttttccgtggtcattccctttcttgttcctggaatccgatacagtgtggaagtggcagccagcactggggctgggtctggggtaaagagtgagcctcagttcatccagctggatgcccatggaaaccctgtgtcacctgaggaccaagtcagcctcgctcagcagatttcagatgtggtgaagcagccggccttcatagcaggtattggagcagcctgttggatcatcctcatggtcttcagcatctggctttatcgacaccgcaagaagagaaacggacttactagtacctacgcgggtatcagaaaagtcccgtcttttaccttcacaccaacagtaacttaccagagaggaggcgaagctgtcagcagtggagggaggcctggacttctcaacatcagtgaacctgccgcgcagccatggctggcagacacgtggcctaatactggcaacaaccacaatgactgctccatcagctgctgcacggcaggcaatggaaacagcgacagcaacctcactacctacagtcgcccagctgattgtatagcaaattataacaaccaactggataacaaacaaacaaatctgatgctccctgagtcaactgtttatggtgatgtggaccttagtaacaaaatcaatgagatgaaaaccttcaatagcccaaatctgaaggatgggcgttttgtcaatccatcagggcagcctactccttacgccaccactcagctcatccagtcaaacctcagcaacaacatgaacaatggcagcggggactctggcgagaagcactggaaaccactgggacagcagaaacaagaagtggcaccagttcagtacaacatcgtggagcaaaacaagctgaacaaagattatcgagcaaatgacacagttcctccaactatcccatacaaccaatcatacgaccagaacacaggaggatcctacaacagctcagaccggggcagtagtacatctgggagtcaggggcacaagaaaggggcaagaacacccaaggtaccaaaacagggtggcatgaactgggcagacctgcttcctcctcccccagcacatcctcctccacacagcaatagcgaagagtacaacatttctgtagatgaaagctatgaccaagaaatgccatgtcccgtgccaccagcaaggatgtatttgcaacaagatgaattagaagaggaggaagatgaacgaggccccactccccctgttcggggagcagcttcttctccagctgccgtgtcctatagccatcagtccactgccactctgactccctccccacaggaagaactccagcccatgttacaggattgtccagaggagactggccacatgcagcaccagcccgacaggagacggcagcctgtgagtcctcctccaccaccacggccgatctcccctccacatacctatggctacatttcaggacccctggtctcagatatggatacggatgcgccagaagaggaagaagacgaagccgacatggaggtagccaagatgcaaaccagaaggcttttgttacgtgggcttgagcagacacctgcctccagtgttggggacctggagagctctgtcacggggtccatgatcaacggctggggctcagcctcagaggaggacaacatttccagcggacgctccagtgttagttcttcggacggctcctttttcactgatgctgactttgcccaggcagtcgcagcagcggcagagtatgctggtctgaaagtagcacgacggcaaatgcaggatgctgctggccgtcgacattttcatgcgtctcagtgccctaggcccacaagtcccgtgtctacagacagcaacatgagtgccgccgtaatgcagaaaaccagaccagccaagaaactgaaacaccagccaggacatctgcgcagagaaacctacacagatgatcttccaccacctcctgtgccgccacctgctataaagtcacctactgcccaatccaagacacagctggaagtacgacctgtagtggtgccaaaactcccttctatggatgcaagaacagacagatcatcagacagaaaaggaagcagttacaaggggagagaagtgttggatggaagacaggttgttgacatgcgaacaaatccaggtgatcccagagaagcacaggaacagcaaaatgacgggaaaggacgtggaaacaaggcagcaaaacgagaccttccaccagcaaagactcatctcatccaagaggatattctaccttattgtagacctacttttccaacatcaaataatcccagagatcccagttcctcaagctcaatgtcatcaagaggatcaggaagcagacaaagagaacaagcaaatgtaggtcgaagaaatattgcagaaatgcaggtacttggaggatatgaaagaggagaagataataatgaagaattagaggaaactgaaagctgaagacaaccaagaggcttatgagatctaatgtgaaaatcatcactcaagatgcctcctgtcagatgacacatgacgccagataaaatgttcagtgcaatcagagtgtacaaattgtcgtttttattcctcttattgggatatcattttaaaaactttattgggtttttattgttgttgtttgatccctaaccctacaaagagccttcctattcccctcgctgttggagcaaaccattataccttacttccagcaagcaaagtgctttgacttcttgcttcagtcatcagccagcaagagggaacaaaactgttcttttgcattttgccgctgagatatggcattgcactgcttatatgccaagctaatttatagcaagatattgatcaaatatagaaagttgatattcaacctcacaagggctctcaaagtataatctttctatagccaactgctaatgcaaattaaaacatatttcattttaacatgatttcaaaatcagtttttcatactaccctttgctggaagaaactaaaaatatagcaaatgcagaaccacaaacaattcgaatggggtagaaacattgtaaatatttactctttgcaaaccctggtggtattttattttggcttcatttcaatcattgaagtatattcttattggaaatgtacttttggataagtagggctaagccagttggatctctggttgtctagtcattgtcataagtaaacctagtaaaaccttgttctatttttcaatcatcaaaaagtaattataaatacgtattacaaacaagtggatgtttttaatgaccaattgagtaagaacatccctgtcttaactggcctaaatttcttctggtagtgtcagttcaactttcagaagtgccacttaaggaagtttgatttttgtttttgtaatgcactgtttttaatctctctctctttttttttttttttttggttttaaaagcacaatcactaaactttatttgtaaaccattgtaactattaaccttttttgtcttattgaaaaaaaaaatgttgagaagcgtttttaacctgttttgttaatgctctatgtttgtatttggaatatttgaataatgacagatggtgaagtaacatgcatactttattgtgggccatgaaccaaatggttcttacttttcctggacttaaagaaaaaaagaggtttaagtttgttgtggccaatgtcgaaacctacaagatttccttaaaatctctaatagaggcattacttgctttcaattgacaaatgatgccctctgactagtagatttctatgatccttttttgtcattttatgaatatcattgattttataattggtgctatttgaagaaaaaaatgtacatttattcatagatagataagtatcaggtctgaccccagtggaaaacaaagccaaacaaaactgaaccacaaaaaaaaaggctggtgttcaccaaaaccaaacttgttcatttagataatttgaaaaagttccatagaaaaggcgtgcagtactaagggaacaatccatgtgattaatgttttcattatgttcatgtaagaagccccttatttttagccataattttgcatactgaaaatccaataatcagaaaagtaattttgtcacattatttattaaaaatgttctcaaata

SEQ ID NO: 178071 - DNA, 5600 bp, Homo sapiens
  Payload ID: 14930
  Gene Symbol: ROBO1
  Gene Name: roundabout guidance receptor 1
  Uniprot ID: Q9Y6N7
  ENST ID: ENST00000495273
  CDS Start-End: 555-5375
tcccggcaccccgagcccttcctccggagctgctgcttctactttggctgctatcgccgccgccgcgggtggcccgctgctgactgggctcgccgggagacggagaagcactttttggccctccctcagcagctctcacaccccaactttgccgccgccgccgcgcctgccctcgcagcggcgctcggccgcacattgtgggggcgcacgccgggaggctccgcaagaccgtggaggcaggaaacggcactactgcgcttctgcctcggctctttgttgttcgctttggatggttcttgaaagtgtctgagcctcctcggaaatcctggggccggagaagacaaaccttggaattcttcctctgcaaaagtctctgagatactgacaagcgtccggaaaggtcgacgagtaattgccctgaaaactcttggctaattgacccacgttgcttatattaagcctttgtgtgtggtgtgtggcttcatacatttggggaccctatttccactccctcctcttggcatgagactgtatacaggatccacccgaggacaatgattgcggagcccgctcacttttacctgtttggattaatatgtctctgttcaggctcccgtcttcgtcaggaagattttccacctcgcattgttgaacacccttcagacctgattgtctcaaaaggagaacctgcaactttgaactgcaaagctgaaggccgccccacacccactattgaatggtacaaagggggagagagagtggagacagacaaagatgaccctcgctcacaccgaatgttgctgccgagtggatctttatttttcttacgtatagtacatggacggaaaagtagacctgatgaaggagtctatgtctgtgtagcaaggaattaccttggagaggctgtgagccacaatgcatcgctggaagtagccatacttcgggatgacttcagacaaaacccttcggatgtcatggttgcagtaggagagcctgcagtaatggaatgccaacctccacgaggccatcctgagcccaccatttcatggaagaaagatggctctccactggatgataaagatgaaagaataactatacgaggaggaaagctcatgatcacttacacccgtaaaagtgacgctggcaaatatgtttgtgttggtaccaatatggttggggaacgtgagagtgaagtagccgagctgactgtcttagagagaccatcatttgtgaagagacccagtaacttggcagtaactgtggatgacagtgcagaatttaaatgtgaggcccgaggtgaccctgtacctacagtacgatggaggaaagatgatggagagctgcccaaatccagatatgaaatccgagatgatcataccttgaaaattaggaaggtgacagctggtgacatgggttcatacacttgtgttgcagaaaatatggtgggcaaagctgaagcatctgctactctgactgttcaagttgggtctgaacctccacattttgttgtgaaaccccgtgaccaggttgttgctttgggacggactgtaacttttcagtgtgaagcaaccggaaatcctcaaccagctattttctggaggagagaagggagtcagaatctacttttctcatatcaaccaccacagtcatccagccgattttcagtctcccagactggcgacctcacaattactaatgtccagcgatctgatgttggttattacatctgccagactttaaatgttgctggaagcatcatcacaaaggcatatttggaagttacagatgtgattgcagatcggcctcccccagttattcgacaaggtcctgtgaatcagactgtagccgtggatggcactttcgtcctcagctgtgtggccacaggcagtccagtgcccaccattctgtggagaaaggatggagtcctcgtttcaacccaagactctcgaatcaaacagttggagaatggagtactgcagatccgatatgctaagctgggtgatactggtcggtacacctgcattgcatcaacccccagtggtgaagcaacatggagtgcttacattgaagttcaagaatttggagttccagttcagcctccaagacctactgacccaaatttaatccctagtgccccatcaaaacctgaagtgacagatgtcagcagaaatacagtcacattatcgtggcaaccaaatttgaattcaggagcaactccaacatcttatattatagaagccttcagccatgcatctggtagcagctggcagaccgtagcagagaatgtgaaaacagaaacatctgccattaaaggactcaaacctaatgcaatttaccttttccttgtgagggcagctaatgcatatggaattagtgatccaagccaaatatcagatccagtgaaaacacaagatgtcctaccaacaagtcagggggtggaccacaagcaggtccagagagagctgggaaatgctgttctgcacctccacaaccccaccgtcctttcttcctcttccatcgaagtgcactggacagtagatcaacagtctcagtatatacaaggatataaaattctctatcggccatctggagccaaccacggagaatcagactggttagtttttgaagtgaggacgccagccaaaaacagtgtggtaatccctgatctcagaaagggagtcaactatgaaattaaggctcgccctttttttaatgaatttcaaggagcagatagtgaaatcaagtttgccaaaaccctggaagaagcacccagtgccccaccccaaggtgtaactgtatccaagaatgatggaaacggaactgcaattctagttagttggcagccacctccagaagacactcaaaatggaatggtccaagagtataaggtttggtgtctgggcaatgaaactcgataccacatcaacaaaacagtggatggttccaccttttccgtggtcattccctttcttgttcctggaatccgatacagtgtggaagtggcagccagcactggggctgggtctggggtaaagagtgagcctcagttcatccagctggatgcccatggaaaccctgtgtcacctgaggaccaagtcagcctcgctcagcagatttcagatgtggtgaagcagccggccttcatagcaggtattggagcagcctgttggatcatcctcatggtcttcagcatctggctttatcgacaccgcaagaagagaaacggacttactagtacctacgcgggtatcagaaaagtaacttaccagagaggaggcgaagctgtcagcagtggagggaggcctggacttctcaacatcagtgaacctgccgcgcagccatggctggcagacacgtggcctaatactggcaacaaccacaatgactgctccatcagctgctgcacggcaggcaatggaaacagcgacagcaacctcactacctacagtcgcccagctgattgtatagcaaattataacaaccaactggataacaaacaaacaaatctgatgctccctgagtcaactgtttatggtgatgtggaccttagtaacaaaatcaatgagatgaaaaccttcaatagcccaaatctgaaggatgggcgttttgtcaatccatcagggcagcctactccttacgccaccactcagctcatccagtcaaacctcagcaacaacatgaacaatggcagcggggactctggcgagaagcactggaaaccactgggacagcagaaacaagaagtggcaccagttcagtacaacatcgtggagcaaaacaagctgaacaaagattatcgagcaaatgacacagttcctccaactatcccatacaaccaatcatacgaccagaacacaggaggatcctacaacagctcagaccggggcagtagtacatctgggagtcaggggcacaagaaaggggcaagaacacccaaggtaccaaaacagggtggcatgaactgggcagacctgcttcctcctcccccagcacatcctcctccacacagcaatagcgaagagtacaacatttctgtagatgaaagctatgaccaagaaatgccatgtcccgtgccaccagcaaggatgtatttgcaacaagatgaattagaagaggaggaagatgaacgaggccccactccccctgttcggggagcagcttcttctccagctgccgtgtcctatagccatcagtccactgccactctgactccctccccacaggaagaactccagcccatgttacaggattgtccagaggagactggccacatgcagcaccagcccgacaggagacggcagcctgtgagtcctcctccaccaccacggccgatctcccctccacatacctatggctacatttcaggacccctggtctcagatatggatacggatgcgccagaagaggaagaagacgaagccgacatggaggtagccaagatgcaaaccagaaggcttttgttacgtgggcttgagcagacacctgcctccagtgttggggacctggagagctctgtcacggggtccatgatcaacggctggggctcagcctcagaggaggacaacatttccagcggacgctccagtgttagttcttcggacggctcctttttcactgatgctgactttgcccaggcagtcgcagcagcggcagagtatgctggtctgaaagtagcacgacggcaaatgcaggatgctgctggccgtcgacattttcatgcgtctcagtgccctaggcccacaagtcccgtgtctacagacagcaacatgagtgccgccgtaatgcagaaaaccagaccagccaagaaactgaaacaccagccaggacatctgcgcagagaaacctacacagatgatcttccaccacctcctgtgccgccacctgctataaagtcacctactgcccaatccaagacacagctggaagtacgacctgtagtggtgccaaaactcccttctatggatgcaagaacagacagatcatcagacagaaaaggaagcagttacaaggggagagaagtgttggatggaagacaggttgttgacatgcgaacaaatccaggtgatcccagagaagcacaggaacagcaaaatgacgggaaaggacgtggaaacaaggcagcaaaacgagaccttccaccagcaaagactcatctcatccaagaggatattctaccttattgtagacctacttttccaacatcaaataatcccagagatcccagttcctcaagctcaatgtcatcaagaggatcaggaagcagacaaagagaacaagcaaatgtaggtcgaagaaatattgcagaaatgcaggtacttggaggatatgaaagaggagaagataataatgaagaattagaggaaactgaaagctgaagacaaccaagaggcttatgagatctaatgtgaaaatcatcactcaagatgcctcctgtcagatgacacatgacgccagataaaatgttcagtgcaatcagagtgtacaaattgtcgtttttattcctcttattgggatatcattttaaaaactttattgggtttttattgttgttgtttgatccctaaccctacaaagagccttcctattcccctcgctgttgg

SEQ ID NO: 178072 - DNA, 7492 bp, Homo sapiens
  Payload ID: 14930
  Gene Symbol: ROBO1
  Gene Name: roundabout guidance receptor 1
  ENST ID: ENST00000618833
  CDS Start-End: 999-5819
aattgagctggagaggaggcagcgtgagagcagaaacttcagacgccgctgatccgggaggagctggggtgagccgcggcggccgtctctcccacccgcagcagcatcctctctgcccttctctgccaccccggggagagccgggagctgcctctttacagcttccacgagccaggggtgcaggcagctgcccccaggaagtttgggcttctgcgtagtttaggggtgcctgcgagcgccccagagggcgaggggccgagggcgatgttgggcgccgcgcggggctgggggcgcccagaagacgtgcgagtgtccgcggtcctgctgctgtctccagtaccctccgcatcccccaagtgatgggaacaagggcccgcccaggcagccgctgtcgccgcaccgccccctcgctcgctctctgcgcgcggagtcacccagtcacactcccggcaccccgagcccttcctccggagctgctgcttctactttggctgctatcgccgccgccgcgggtggcccgctgctgactgggctcgccgggagacggagaagcactttttggccctccctcagcagctctcacaccccaactttgccgccgccgccgcgcctgccctcgcagcggcgctcggccgcacattgtgggggcgcacgccgggaggctccgcaagaccgtggaggcaggaaacggcactactgcgcttctgcctcggctctttgttgttcgctttggatggttcttgaaagtgtctgagcctcctcggaaatcctggggccggagaagacaaaccttggaattcttcctctgcaaaagtctctgagatactgacaagcgtccggaaaggtcgacgagtaattgccctgaaaactcttggctaattgacccacgttgcttatattaagcctttgtgtgtggtgtgtggcttcatacatttggggaccctatttccactccctcctcttggcatgagactgtatacaggatccacccgaggacaatgattgcggagcccgctcacttttacctgtttggattaatatgtctctgttcaggctcccgtcttcgtcaggaagattttccacctcgcattgttgaacacccttcagacctgattgtctcaaaaggagaacctgcaactttgaactgcaaagctgaaggccgccccacacccactattgaatggtacaaagggggagagagagtggagacagacaaagatgaccctcgctcacaccgaatgttgctgccgagtggatctttatttttcttacgtatagtacatggacggaaaagtagacctgatgaaggagtctatgtctgtgtagcaaggaattaccttggagaggctgtgagccacaatgcatcgctggaagtagccatacttcgggatgacttcagacaaaacccttcggatgtcatggttgcagtaggagagcctgcagtaatggaatgccaacctccacgaggccatcctgagcccaccatttcatggaagaaagatggctctccactggatgataaagatgaaagaataactatacgaggaggaaagctcatgatcacttacacccgtaaaagtgacgctggcaaatatgtttgtgttggtaccaatatggttggggaacgtgagagtgaagtagccgagctgactgtcttagagagaccatcatttgtgaagagacccagtaacttggcagtaactgtggatgacagtgcagaatttaaatgtgaggcccgaggtgaccctgtacctacagtacgatggaggaaagatgatggagagctgcccaaatccagatatgaaatccgagatgatcataccttgaaaattaggaaggtgacagctggtgacatgggttcatacacttgtgttgcagaaaatatggtgggcaaagctgaagcatctgctactctgactgttcaagctccttcagaacctccacattttgttgtgaaaccccgtgaccaggttgttgctttgggacggactgtaacttttcagtgtgaagcaaccggaaatcctcaaccagctattttctggaggagagaagggagtcagaatctacttttctcatatcaaccaccacagtcatccagccgattttcagtctcccagactggcgacctcacaattactaatgtccagcgatctgatgttggttattacatctgccagactttaaatgttgctggaagcatcatcacaaaggcatatttggaagttacagatgtgattgcagatcggcctcccccagttattcgacaaggtcctgtgaatcagactgtagccgtggatggcactttcgtcctcagctgtgtggccacaggcagtccagtgcccaccattctgtggagaaaggatggagtcctcgtttcaacccaagactctcgaatcaaacagttggagaatggagtactgcagatccgatatgctaagctgggtgatactggtcggtacacctgcattgcatcaacccccagtggtgaagcaacatggagtgcttacattgaagttcaagaatttggagttccagttcagcctccaagacctactgacccaaatttaatccctagtgccccatcaaaacctgaagtgacagatgtcagcagaaatacagtcacattatcgtggcaaccaaatttgaattcaggagcaactccaacatcttatattatagaagccttcagccatgcatctggtagcagctggcagaccgtagcagagaatgtgaaaacagaaacatctgccattaaaggactcaaacctaatgcaatttaccttttccttgtgagggcagctaatgcatatggaattagtgatccaagccaaatatcagatccagtgaaaacacaagatgtcctaccaacaagtcagggggtggaccacaagcaggtccagagagagctgggaaatgctgttctgcacctccacaaccccaccgtcctttcttcctcttccatcgaagtgcactggacagtagatcaacagtctcagtatatacaaggatataaaattctctatcggccatctggagccaaccacggagaatcagactggttagtttttgaagtgaggacgccagccaaaaacagtgtggtaatccctgatctcagaaagggagtcaactatgaaattaaggctcgccctttttttaatgaatttcaaggagcagatagtgaaatcaagtttgccaaaaccctggaagaagcacccagtgccccaccccaaggtgtaactgtatccaagaatgatggaaacggaactgcaattctagttagttggcagccacctccagaagacactcaaaatggaatggtccaagagtataaggtttggtgtctgggcaatgaaactcgataccacatcaacaaaacagtggatggttccaccttttccgtggtcattccctttcttgttcctggaatccgatacagtgtggaagtggcagccagcactggggctgggtctggggtaaagagtgagcctcagttcatccagctggatgcccatggaaaccctgtgtcacctgaggaccaagtcagcctcgctcagcagatttcagatgtggtgaagcagccggccttcatagcaggtattggagcagcctgttggatcatcctcatggtcttcagcatctggctttatcgacaccgcaagaagagaaacggacttactagtacctacgcgggtatcagaaaagtaacttaccagagaggaggcgaagctgtcagcagtggagggaggcctggacttctcaacatcagtgaacctgccgcgcagccatggctggcagacacgtggcctaatactggcaacaaccacaatgactgctccatcagctgctgcacggcaggcaatggaaacagcgacagcaacctcactacctacagtcgcccagctgattgtatagcaaattataacaaccaactggataacaaacaaacaaatctgatgctccctgagtcaactgtttatggtgatgtggaccttagtaacaaaatcaatgagatgaaaaccttcaatagcccaaatctgaaggatgggcgttttgtcaatccatcagggcagcctactccttacgccaccactcagctcatccagtcaaacctcagcaacaacatgaacaatggcagcggggactctggcgagaagcactggaaaccactgggacagcagaaacaagaagtggcaccagttcagtacaacatcgtggagcaaaacaagctgaacaaagattatcgagcaaatgacacagttcctccaactatcccatacaaccaatcatacgaccagaacacaggaggatcctacaacagctcagaccggggcagtagtacatctgggagtcaggggcacaagaaaggggcaagaacacccaaggtaccaaaacagggtggcatgaactgggcagacctgcttcctcctcccccagcacatcctcctccacacagcaatagcgaagagtacaacatttctgtagatgaaagctatgaccaagaaatgccatgtcccgtgccaccagcaaggatgtatttgcaacaagatgaattagaagaggaggaagatgaacgaggccccactccccctgttcggggagcagcttcttctccagctgccgtgtcctatagccatcagtccactgccactctgactccctccccacaggaagaactccagcccatgttacaggattgtccagaggagactggccacatgcagcaccagcccgacaggagacggcagcctgtgagtcctcctccaccaccacggccgatctcccctccacatacctatggctacatttcaggacccctggtctcagatatggatacggatgcgccagaagaggaagaagacgaagccgacatggaggtagccaagatgcaaaccagaaggcttttgttacgtgggcttgagcagacacctgcctccagtgttggggacctggagagctctgtcacggggtccatgatcaacggctggggctcagcctcagaggaggacaacatttccagcggacgctccagtgttagttcttcggacggctcctttttcactgatgctgactttgcccaggcagtcgcagcagcggcagagtatgctggtctgaaagtagcacgacggcaaatgcaggatgctgctggccgtcgacattttcatgcgtctcagtgccctaggcccacaagtcccgtgtctacagacagcaacatgagtgccgccgtaatgcagaaaaccagaccagccaagaaactgaaacaccagccaggacatctgcgcagagaaacctacacagatgatcttccaccacctcctgtgccgccacctgctataaagtcacctactgcccaatccaagacacagctggaagtacgacctgtagtggtgccaaaactcccttctatggatgcaagaacagacagatcatcagacagaaaaggaagcagttacaaggggagagaagtgttggatggaagacaggttgttgacatgcgaacaaatccaggtgatcccagagaagcacaggaacagcaaaatgacgggaaaggacgtggaaacaaggcagcaaaacgagaccttccaccagcaaagactcatctcatccaagaggatattctaccttattgtagacctacttttccaacatcaaataatcccagagatcccagttcctcaagctcaatgtcatcaagaggatcaggaagcagacaaagagaacaagcaaatgtaggtcgaagaaatattgcagaaatgcaggtacttggaggatatgaaagaggagaagataataatgaagaattagaggaaactgaaagctgaagacaaccaagaggcttatgagatctaatgtgaaaatcatcactcaagatgcctcctgtcagatgacacatgacgccagataaaatgttcagtgcaatcagagtgtacaaattgtcgtttttattcctcttattgggatatcattttaaaaactttattgggtttttattgttgttgtttgatccctaaccctacaaagagccttcctattcccctcgctgttggagcaaaccattataccttacttccagcaagcaaagtgctttgacttcttgcttcagtcatcagccagcaagagggaacaaaactgttcttttgcattttgccgctgagatatggcattgcactgcttatatgccaagctaatttatagcaagatattgatcaaatatagaaagttgatattcaacctcacaagggctctcaaagtataatctttctatagccaactgctaatgcaaattaaaacatatttcattttaacatgatttcaaaatcagtttttcatactaccctttgctggaagaaactaaaaatatagcaaatgcagaaccacaaacaattcgaatggggtagaaacattgtaaatatttactctttgcaaaccctggtggtattttattttggcttcatttcaatcattgaagtatattcttattggaaatgtacttttggataagtagggctaagccagttggatctctggttgtctagtcattgtcataagtaaacctagtaaaaccttgttctatttttcaatcatcaaaaagtaattataaatacgtattacaaacaagtggatgtttttaatgaccaattgagtaagaacatccctgtcttaactggcctaaatttcttctggtagtgtcagttcaactttcagaagtgccacttaaggaagtttgatttttgtttttgtaatgcactgtttttaatctctctctctttttttttttttttttggttttaaaagcacaatcactaaactttatttgtaaaccattgtaactattaaccttttttgtcttattgaaaaaaaaaatgttgagaagcgtttttaacctgttttgttaatgctctatgtttgtatttggaatatttgaataatgacagatggtgaagtaacatgcatactttattgtgggccatgaaccaaatggttcttacttttcctggacttaaagaaaaaaagaggtttaagtttgttgtggccaatgtcgaaacctacaagatttccttaaaatctctaatagaggcattacttgctttcaattgacaaatgatgccctctgactagtagatttctatgatccttttttgtcattttatgaatatcattgattttataattggtgctatttgaagaaaaaaatgtacatttattcatagatagataagtatcaggtctgaccccagtggaaaacaaagccaaacaaaactgaaccacaaaaaaaaaggctggtgttcaccaaaaccaaacttgttcatttagataatttgaaaaagttccatagaaaaggcgtgcagtactaagggaacaatccatgtgattaatgttttcattatgttcatgtaagaagccccttatttttagccataattttgcatactgaaaatccaataatcagaaaagtaattttgtcacattatttattaaaaatgttctcaaatac

SEQ ID NO: 178073 - DNA, 7483 bp, Homo sapiens
  Payload ID: 14930
  Gene Symbol: ROBO1
  Gene Name: roundabout guidance receptor 1
  ENST ID: ENST00000618846
  CDS Start-End: 1239-5816
aattgagctggagaggaggcagcgtgagagcagaaacttcagacgccgctgatccgggaggagctggggtgagccgcggcggccgtctctcccacccgcagcagcatcctctctgcccttctctgccaccccggggagagccgggagctgcctctttacagcttccacgagccaggggtgcaggcagctgcccccaggaagtttgggcttctgcgtagtttaggggtgcctgcgagcgccccagagggcgaggggccgagggcgatgttgggcgccgcgcggggctgggggcgcccagaagacgtgcgagtgtccgcggtcctgctgctgtctccagtaccctccgcatcccccaagtgatgggaacaagggcccgcccaggcagccgctgtcgccgcaccgccccctcgctcgctctctgcgcgcggagtcacccagtcacactcccggcaccccgagcccttcctccggagctgctgcttctactttggctgctatcgccgccgccgcgggtggcccgctgctgactgggctcgccgggagacggagaagcactttttggccctccctcagcagctctcacaccccaactttgccgccgccgccgcgcctgccctcgcagcggcgctcggccgcacattgtgggggcgcacgccgggaggctccgcaagaccgtggaggcaggaaacggcactactgcgcttctgcctcggctctttgttgttcgctttggatggttcttgaaagtgtctgagcctcctcggaaatcctggggccggagaagacaaaccttggaattcttcctctgcaaaagtctctgagatactgacaagcgtccggaaaggtcgacgagtaattgccctgaaaactcttggctaattgacccacgttgcttatattaagcctttgtgtgtggtgtgtggcttcatacatttggggaccctatttccactccctcctcttggcatgagactgtatacaggatccacccgaggacaatgattgcggagcccgctcacttttacctgtttggattaatatgtctctgttcaggctcccgtcttcgtcaggaagattttccacctcgcattgttgaacacccttcagacctgattgtctcaaaaggagaacctgcaactttgaactgcaaagctgaaggccgccccacacccactattgaatggtacaaagggggagagagagtggagacagacaaagatgaccctcgctcacaccgaatgttgctgccgagtggatctttatttttcttacgtatagtacatggacggaaaagtagacctgatgaaggagtctatgtctgtgtagcaaggaattaccttggagaggctgtgagccacaatgcatcgctggaagtagccatacttcgggatgacttcagacaaaacccttcggatgtcatggttgcagtaggagagcctgcagtaatggaatgccaacctccacgaggccatcctgagcccaccatttcatggaagaaagatggctctccactggatgataaagatgaaagaataactatacgaggaggaaagctcatgatcacttacacccgtaaaagtgacgctggcaaatatgtttgtgttggtaccaatatggttggggaacgtgagagtgaagtagccgagctgactgtcttagagagaccatcatttgtgaagagacccagtaacttggcagtaactgtggatgacagtgcagaatttaaatgtgaggcccgaggtgaccctgtacctacagtacgatggaggaaagatgatggagagctgcccaaatccagatatgaaatccgagatgatcataccttgaaaattaggaaggtgacagctggtgacatgggttcatacacttgtgttgcagaaaatatggtgggcaaagctgaagcatctgctactctgactgttcaagttgggtctgaacctccacattttgttgtgaaaccccgtgaccaggttgttgctttgggacggactgtaacttttcagtgtgaagcaaccggaaatcctcaaccagctattttctggaggagagaagggagtcagaatctacttttctcatatcaaccaccacagtcatccagccgattttcagtctcccagactggcgacctcacaattactaatgtccagcgatctgatgttggttattacatctgccagactttaaatgttgctggaagcatcatcacaaaggcatatttggaagttacagatgtgattgcagatcggcctcccccagttattcgacaaggtcctgtgaatcagactgtagccgtggatggcactttcgtcctcagctgtgtggccacaggcagtccagtgcccaccattctgtggagaaaggatggagtcctcgtttcaacccaagactctcgaatcaaacagttggagaatggagtactgcagatccgatatgctaagctgggtgatactggtcggtacacctgcattgcatcaacccccagtggtgaagcaacatggagtgcttacattgaagttcaagaatttggagttccagttcagcctccaagacctactgacccaaatttaatccctagtgccccatcaaaacctgaagtgacagatgtcagcagaaatacagtcacattatcgtggcaaccaaatttgaattcaggagcaactccaacatcttatattatagaagccttcagccatgcatctggtagcagctggcagaccgtagcagagaatgtgaaaacagaaacatctgccattaaaggactcaaacctaatgcaatttaccttttccttgtgagggcagctaatgcatatggaattagtgatccaagccaaatatcagatccagtgaaaacacaagatgtcctaccaacaagtcagggggtggaccacaagcaggtccagagagagctgggaaatgctgttctgcacctccacaaccccaccgtcctttcttcctcttccatcgaagtgcactggacagtagatcaacagtctcagtatatacaaggatataaaattctctatcggccatctggagccaaccacggagaatcagactggttagtttttgaagtgaggacgccagccaaaaacagtgtggtaatccctgatctcagaaagggagtcaactatgaaattaaggctcgccctttttttaatgaatttcaaggagcagatagtgaaatcaagtttgccaaaaccctggaagaaggcaatgccccaccccaaggtgtaactgtatccaagaatgatggaaacggaactgcaattctagttagttggcagccacctccagaagacactcaaaatggaatggtccaagagtataaggtttggtgtctgggcaatgaaactcgataccacatcaacaaaacagtggatggttccaccttttccgtggtcattccctttcttgttcctggaatccgatacagtgtggaagtggcagccagcactggggctgggtctggggtaaagagtgagcctcagttcatccagctggatgcccatggaaaccctgtgtcacctgaggaccaagtcagcctcgctcagcagatttcagatgtggtgaagcagccggccttcatagcaggtattggagcagcctgttggatcatcctcatggtcttcagcatctggctttatcgacaccgcaagaagagaaacggacttactagtacctacgcgggtatcagaaaagtaacttaccagagaggaggcgaagctgtcagcagtggagggaggcctggacttctcaacatcagtgaacctgccgcgcagccatggctggcagacacgtggcctaatactggcaacaaccacaatgactgctccatcagctgctgcacggcaggcaatggaaacagcgacagcaacctcactacctacagtcgcccagctgattgtatagcaaattataacaaccaactggataacaaacaaacaaatctgatgctccctgagtcaactgtttatggtgatgtggaccttagtaacaaaatcaatgagatgaaaaccttcaatagcccaaatctgaaggatgggcgttttgtcaatccatcagggcagcctactccttacgccaccactcagctcatccagtcaaacctcagcaacaacatgaacaatggcagcggggactctggcgagaagcactggaaaccactgggacagcagaaacaagaagtggcaccagttcagtacaacatcgtggagcaaaacaagctgaacaaagattatcgagcaaatgacacagttcctccaactatcccatacaaccaatcatacgaccagaacacaggaggatcctacaacagctcagaccggggcagtagtacatctggtaatcaggggcacaagaaaggggcaagaacacccaaggtaccaaaacagggtggcatgaactgggcagacctgcttcctcctcccccagcacatcctcctccacacagcaatagcgaagagtacaacatttctgtagatgaaagctatgaccaagaaatgccatgtcccgtgccaccagcaaggatgtatttgcaacaagatgaattagaagaggaggaagatgaacgaggccccactccccctgttcggggagcagcttcttctccagctgccgtgtcctatagccatcagtccactgccactctgactccctccccacaggaagaactccagcccatgttacaggattgtccagaggagactggccacatgcagcaccagcccgacaggagacggcagcctgtgagtcctcctccaccaccacggccgatctcccctccacatacctatggctacatttcaggacccctggtctcagatatggatacggatgcgccagaagaggaagaagacgaagccgacatggaggtagccaagatgcaaaccagaaggcttttgttacgtgggcttgagcagacacctgcctccagtgttggggacctggagagctctgtcacggggtccatgatcaacggctggggctcagcctcagaggaggacaacatttccagcggacgctccagtgttagttcttcggacggctcctttttcactgatgctgactttgcccaggcagtcgcagcagcggcagagtatgctggtctgaaagtagcacgacggcaaatgcaggatgctgctggccgtcgacattttcatgcgtctcagtgccctaggcccacaagtcccgtgtctacagacagcaacatgagtgccgccgtaatgcagaaaaccagaccagccaagaaactgaaacaccagccaggacatctgcgcagagaaacctacacagatgatcttccaccacctcctgtgccgccacctgctataaagtcacctactgcccaatccaagacacagctggaagtacgacctgtagtggtgccaaaactcccttctatggatgcaagaacagacagatcatcagacagaaaaggaagcagttacaaggggagagaagtgttggatggaagacaggttgttgacatgcgaacaaatccaggtgatcccagagaagcacaggaacagcaaaatgacgggaaaggacgtggaaacaaggcagcaaaacgagaccttccaccagcaaagactcatctcatccaagaggatattctaccttattgtagacctacttttccaacatcaaataatcccagagatcccagttcctcaagctcaatgtcatcaagaggatcaggaagcagacaaagagaacaagcaaatgtaggtcgaagaaatattgcagaaatgcaggtacttggaggatatgaaagaggagaagataataatgaagaattagaggaaactgaaagctgaagacaaccaagaggcttatgagatctaatgtgaaaatcatcactcaagatgcctcctgtcagatgacacatgacgccagataaaatgttcagtgcaatcagagtgtacaaattgtcgtttttattcctcttattgggatatcattttaaaaactttattgggtttttattgttgttgtttgatccctaaccctacaaagagccttcctattcccctcgctgttggagcaaaccattataccttacttccagcaagcaaagtgctttgacttcttgcttcagtcatcagccagcaagagggaacaaaactgttcttttgcattttgccgctgagatatggcattgcactgcttatatgccaagctaatttatagcaagatattgatcaaatatagaaagttgatattcaacctcacaagggctctcaaagtataatctttctatagccaactgctaatgcaaattaaaacatatttcattttaacatgatttcaaaatcagtttttcatactaccctttgctggaagaaactaaaaatatagcaaatgcagaaccacaaacaattcgaatggggtagaaacattgtaaatatttactctttgcaaaccctggtggtattttattttggcttcatttcaatcattgaagtatattcttattggaaatgtacttttggataagtagggctaagccagttggatctctggttgtctagtcattgtcataagtaaacctagtaaaaccttgttctatttttcaatcatcaaaaagtaattataaatacgtattacaaacaagtggatgtttttaatgaccaattgagtaagaacatccctgtcttaactggcctaaatttcttctggtagtgtcagttcaactttcagaagtgccacttaaggaagtttgatttttgtttttgtaatgcactgtttttaatctctctctctttttttttttttttttggttttaaaagcacaatcactaaactttatttgtaaaccattgtaactattaaccttttttgtcttattgaaaaaaaaaatgttgagaagcgtttttaacctgttttgttaatgctctatgtttgtatttggaatatttgaataatgacagatggtgaagtaacatgcatactttattgtgggccatgaaccaaatggttcttacttttcctggacttaaagaaaaaaagaggtttaagtttgttgtggccaatgtcgaaacctacaagatttccttaaaatctctaatagaggcattacttgctttcaattgacaaatgatgccctctgactagtagatttctatgatccttttttgtcattttatgaatatcattgattttataattggtgctatttgaagaaaaaaatgtacatttattcatagatagataagtatcaggtctgaccccagtggaaaacaaagccaaacaaaactgaaccacaaaaaaaaaggctggtgttcaccaaaaccaaacttgttcatttagataatttgaaaaagttccatagaaaaggcgtgcagtactaagggaacaatccatgtgattaatgttttcattatgttcatgtaagaagccccttatttttagccataattttgcatactgaaaatccaataatcagaaaagtaattttgtcacattatttattaaaaatgttctc

SEQ ID NO: 178074 - DNA, 5437 bp, Homo sapiens
  Payload ID: 14931
  Gene Symbol: ROBO2
  Gene Name: roundabout guidance receptor 2
  ENST ID: ENST00000332191
  CDS Start-End: 57-4376
ttttgctctctgggattggtttcttaaagaatctggatcctttttaatatgtcaaaatgagtctgctgatgtttacacaactactgctctgtggatttttatatgttcgggttgatggatcgcgtcttcgccaggaggactttcccccgcggattgtggagcatccttccgatgtcatcgtctctaagggcgagcccacgactctgaactgcaaggcggagggccggccaacgcccaccattgagtggtacaaagatggggagcgagtggagactgacaaggacgatccccggtcccacaggatgcttctgcccagcggatccttattcttcttgcgcatcgtgcacgggcgcaggagtaaacctgatgaaggaagctacgtttgtgttgcgaggaactatcttggtgaagcagtgagtcgaaatgcgtctctggaagtggcattgttacgagatgacttccgacaaaaccccacagatgttgtagtggcagctggagagcctgcaatcctggagtgccagcctccccggggacacccagaacccaccatctactggaaaaaagacaaagttcgaattgatgacaaggaagaaagaataagtatccgtggtggaaaactgatgatctccaataccaggaaaagtgatgcagggatgtatacttgtgttggtaccaatatggtgggagaaagggacagtgacccagcagagctgactgtctttgaacgacccacatttctcaggaggccaattaaccaggtggtactggaggaagaagctgtagaatttcgttgtcaagtccaaggagatcctcaaccaactgtgaggtggaaaaaggatgatgcagacttgccaagaggaaggtatgacatcaaagacgattacacactaagaattaaaaagaccatgagtacagatgaaggcacctatatgtgtattgctgagaatcgggttggaaaaatggaagcctctgctacactcaccgtccgagctcccccacagtttgtggttcggccaagagatcagattgttgctcaaggtcgaacagtgacatttccctgtgaaactaaaggaaacccacagccagctgttttttggcagaaagaaggcagccagaacctacttttcccaaaccaaccccagcagcccaacagtagatgctcagtgtcaccaactggagacctcacaatcaccaacattcaacgttccgacgcgggttactacatctgccaggctttaactgtggcaggaagcattttagcaaaagctcaactggaggttactgatgttttgacagatagacctccacctataattctacaaggcccagccaaccaaacgctggcagtggatggtacagcgttactgaaatgtaaagccactggtgatcctcttcctgtaattagctggttaaaggagggatttacttttccgggtagagatccaagagcaacaattcaagagcaaggcacactgcagattaagaatttacggatttctgatactggcacttatacttgtgtggctacaagttcaagtggagagacttcctggagtgcagtgctggatgtgacagagtctggagcaacaatcagtaaaaactatgatttaagtgacctgccagggccaccatccaaaccgcaggtcactgatgttactaagaacagtgtcaccttgtcctggcagccaggtacccctggaacccttccagcaagtgcatatatcattgaggctttcagccaatcagtgagcaacagctggcagaccgtggcaaaccatgtaaagaccaccctctatactgtaagaggactgcggcccaatacaatctacttattcatggtcagagcgatcaacccccaaggtctcagtgacccaagtcccatgtcagatcctgtgcgcacacaagatatcagcccaccagcacaaggagtggaccacaggcaagtgcagaaagagctaggagatgtccttgtccgtcttcataatccagttgtgctgactcccaccacggttcaggtcacatggacggttgatcgccaaccccagtttatccaaggctaccgagtgatgtatcgtcagacttcaggtctgcaggcgacatcttcgtggcagaatttagatgccaaagtcccgactgaacgaagtgctgtcttagtcaacctgaaaaagggggtgacttatgaaattaaagtacggccatattttaatgagttccaaggaatggatagtgaatctaaaacggttcgtactactgaagaagccccaagtgccccaccacagtctgtcactgtactgacagttggaagctacaatagcacaagtattagtgtttcctgggatcctcctcctccagatcaccagaatggaattatccaagaatacaagatctggtgtctaggaaatgaaacgcgattccatatcaacaaaactgtggatgcagccattcggtccgtaataattggtggattattcccaggtattcaataccgggtagaggttgcagctagtaccagtgcaggggttggagtaaagagtgagccacagccaataataatcgggagacgcaatgaagttgtcattactgaaaacaataacagcataactgagcaaatcactgatgtggtgaagcaaccagcctttatagctggtattggtggtgcctgctgggtaattctgatgggttttagcatatggttgtattggcgaagaaagaagaggaagggactcagtaattatgctgttacgtttcaaagaggagatggaggactaatgagcaatggaagccgtccaggtcttctcaatgctggtgatcccagctatccatggcttgctgattcttggccagccacgagcttgccagtaaataatagcaacagtggcccaaatgagattggaaattttggccgtggagatgtgctgccaccagttccaggccaaggggataaaacagcaacgatgctctcagatggagccatttatagtagcattgacttcactaccaaaaccagttacaacagttccagccaaataacacaggctaccccatatgccacgacacagatcttgcattccaacagcatacatgaattggctgtcgatctgcctgatccacaatggaaaagctcaattcagcaaaaaacagatctgatgggatttggttattctctacctgatcagaacaaaggtaacaatggtgggaaaggtggaaaaaagaagaaaaataaaaactcttctaaaccacagaaaaacaatggatccacttgggccaatgtccctctacctccccccccagtccagccccttcctggcacggagctggaacactatgcagtggaacaacaagaaaatggctatgacagtgatagctggtgcccaccattgccagtacaaacttacttacaccaaggtctggaagatgaactggaagaagatgatgatagggtcccaacacctcctgttcgaggcgtggcttcttctcctgctatctcctttggacagcagtccactgcaactcttactccatccccacgggaagagatgcaacccatgctgcaggctcacctggatgagttgacaagagcctatcagtttgatatagcaaaacaaacatggcacattcaaagcaataatcaacctccacagcctccagttccaccgttaggttatgtgtctggagccttgatttctgatttggaaacggatgttgcagatgatgatgccgacgacgaagaggaagctttagaaatccccaggcccctgagagcactggaccagactcctggatccagcatggacaatctagacagctctgtgacaggttcaatggtaaatggatggggctctgcatctgatgaggatcgtaacttttctagtcatagatctagtgtaggtagctcctcagatggctctatctttgccagcggcagttttgcacaagcactggtggcagcagcagataaagctggttttaggctggatggaaccagccttacaagaacaggaaaagcctttacctcctctcaaagacctcgacctaccagcccattttctactgacagtaacaccagtgcagccctgagtcaaagtcagaggcctcggcccactaaaaaacacaagggagggcggatggaccaacaaccagcattgcctcatcgaagggaaggaatgacagatgaggaggccttggtgccctatagcaagcccagtttcccatctccaggtggccacagctcatcaggaacagcttcttctaagggatccactggacctaggaaaaccgaggtgttgagagcaggccaccagcgcaatgccagcgaccttcttgacataggatatatgggctccaacagtcaaggacagtttacaggtgaattatagtaaatgagaggagacatacaaagctgctctgaaggaccatcaggtccggactcatggaagtgatgactctaaacagtgcaatgaacaatttatttatgtactattaaaagaactgtaaatgcaatgtaaagacacacagccacacatatcccacagatattttcattgtgttcttctcttaagtacaccacccaccttaactctttcttgtcaggagtatataaaaaagaaagaaaacaaaactcgccctacaggaagaaaaggattctcctctgtatataatttcttttgtgcattgctatgcaagctcactctttttagctctgctcatattattgtctgttcttattggtctgttgtactatatgtgaattaataggctgtggtgccatatattaacttttaattgtgtaacttttatgtttaaattttgcactgcaattttatttggtgataagcacaaatctctactcctcatgacatgaagaaaaagactgaatgtgaagggagtttctgtactgtaagctagattggataatgatggctgtaacaaatcatgttagatggttttcagttggggtgtagaaataggaagatgcaaaggaacaatggtgttggcaaagtcttctttgaatatcagggactgagtcaataaaaaaaatagtagaaaggtggcttttactattgacaaaagccggggtcaaaaaaagtagtttaagtcttaagactgaatatgcattaaagtatgcaggtagcaaagatgtaataaatttgcttaaaaaaagaaattaaagttttatttagaatcaattttacctgtcattgtaattgacccatctgagaattacaataagcaagaggaaattaaggtgttttgcaagagctgtatttatattacagttttttaaaaacattttctgaattatcgtaattaagctctccaactcgttaagtcagaatataatatgaagttccccaaggaaacgaacaaaatgaactctagaatatctagcaaatagttaaagaagcaatttattattagggcatactcgggctgtttc

SEQ ID NO: 178075 - DNA, 8946 bp, Homo sapiens
  Payload ID: 14931
  Gene Symbol: ROBO2
  Gene Name: roundabout guidance receptor 2
  Uniprot ID: Q9HCK4
  ENST ID: ENST00000461745
  CDS Start-End: 901-5037
ggcgaggggcctcagcgcgcctggcgctggactgagcgctccctttctccgccgcgcccgggctgggctctcacgcccgtctctgctcgcgcccgcagccgcctggtgcactatcctcagaggcggcaccgcgggggtgtctgcagcctcggcctccgcccggcccctccctccctccctccctccctcgctccttccctgcctccctcaccacgtaggagttcggattctccacccgaatcgtcctgatttcccttctcctctcttttggaaaccggagaggtggagggagggcaacaccgctgcaaaggagaggcccgccaagtctgcccgcctgcaaagtgttgctttgacacattcttattatggaagttaagtaaaaatatagacatattaaaaaataactccggacgtggagctgctacggagaaggaaaccgggggaaagaaaaccagtaggcaggccaatggtttttcggcagcgcgctggcaagtttgtggaacactttctaggaattaggtcttttcctcccccttcatcatcttgacttctgaaggaagaacttggctttggattgcagtggagcctaaggagagagggttagacacactcgaataatccctctggctgggctgaatttgtgggaatttaggaagccagagtgctggaaatacagcagcctttgaagtaccctctgttaatttggatggatctcagtgtgccccgttcgagacctctccaccaaccccttctgatcttgcgatttgctcttcttgactttaattagtatctaggaaagtctaaactttggacctacctctttttttgatactcatttttgtacttttgctctctgggattggtttcttaaagaatctggatcctttttaatatgtcaaaatgagtctgctgatgtttacacaactactgctctgtggatttttatatgttcgggttgatggatcgcgtcttcgccaggaggactttcccccgcggattgtggagcatccttccgatgtcatcgtctctaagggcgagcccacgactctgaactgcaaggcggagggccggccaacgcccaccattgagtggtacaaagatggggagcgagtggagactgacaaggacgatccccggtcccacaggatgcttctgcccagcggatccttattcttcttgcgcatcgtgcacgggcgcaggagtaaacctgatgaaggaagctacgtttgtgttgcgaggaactatcttggtgaagcagtgagtcgaaatgcgtctctggaagtggcattgttacgagatgacttccgacaaaaccccacagatgttgtagtggcagctggagagcctgcaatcctggagtgccagcctccccggggacacccagaacccaccatctactggaaaaaagacaaagttcgaattgatgacaaggaagaaagaataagtatccgtggtggaaaactgatgatctccaataccaggaaaagtgatgcagggatgtatacttgtgttggtaccaatatggtgggagaaagggacagtgacccagcagagctgactgtctttgaacgacccacatttctcaggaggccaattaaccaggtggtactggaggaagaagctgtagaatttcgttgtcaagtccaaggagatcctcaaccaactgtgaggtggaaaaaggatgatgcagacttgccaagaggaaggtatgacatcaaagacgattacacactaagaattaaaaagaccatgagtacagatgaaggcacctatatgtgtattgctgagaatcgggttggaaaaatggaagcctctgctacactcaccgtccgagctcccccacagtttgtggttcggccaagagatcagattgttgctcaaggtcgaacagtgacatttccctgtgaaactaaaggaaacccacagccagctgttttttggcagaaagaaggcagccagaacctacttttcccaaaccaaccccagcagcccaacagtagatgctcagtgtcaccaactggagacctcacaatcaccaacattcaacgttccgacgcgggttactacatctgccaggctttaactgtggcaggaagcattttagcaaaagctcaactggaggttactgatgttttgacagatagacctccacctataattctacaaggcccagccaaccaaacgctggcagtggatggtacagcgttactgaaatgtaaagccactggtgatcctcttcctgtaattagctggttaaaggagggatttacttttccgggtagagatccaagagcaacaattcaagagcaaggcacactgcagattaagaatttacggatttctgatactggcacttatacttgtgtggctacaagttcaagtggagagacttcctggagtgcagtgctggatgtgacagagtctggagcaacaatcagtaaaaactatgatttaagtgacctgccagggccaccatccaaaccgcaggtcactgatgttactaagaacagtgtcaccttgtcctggcagccaggtacccctggaacccttccagcaagtgcatatatcattgaggctttcagccaatcagtgagcaacagctggcagaccgtggcaaaccatgtaaagaccaccctctatactgtaagaggactgcggcccaatacaatctacttattcatggtcagagcgatcaacccccaaggtctcagtgacccaagtcccatgtcagatcctgtgcgcacacaagatatcagcccaccagcacaaggagtggaccacaggcaagtgcagaaagagctaggagatgtccttgtccgtcttcataatccagttgtgctgactcccaccacggttcaggtcacatggacggttgatcgccaaccccagtttatccaaggctaccgagtgatgtatcgtcagacttcaggtctgcaggcgacatcttcgtggcagaatttagatgccaaagtcccgactgaacgaagtgctgtcttagtcaacctgaaaaagggggtgacttatgaaattaaagtacggccatattttaatgagttccaaggaatggatagtgaatctaaaacggttcgtactactgaagaagccccaagtgccccaccacagtctgtcactgtactgacagttggaagctacaatagcacaagtattagtgtttcctgggatcctcctcctccagatcaccagaatggaattatccaagaatacaagatctggtgtctaggaaatgaaacgcgattccatatcaacaaaactgtggatgcagccattcggtccgtaataattggtggattattcccaggtattcaataccgggtagaggttgcagctagtaccagtgcaggggttggagtaaagagtgagccacagccaataataatcgggagacgcaatgaagttgtcattactgaaaacaataacagcataactgagcaaatcactgatgtggtgaagcaaccagcctttatagctggtattggtggtgcctgctgggtaattctgatgggttttagcatatggttgtattggcgaagaaagaagaggaagggactcagtaattatgctgttacgtttcaaagaggagatggaggactaatgagcaatggaagccgtccaggtcttctcaatgctggtgatcccagctatccatggcttgctgattcttggccagccacgagcttgccagtaaataatagcaacagtggcccaaatgagattggaaattttggccgtggagatgtgctgccaccagttccaggccaaggggataaaacagcaacgatgctctcagatggagccatttatagtagcattgacttcactaccaaaaccagttacaacagttccagccaaataacacaggctaccccatatgccacgacacagatcttgcattccaacagcatacatgaattggctgtcgatctgcctgatccacaatggaaaagctcaattcagcaaaaaacagatctgatgggatttggttattctctacctgatcagaacaaaggtaacaatggtgggaaaggtggaaaaaagaagaaaaataaaaactcttctaaaccacagaaaaacaatggatccacttgggccaatgtccctctacctccccccccagtccagccccttcctggcacggagctggaacactatgcagtggaacaacaagaaaatggctatgacagtgatagctggtgcccaccattgccagtacaaacttacttacaccaaggtctggaagatgaactggaagaagatgatgatagggtcccaacacctcctgttcgaggcgtggcttcttctcctgctatctcctttggacagcagtccactgcaactcttactccatccccacgggaagagatgcaacccatgctgcaggctcacctggatgagttgacaagagcctatcagtttgatatagcaaaacaaacatggcacattcaaagcaataatcaacctccacagcctccagttccaccgttaggttatgtgtctggagccttgatttctgatttggaaacggatgttgcagatgatgatgccgacgacgaagaggaagctttagaaatccccaggcccctgagagcactggaccagactcctggatccagcatggacaatctagacagctctgtgacaggaaaagcctttacctcctctcaaagacctcgacctaccagcccattttctactgacagtaacaccagtgcagccctgagtcaaagtcagaggcctcggcccactaaaaaacacaagggagggcggatggaccaacaaccagcattgcctcatcgaagggaaggaatgacagatgaggaggccttggtgccctatagcaagcccagtttcccatctccaggtggccacagctcatcaggaacagcttcttctaagggatccactggacctaggaaaaccgaggtgttgagagcaggccaccagcgcaatgccagcgaccttcttgacataggatatatgggctccaacagtcaaggacagtttacaggtgaattatagtaaatgagaggagacatacaaagctgctctgaaggaccatcaggtccggactcatggaagtgatgactctaaacagtgcaatgaacaatttatttatgtactattaaaagaactgtaaatgcaatgtaaagacacacagccacacatatcccacagatattttcattgtgttcttctcttaagtacaccacccaccttaactctttcttgtcaggagtatataaaaaagaaagaaaacaaaactcgccctacaggaagaaaaggattctcctctgtatataatttcttttgtgcattgctatgcaagctcactctttttagctctgctcatattattgtctgttcttattggtctgttgtactatatgtgaattaataggctgtggtgccatatattaacttttaattgtgtaacttttatgtttaaattttgcactgcaattttatttggtgataagcacaaatctctactcctcatgacatgaagaaaaagactgaatgtgaagggagtttctgtactgtaagctagattggataatgatggctgtaacaaatcatgttagatggttttcagttggggtgtagaaataggaagatgcaaaggaacaatggtgttggcaaagtcttctttgaatatcagggactgagtcaataaaaaaaatagtagaaaggtggcttttactattgacaaaagccggggtcaaaaaaagtagtttaagtcttaagactgaatatgcattaaagtatgcaggtagcaaagatgtaataaatttgcttaaaaaaagaaattaaagttttatttagaatcaattttacctgtcattgtaattgacccatctgagaattacaataagcaagaggaaattaaggtgttttgcaagagctgtatttatattacagttttttaaaaacattttctgaattatcgtaattaagctctccaactcgttaagtcagaatataatatgaagttccccaaggaaacgaacaaaatgaactctagaatatctagcaaatagttaaagaagcaatttattattagggcatactcgggctgtttccaaatataaactctattgcaatatcttatttcatctttctaatacatgtacagtgcacactagaggatagagctgcatcacttaaattcatgacttaaaaaataatacagtttatatacaacttgttttttatttgattaagaagtgaagtttacgccacccaatgtatagccaaattgtacgtgcttaaaaaacagtgccgagagtatgttcagttcgcagtaagtagatttattggaataaatattctatggtacattctcagaaattggcttccaactaaaatacgtttgacccattttgaataaggaaattgaaaagaaaaatttaaaaggagaaaaaaatgcatgtttataaactttttaaataaaaccagaccttgtaagtggacattaataattgtcctgcctcatttgttttcacgactttgacaacaagaagttcctgaacattagtcatgtatgctcagaataaatgtgactttgaaatatatgttagctactgtacatgtatagtcagtcaagtagaagaggaccttcctgaaattcccacttgtgacattttcccatgggtttcctacacaatcttaaattttatttctgtctatactttctcaaatttttcctatgataagttcagttgttggtactcttctaaaaatattcaacgtgattaggatcagttctaaaatacgggacccctttgagtgacaattcgcactccatgcattattggctcagtagccaatttttgtcacgtcgttataacaaggagatgacataattaaacatttccatcctttctattccctgagactgcatcagcacaggcaagtatagaatgtaatgttcttcatgggccccaccagctttttggtgccatgtaatttatttcttcgctgaagagaaaaagaattctgagacacagttattaaaccctttatcaactttctaccatcagtgcctgaattctaatgcagtgtgatttctctgggacaaagagactgaggaagatgaaaagtttcttcaaagagtgaatacatacttattcacaactctaggatgtgaggactttaaatatctctttatgaagttccctgcctaacctctttctatttaaaggcaaacaaatttcgaagaggttttgtgttccctctttatgtttctctatgacccagtttagtctaaaaccttagttcattacatatacaacacatagcctttgatccctggtaactggcaggtgttggtgattaataaaccaaggcttcaaagtgaagtatgtgtgtgcagatgacttttggaataacgtgggcatagcatcataccttcctgattgtcttcagcatataaaaattaactgttgtagttaaaattatgtcagtgcagagcttgtggttacttggaatgttctttcagaatagtccatgttgcctattaaacctagttttaaacacattgggcagtcaatttatgcacccaaaatatcaccctcaggtagattgagggcaagataaaatgctgtatgtagctatacaaaggaattcagaaacattactggaaagcaaagcctttgtcagcttgctactgacaaagtagtaaaaagctactaatcagtgttgagtcagatgtcaacagaaaaatacaaatacctatgagagccacagcagtttctcgtttcatagccgattcaatgaatatgattagaaattcactgagctcactcttgcaggtttaaatggaggcctgcataaggactgcaagaggaaatctgggtgggagagaatgtaatctgatcttgcactcataggcaatgctgcaatgcaatcatgtccaatacaagcacagcttcattcataacaggaaacgtcttctttgggaaaatagctctattggtgcccaaactcaggtatgccagtgtatgcaggtggagtcgccctacccctcttccaaacatgtcctgtgagatttttaaaataagatgggatagtacaggggcatgaaaagaattgattccttcacaggatttgaatccagttcaagggagaatgtagaaaattcaaaaccaacatataaggtatcacacaaccaagaaaagtaaaaccattgcaagtttacttgcgttgagtacaaaacagatttaatggtgttctatgtcatagtttaatgctctgggtatttaaatatgttttcaacaggatttgagttgaaagtttgtaatgtgctttgatggaacacctctcaatttctattcaataaacttatgtaattgtccattgacaatataatgataacagtaccattgaactctaaactgtggtttatcttcactactgggaagcaactgtgcatcagtattaaagatatgcagaaacataatattcactaatttgttcatctgcttctgtatattgtttatggaattacatggcaagaactgttctaaagcaacatgtctttccacattattttagaggtgaaattacttttgttttgcttctctataatgtgtacttcaaatgaaacaccatacttttttctaaaaaaagatgttcaatttactaatttttttaaatctcataatttaaaaagcatttgttgtgattttaaagtgttgcaagaaaagggattttgtggccgtgggtagactttttatactttgttttatagatggattttttttaactgtagtttgtttaagtcaccaagcagcatccaaaatcttaatgtgtttcatttgatgttgttagatcagagaagaaattggcataaaatcggttaatagtattgtcaaagaattgtgtattgtgtactcactgggaaaaaataaaatatattcacatttcaaa

SEQ ID NO: 178076 - DNA, 5919 bp, Homo sapiens
  Payload ID: 14931
  Gene Symbol: ROBO2
  Gene Name: roundabout guidance receptor 2
  Uniprot ID: Q9HCK4
  ENST ID: ENST00000487694
  CDS Start-End: 280-4464
cgctggaggagggaggcggaaggacagcgctgcgccaccacccggaggagggagcgcggtagctgcaggcaggggagggagaggaaagaaaaggaaggacggctcccagacagagagtgggagaaaccggggagcagcgggagcagcaggtccggggggagctgttccgctgcgctgccctcgttattcacacggacgctgcggagcttcccagggctgcttccctgtccccctgggtggaggctgccgtctaaacctgactccagagtttaagatgcaatggccagaagacatgaacgtgtcactagaaggatgtggacatgggctccgggactgttgatgatgactgtggtgttttggggtcatcaggggaatggacaaggccaaggatcgcgtcttcgccaggaggactttcccccgcggattgtggagcatccttccgatgtcatcgtctctaagggcgagcccacgactctgaactgcaaggcggagggccggccaacgcccaccattgagtggtacaaagatggggagcgagtggagactgacaaggacgatccccggtcccacaggatgcttctgcccagcggatccttattcttcttgcgcatcgtgcacgggcgcaggagtaaacctgatgaaggaagctacgtttgtgttgcgaggaactatcttggtgaagcagtgagtcgaaatgcgtctctggaagtggcattgttacgagatgacttccgacaaaaccccacagatgttgtagtggcagctggagagcctgcaatcctggagtgccagcctccccggggacacccagaacccaccatctactggaaaaaagacaaagttcgaattgatgacaaggaagaaagaataagtatccgtggtggaaaactgatgatctccaataccaggaaaagtgatgcagggatgtatacttgtgttggtaccaatatggtgggagaaagggacagtgacccagcagagctgactgtctttgaacgacccacatttctcaggaggccaattaaccaggtggtactggaggaagaagctgtagaatttcgttgtcaagtccaaggagatcctcaaccaactgtgaggtggaaaaaggatgatgcagacttgccaagaggaaggtatgacatcaaagacgattacacactaagaattaaaaagaccatgagtacagatgaaggcacctatatgtgtattgctgagaatcgggttggaaaaatggaagcctctgctacactcaccgtccgagctcccccacagtttgtggttcggccaagagatcagattgttgctcaaggtcgaacagtgacatttccctgtgaaactaaaggaaacccacagccagctgttttttggcagaaagaaggcagccagaacctacttttcccaaaccaaccccagcagcccaacagtagatgctcagtgtcaccaactggagacctcacaatcaccaacattcaacgttccgacgcgggttactacatctgccaggctttaactgtggcaggaagcattttagcaaaagctcaactggaggttactgatgttttgacagatagacctccacctataattctacaaggcccagccaaccaaacgctggcagtggatggtacagcgttactgaaatgtaaagccactggtgatcctcttcctgtaattagctggttaaaggagggatttacttttccgggtagagatccaagagcaacaattcaagagcaaggcacactgcagattaagaatttacggatttctgatactggcacttatacttgtgtggctacaagttcaagtggagagacttcctggagtgcagtgctggatgtgacagagtctggagcaacaatcagtaaaaactatgatttaagtgacctgccagggccaccatccaaaccgcaggtcactgatgttactaagaacagtgtcaccttgtcctggcagccaggtacccctggaacccttccagcaagtgcatatatcattgaggctttcagccaatcagtgagcaacagctggcagaccgtggcaaaccatgtaaagaccaccctctatactgtaagaggactgcggcccaatacaatctacttattcatggtcagagcgatcaacccccaaggtctcagtgacccaagtcccatgtcagatcctgtgcgcacacaagatatcagcccaccagcacaaggagtggaccacaggcaagtgcagaaagagctaggagatgtccttgtccgtcttcataatccagttgtgctgactcccaccacggttcaggtcacatggacggttgatcgccaaccccagtttatccaaggctaccgagtgatgtatcgtcagacttcaggtctgcaggcgacatcttcgtggcagaatttagatgccaaagtcccgactgaacgaagtgctgtcttagtcaacctgaaaaagggggtgacttatgaaattaaagtacggccatattttaatgagttccaaggaatggatagtgaatctaaaacggttcgtactactgaagaagccccaagtgccccaccacagtctgtcactgtactgacagttggaagctacaatagcacaagtattagtgtttcctgggatcctcctcctccagatcaccagaatggaattatccaagaatacaagatctggtgtctaggaaatgaaacgcgattccatatcaacaaaactgtggatgcagccattcggtccgtaataattggtggattattcccaggtattcaataccgggtagaggttgcagctagtaccagtgcaggggttggagtaaagagtgagccacagccaataataatcgggagacgcaatgaagttgtcattactgaaaacaataacagcataactgagcaaatcactgatgtggtgaagcaaccagcctttatagctggtattggtggtgcctgctgggtaattctgatgggttttagcatatggttgtattggcgaagaaagaagaggaagggactcagtaattatgctgttacgtttcaaagaggagatggaggactaatgagcaatggaagccgtccaggtcttctcaatgctggtgatcccagctatccatggcttgctgattcttggccagccacgagcttgccagtaaataatagcaacagtggcccaaatgagattggaaattttggccgtggagatgtgctgccaccagttccaggccaaggggataaaacagcaacgatgctctcagatggagccatttatagtagcattgacttcactaccaaaaccagttacaacagttccagccaaataacacaggctaccccatatgccacgacacagatcttgcattccaacagcatacatgaattggctgtcgatctgcctgatccacaatggaaaagctcaattcagcaaaaaacagatctgatgggatttggttattctctacctgatcagaacaaaggtaacaatggtgggaaaggtggaaaaaagaagaaaaataaaaactcttctaaaccacagaaaaacaatggatccacttgggccaatgtccctctacctccccccccagtccagccccttcctggcacggagctggaacactatgcagtggaacaacaagaaaatggctatgacagtgatagctggtgcccaccattgccagtacaaacttacttacaccaaggtctggaagatgaactggaagaagatgatgatagggtcccaacacctcctgttcgaggcgtggcttcttctcctgctatctcctttggacagcagtccactgcaactcttactccatccccacgggaagagatgcaacccatgctgcaggctcacctggatgagttgacaagagcctatcagtttgatatagcaaaacaaacatggcacattcaaagcaataatcaacctccacagcctccagttccaccgttaggttatgtgtctggagccttgatttctgatttggaaacggatgttgcagatgatgatgccgacgacgaagaggaagctttagaaatccccaggcccctgagagcactggaccagactcctggatccagcatggacaatctagacagctctgtgacaggaaaagcctttacctcctctcaaagacctcgacctaccagcccattttctactgacagtaacaccagtgcagccctgagtcaaagtcagaggcctcggcccactaaaaaacacaagggagggcggatggaccaacaaccagcattgcctcatcgaagggaaggaatgacagatgaggaggccttggtgccctatagcaagcccagtttcccatctccaggtggccacagctcatcaggaacagcttcttctaagggatccactggacctaggaaaaccgaggtgttgagagcaggccaccagcgcaatgccagcgaccttcttgacataggatatatgggctccaacagtcaaggacagtttacaggtgaattatagtaaatgagaggagacatacaaagctgctctgaaggaccatcaggtccggactcatggaagtgatgactctaaacagtgcaatgaacaatttatttatgtactattaaaagaactgtaaatgcaatgtaaagacacacagccacacatatcccacagatattttcattgtgttcttctcttaagtacaccacccaccttaactctttcttgtcaggagtatataaaaaagaaagaaaacaaaactcgccctacaggaagaaaaggattctcctctgtatataatttcttttgtgcattgctatgcaagctcactctttttagctctgctcatattattgtctgttcttattggtctgttgtactatatgtgaattaataggctgtggtgccatatattaacttttaattgtgtaacttttatgtttaaattttgcactgcaattttatttggtgataagcacaaatctctactcctcatgacatgaagaaaaagactgaatgtgaagggagtttctgtactgtaagctagattggataatgatggctgtaacaaatcatgttagatggttttcagttggggtgtagaaataggaagatgcaaaggaacaatggtgttggcaaagtcttctttgaatatcagggactgagtcaataaaaaaaatagtagaaaggtggcttttactattgacaaaagccggggtcaaaaaaagtagtttaagtcttaagactgaatatgcattaaagtatgcaggtagcaaagatgtaataaatttgcttaaaaaaagaaattaaagttttatttagaatcaattttacctgtcattgtaattgacccatctgagaattacaataagcaagaggaaattaaggtgttttgcaagagctgtatttatattacagttttttaaaaacattttctgaattatcgtaattaagctctccaactcgttaagtcagaatataatatgaagttccccaaggaaacgaacaaaatgaactctagaatatctagcaaatagttaaagaagcaatttattattagggcatactcgggctgtttccaaatataaactctattgcaatatcttatttcatctttctaatacatgtacagtgcacactagaggatagagctgcatcacttaaattcatgacttaaaaaataatacagtttatatacaacttgttttttatttgattaagaagtgaagtttacgccacccaatgtatagccaaattgtacgtgcttaaaaaacagtgccgagagtatgttcagttcgcagtaagtagatttattggaataaatattctatggtacattctcagaaattggcttccaactaaaatacgtttgacccattttgaataaggaaattgaaaagaaaaatttaaaaggagaaaaaaatgcatgtttataaactttttaaataaaaccagaccttgtaagtggacatt

SEQ ID NO: 178077 - DNA, 805 bp, Homo sapiens
  Payload ID: 14931
  Gene Symbol: ROBO2
  Gene Name: roundabout guidance receptor 2
  ENST ID: ENST00000490534
  CDS Start-End: 1-595
cagtaacaccagtgcagccctgagtcaaagtcagaggcctcggcccactaaaaaacacaagggagggcggatggaccaacaaccagcattgcctcatcgaagggaaggaatgacagatgatcttccaccaccaccagatcccccgccaggtcagggtttaaggcagcaaataggcccgagccagcaggctggtaacgtggaaaactcagcagagagaaaaggaagctctctagagagacaacatgcatccagcttagaagacacaaagagctcattggattgtccagctagaacctccctagagtggcagcgacaaacccaggaatggataagctccacagaacgacaagaagatatacggaaagccccacacaaacaaggtgtcggatcagaggaggccttggtgccctatagcaagcccagtttcccatctccaggtggccacagctcatcaggaacagcttcttctaagggatccactggacctaggaaaaccgaggtgttgagagcaggccaccagcgcaatgccagcgaccttcttgacataggatatatgggctccaacagtcaaggacagtttacaggtgaattatagtaaatgagaggagacatacaaagctgctctgaaggaccatcaggtccggactcatggaagtgatgactctaaacagtgcaatgaacaatttatttatgtactattaaaagaactgtaaatgcaatgtaaagacacacagccacacatatcccacagatattttcattgtgttcttctcttaagtacaccacccaccttaactctttcttg

SEQ ID NO: 178078 - DNA, 5393 bp, Homo sapiens
  Payload ID: 14931
  Gene Symbol: ROBO2
  Gene Name: roundabout guidance receptor 2
  ENST ID: ENST00000473767
  CDS Start-End: 57-1751
ttttgctctctgggattggtttcttaaagaatctggatcctttttaatatgtcaaaatgagtctgctgatgtttacacaactactgctctgtggatttttatatgttcgggttgatggatcgcgtcttcgccaggaggactttcccccgcggattgtggagcatccttccgatgtcatcgtctctaagggcgagcccacgactctgaactgcaaggcggagggccggccaacgcccaccattgagtggtacaaagatggggagcgagtggagactgacaaggacgatccccggtcccacaggatgcttctgcccagcggatccttattcttcttgcgcatcgtgcacgggcgcaggagtaaacctgatgaaggaagctacgtttgtgttgcgaggaactatcttggtgaagcagtgagtcgaaatgcgtctctggaagtggcattgttacgagatgacttccgacaaaaccccacagatgttgtagtggcagctggagagcctgcaatcctggagtgccagcctccccggggacacccagaacccaccatctactggaaaaaagacaaagttcgaattgatgacaaggaagaaagaataagtatccgtggtggaaaactgatgatctccaataccaggaaaagtgatgcagggatgtatacttgtgttggtaccaatatggtgggagaaagggacagtgacccagcagagctgactgtctttgaacgacccacatttctcaggaggccaattaaccaggtggtactggaggaagaagctgtagaatttcgttgtcaagtccaaggagatcctcaaccaactgtgaggtggaaaaaggatgatgcagacttgccaagaggaaggtatgacatcaaagacgattacacactaagaattaaaaagaccatgagtacagatgaaggcacctatatgtgtattgctgagaatcgggttggaaaaatggaagcctctgctacactcaccgtccgagctcccccacagtttgtggttcggccaagagatcagattgttgctcaaggtcgaacagtgacatttccctgtgaaactaaaggaaacccacagccagctgttttttggcagaaagaaggcagccagaacctacttttcccaaaccaaccccagcagcccaacagtagatgctcagtgtcaccaactggagacctcacaatcaccaacattcaacgttccgacgcgggttactacatctgccaggctttaactgtggcaggaagcattttagcaaaagctcaactggaggttactgatgttttgacagatagacctccacctataattctacaaggcccagccaaccaaacgctggcagtggatggtacagcgttactgaaatgtaaagccactggtgatcctcttcctgtaattagctggttaaaggagggatttacttttccgggtagagatccaagagcaacaattcaagagcaaggcacactgcagattaagaatttacggatttctgatactggcacttatacttgtgtggctacaagttcaagtggagagacttcctggagtgcagtgctggatgtgacagagtctggagcaacaatcagtaaaaactatgatttaagtgacctgccagggccaccatccaaaccgcaggtcactgatgttactaagaacagtgtcaccttgtcctggcagccaggtacccctggaacccttccagcaagtgcatatatcattgaggctttcagatatgtagtttagaaggctcagttataatattgcatgtggaaatgatgcaaaagaaaacacaccttgtaacaggaaaatgtattggcataatttactctgtagtccatttattctttctacaggttaattcttttcaagccaatcagtgagcaacagctggcagaccgtggcaaaccatgtaaagaccaccctctatactgtaagaggactgcggcccaatacaatctacttattcatggtcagagcgatcaacccccaaggtctcagtgacccaagtcccatgtcagatcctgtgcgcacacaagatatcagcccaccagcacaaggagtggaccacaggcaagtgcagaaagagctaggagatgtccttgtccgtcttcataatccagttgtgctgactcccaccacggttcaggtcacatggacggttgatcgccaaccccagtttatccaaggctaccgagtgatgtatcgtcagacttcaggtctgcaggcgacatcttcgtggcagaatttagatgccaaagtcccgactgaacgaagtgctgtcttagtcaacctgaaaaagggggtgacttatgaaattaaagtacggccatattttaatgagttccaaggaatggatagtgaatctaaaacggttcgtactactgaagaagccccaagtgccccaccacagtctgtcactgtactgacagttggaagctacaatagcacaagtattagtgtttcctgggatcctcctcctccagatcaccagaatggaattatccaagaatacaagatctggtgtctaggaaatgaaacgcgattccatatcaacaaaactgtggatgcagccattcggtccgtaataattggtggattattcccaggtattcaataccgggtagaggttgcagctagtaccagtgcaggggttggagtaaagagtgagccacagccaataataatcgggagacgcaatgaagttgtcattactgaaaacaataacagcataactgagcaaatcactgatgtggtgaagcaaccagcctttatagctggtattggtggtgcctgctgggtaattctgatgggttttagcatatggttgtattggcgaagaaagaagaggaagggactcagtaattatgctgttacgtttcaaagaggagatggaggactaatgagcaatggaagccgtccaggtcttctcaatgctggtgatcccagctatccatggcttgctgattcttggccagccacgagcttgccagtaaataatagcaacagtggcccaaatgagattggaaattttggccgtggagatgtgctgccaccagttccaggccaaggggataaaacagcaacgatgctctcagatggagccatttatagtagcattgacttcactaccaaaaccagttacaacagttccagccaaataacacaggctaccccatatgccacgacacagatcttgcattccaacagcatacatgaattggctgtcgatctgcctgatccacaatggaaaagctcaattcagcaaaaaacagatctgatgggatttggttattctctacctgatcagaacaaaggtaacaatggtgggaaaggtggaaaaaagaagaaaaataaaaactcttctaaaccacagaaaaacaatggatccacttgggccaatgtccctctacctccccccccagtccagccccttcctggcacggagctggaacactatgcagtggaacaacaagaaaatggctatgacagtgatagctggtgcccaccattgccagtacaaacttacttacaccaaggtctggaagatgaactggaagaagatgatgatagggtcccaacacctcctgttcgaggcgtggcttcttctcctgctatctcctttggacagcagtccactgcaactcttactccatccccacgggaagagatgcaacccatgctgcaggctcacctggatgagttgacaagagcctatcagtttgatatagcaaaacaaacatggcacattcaaagcaataatcaacctccacagcctccagttccaccgttaggttatgtgtctggagccttgatttctgatttggaaacggatgttgcagatgatgatgccgacgacgaagaggaagctttagaaatccccaggcccctgagagcactggaccagactcctggatccagcatggacaatctagacagctctgtgacaggaaaagcctttacctcctctcaaagacctcgacctaccagcccattttctactgacagtaacaccagtgcagccctgagtcaaagtcagaggcctcggcccactaaaaaacacaagggagggcggatggaccaacaaccagcattgcctcatcgaagggaaggaatgacagatgaggaggccttggtgccctatagcaagcccagtttcccatctccaggtggccacagctcatcaggaacagcttcttctaagggatccactggacctaggaaaaccgaggtgttgagagcaggccaccagcgcaatgccagcgaccttcttgacataggatatatgggctccaacagtcaaggacagtttacaggtgaattatagtaaatgagaggagacatacaaagctgctctgaaggaccatcaggtccggactcatggaagtgatgactctaaacagtgcaatgaacaatttatttatgtactattaaaagaactgtaaatgcaatgtaaagacacacagccacacatatcccacagatattttcattgtgttcttctcttaagtacaccacccaccttaactctttcttgtcaggagtatataaaaaagaaagaaaacaaaactcgccctacaggaagaaaaggattctcctctgtatataatttcttttgtgcattgctatgcaagctcactctttttagctctgctcatattattgtctgttcttattggtctgttgtactatatgtgaattaataggctgtggtgccatatattaacttttaattgtgtaacttttatgtttaaattttgcactgcaattttatttggtgataagcacaaatctctactcctcatgacatgaagaaaaagactgaatgtgaagggagtttctgtactgtaagctagattggataatgatggctgtaacaaatcatgttagatggttttcagttggggtgtagaaataggaagatgcaaaggaacaatggtgttggcaaagtcttctttgaatatcagggactgagtcaataaaaaaaatagtagaaaggtggcttttactattgacaaaagccggggtcaaaaaaagtagtttaagtcttaagactgaatatgcattaaagtatgcaggtagcaaagatgtaataaatttgcttaaaaaaagaaattaaagttttatttagaatcaattttacctgtcattgtaattgacccatctgagaattacaataagcaagaggaaattaaggtgttttgcaagagctgtatttatattacagttttttaaaaacattttctgaattatcgtaattaagctctccaactcgttaagtcagaatataatatgaagttccccaaggaaacgaacaaaatgaactctagaatatctagcaaatagttaaagaagcaatttattattagggcatactcgggctgtttc

SEQ ID NO: 178079 - DNA, 642 bp, Homo sapiens
  Payload ID: 14931
  Gene Symbol: ROBO2
  Gene Name: roundabout guidance receptor 2
  ENST ID: ENST00000471893
  CDS Start-End: 1-642
ttcttggccagccacgagcttgccagtaaataatagcaacagtggcccaaatgagattggaaattttggccgtggagatgtgctgccaccagttccaggccaaggggataaaacagcaacgatgctctcagatggagccatttatagtagcattgacttcactaccaaaaccagttacaacagttccagccaaataacacaggctaccccatatgccacgacacagatcttgcattccaacagcatacatgaattggctgtcgatctgcctgatccacaatggaaaagctcaattcagcaaaaaacagatctgatgggatttggttattctctacctgatcagaacaaaggtaacaatgccttactttacattcctgactaccgattggctgagggattgtctaatagaatgccacacaaccagtctcaggatttcagcaccaccagctctcacaacagctcagaaaggagtggcagtctctcaggtgggaaaggtggaaaaaagaagaaaaataaaaactcttctaaaccacagaaaaacaatggatccacttgggccaatgtccctctacctccccccccagtccagccccttcctggcacggagctggaacactatgcagtggaacaacaagaaaatgg

SEQ ID NO: 178080 - DNA, 1431 bp, Homo sapiens
  Payload ID: 14931
  Gene Symbol: ROBO2
  Gene Name: roundabout guidance receptor 2
  ENST ID: ENST00000490991
  CDS Start-End: 1-1028
acaataacagcataactgagcaaatcactgatgtggtgaagcaaccagcctttatagctggtattggtggtgcctgctgggtaattctgatgggttttagcatatggttgtattggcgaagaaagaagaggaagggactcagtaattatgctgttacgtttcaaagaggagatggaggactaatgagcaatggaagccgtccaggtcttctcaatgctggtgatcccagctatccatggcttgctgattcttggccagccacgagcttgccagtaaataatagcaacagtggcccaaatgagattggaaattttggccgtggagatgtgctgccaccagttccaggccaaggggataaaacagcaacgatgctctcagatggagccatttatagtagcattgacttcactaccaaaaccagttacaacagttccagccaaataacacaggctaccccatatgccacgacacagatcttgcattccaacagcatacatgaattggctgtcgatctgcctgatccacaatggaaaagctcaattcagcaaaaaacagatctgatgggatttggttattctctacctgatcagaacaaaggtaacaatggtgggaaaggtggaaaaaagaagaaaaataaaaactcttctaaaccacagaaaaacaatggatccacttgggccaatgtccctctacctccccccccagtccagccccttcctggcacggagctggaacactatgcagtggaacaacaagaaaatggctatgacagtgatagctggtgcccaccattgccagtacaaacttacttacaccaaggtctggaagatgaactggaagaagatgatgatagggtcccaacacctcctgttcgaggcgtggcttcttctcctgctatctcctttggacagcagtccactgcaactcttactccatccccacgggaagagatgcaacccatgctgcaggctcacctggatgagttgacaagagcctatcagtttgatatagcaaaacaaacatggtaaatatcttcattaagtcaagagacccatgctttcaacacatggaaatttttttcagaataaattcacaagagattctgatagaactacacagctagggttaaaagtgattttgtatgactccttaatcatttagataaatgtatccactgagaaatgttaaataatttggccaaaactagaactagaactagaactagaactggaactggagctgtaactgtaactgtaactagaactagaactaaaactagaactagagcaagaattcaaatctgctgtatttcaggctaaagtgctcttggctacaccagaatcttttctaatttatggtttatcttcaattagcttatcattgaactcacatcccatgatgtaataaaagactccttttagattcctcaaa

SEQ ID NO: 178081 - DNA, 686 bp, Homo sapiens
  Payload ID: 14931
  Gene Symbol: ROBO2
  Gene Name: roundabout guidance receptor 2
  ENST ID: ENST00000475334
  CDS Start-End: 1-625
ggatgagttgacaagagcctatcagtttgatatagcaaaacaaacatggcacattcaaagcaataatcaacctccacagcctccagttccaccgttaggttatgtgtctggagccttgatttctgatttggaaacggatgttgcagatgatgatgccgacgacgaagaggaagctttagaaatccccaggcccctgagagcactggaccagactcctggatccagcatggacaatctagacagctctgtgacaggaaaagcctttacctcctctcaaagacctcgacctaccagcccattttctactgacagtaacaccagtgcagccctgagtcaaagtcagaggcctcggcccactaaaaaacacaagggagggcggatggaccaacaaccagcattgcctcatcgaagggaaggaatgacagatgaggaggccttggtgccctatagcaagcccagtttcccatctccaggtggccacagctcatcaggaacagcttcttctaagggatccactggacctaggaaaaccgaggtgttgagagcaggccaccagcgcaatgccagcgaccttcttgacataggatatatgggctccaacagtcaaggacagtttacagagtaaatgagaggagacatacaaagctgctctgaaggaccatcaggtccggactcatggaagtgat

SEQ ID NO: 178082 - DNA, 3382 bp, Homo sapiens
  Payload ID: 14931
  Gene Symbol: ROBO2
  Gene Name: roundabout guidance receptor 2
  ENST ID: ENST00000602589
  CDS Start-End: 173-3382
agacagagagtgggagaaaccggggagcagcgggagcagcaggtccggggggagctgttccgctgcgctgccctcgttattcacacggacgctgcggagcttcccagggctgcttccctgtccccctgggtggaggctgccgtctaaacctgactccagagtttaagatgcaatggccagaagacatgaacgtgtcactagaaggatgtggacatgggctccgggactgttgatgatgactgtggtgttttggggtcatcaggggaatggacaaggccaaggatcgcgtcttcgccaggaggactttcccccgcggattgtggagcatccttccgatgtcatcgtctctaagggcgagcccacgactctgaactgcaaggcggagggccggccaacgcccaccattgagtggtacaaagatggggagcgagtggagactgacaaggacgatccccggtcccacaggatgcttctgcccagcggatccttattcttcttgcgcatcgtgcacgggcgcaggagtaaacctgatgaaggaagctacgtttgtgttgcgaggaactatcttggtgaagcagtgagtcgaaatgcgtctctggaagtggcattgttacgagatgacttccgacaaaaccccacagatgttgtagtggcagctggagagcctgcaatcctggagtgccagcctccccggggacacccagaacccaccatctactggaaaaaagacaaagttcgaattgatgacaaggaagaaagaataagtatccgtggtggaaaactgatgatctccaataccaggaaaagtgatgcagggatgtatacttgtgttggtaccaatatggtgggagaaagggacagtgacccagcagagctgactgtctttgaacgacccacatttctcaggaggccaattaaccaggtggtactggaggaagaagctgtagaatttcgttgtcaagtccaaggagatcctcaaccaactgtgaggtggaaaaaggatgatgcagacttgccaagaggaaggtatgacatcaaagacgattacacactaagaattaaaaagaccatgagtacagatgaaggcacctatatgtgtattgctgagaatcgggttggaaaaatggaagcctctgctacactcaccgtccgagctcgccctgttgctcccccacagtttgtggttcggccaagagatcagattgttgctcaaggtcgaacagtgacatttccctgtgaaactaaaggaaacccacagccagctgttttttggcagaaagaaggcagccagaacctacttttcccaaaccaaccccagcagcccaacagtagatgctcagtgtcaccaactggagacctcacaatcaccaacattcaacgttccgacgcgggttactacatctgccaggctttaactgtggcaggaagcattttagcaaaagctcaactggaggttactgatgttttgacagatagacctccacctataattctacaaggcccagccaaccaaacgctggcagtggatggtacagcgttactgaaatgtaaagccactggtgatcctcttcctgtaattagctggttaaaggagggatttacttttccgggtagagatccaagagcaacaattcaagagcaaggcacactgcagattaagaatttacggatttctgatactggcacttatacttgtgtggctacaagttcaagtggagagacttcctggagtgcagtgctggatgtgacagagtctggagcaacaatcagtaaaaactatgatttaagtgacctgccagggccaccatccaaaccgcaggtcactgatgttactaagaacagtgtcaccttgtcctggcagccaggtacccctggaacccttccagcaagtgcatatatcattgaggctttcagccaatcagtgagcaacagctggcagaccgtggcaaaccatgtaaagaccaccctctatactgtaagaggactgcggcccaatacaatctacttattcatggtcagagcgatcaacccccaaggtctcagtgacccaagtcccatgtcagatcctgtgcgcacacaagatatcagcccaccagcacaaggagtggaccacaggcaagtgcagaaagagctaggagatgtccttgtccgtcttcataatccagttgtgctgactcccaccacggttcaggtcacatggacggttgatcgccaaccccagtttatccaaggctaccgagtgatgtatcgtcagacttcaggtctgcaggcgacatcttcgtggcagaatttagatgccaaagtcccgactgaacgaagtgctgtcttagtcaacctgaaaaagggggtgacttatgaaattaaagtacggccatattttaatgagttccaaggaatggatagtgaatctaaaacggttcgtactactgaagaagccccaagtgccccaccacagtctgtcactgtactgacagttggaagctacaatagcacaagtattagtgtttcctgggatcctcctcctccagatcaccagaatggaattatccaagaatacaagatctggtgtctaggaaatgaaacgcgattccatatcaacaaaactgtggatgcagccattcggtccgtaataattggtggattattcccaggtattcaataccgggtagaggttgcagctagtaccagtgcaggggttggagtaaagagtgagccacagccaataataatcgggagacgcaatgaagttgtcattactgaaaacaataacagcataactgagcaaatcactgatgtggtgaagcaaccagcctttatagctggtattggtggtgcctgctgggtaattctgatgggttttagcatatggttgtattggcgaagaaagaagaggaagggactcagtaattatgctgttacgtttcaaagaggagatggaggactaatgagcaatggaagccgtccaggtcttctcaatgctggtgatcccagctatccatggcttgctgattcttggccagccacgagcttgccagtaaataatagcaacagtggcccaaatgagattggaaattttggccgtggagatgtgctgccaccagttccaggccaaggggataaaacagcaacgatgctctcagatggagccatttatagtagcattgacttcactaccaaaaccagttacaacagttccagccaaataacacaggctaccccatatgccacgacacagatcttgcattccaacagcatacatgaattggctgtcgatctgcctgatccacaatggaaaagctcaattcagcaaaaaacagatctgatgggatttggttattctctacctgatcagaacaaaggtaacaatggtgggaaaggtgga

SEQ ID NO: 178083 - DNA, 7662 bp, Homo sapiens
  Payload ID: 14931
  Gene Symbol: ROBO2
  Gene Name: roundabout guidance receptor 2
  ENST ID: ENST00000614793
  CDS Start-End: 1-3753
tcagtgttacgagatgacttccgacaaaaccccacagatgttgtagtggcagctggagagcctgcaatcctggagtgccagcctccccggggacacccagaacccaccatctactggaaaaaagacaaagttcgaattgatgacaaggaagaaagaataagtatccgtggtggaaaactgatgatctccaataccaggaaaagtgatgcagggatgtatacttgtgttggtaccaatatggtgggagaaagggacagtgacccagcagagctgactgtctttgaacgacccacatttctcaggaggccaattaaccaggtggtactggaggaagaagctgtagaatttcgttgtcaagtccaaggagatcctcaaccaactgtgaggtggaaaaaggatgatgcagacttgccaagaggaaggtatgacatcaaagacgattacacactaagaattaaaaagaccatgagtacagatgaaggcacctatatgtgtattgctgagaatcgggttggaaaaatggaagcctctgctacactcaccgtccgagctcccccacagtttgtggttcggccaagagatcagattgttgctcaaggtcgaacagtgacatttccctgtgaaactaaaggaaacccacagccagctgttttttggcagaaagaaggcagccagaacctacttttcccaaaccaaccccagcagcccaacagtagatgctcagtgtcaccaactggagacctcacaatcaccaacattcaacgttccgacgcgggttactacatctgccaggctttaactgtggcaggaagcattttagcaaaagctcaactggaggttactgatgttttgacagatagacctccacctataattctacaaggcccagccaaccaaacgctggcagtggatggtacagcgttactgaaatgtaaagccactggtgatcctcttcctgtaattagctggttaaaggagggatttacttttccgggtagagatccaagagcaacaattcaagagcaaggcacactgcagattaagaatttacggatttctgatactggcacttatacttgtgtggctacaagttcaagtggagagacttcctggagtgcagtgctggatgtgacagagtctggagcaacaatcagtaaaaactatgatttaagtgacctgccagggccaccatccaaaccgcaggtcactgatgttactaagaacagtgtcaccttgtcctggcagccaggtacccctggaacccttccagcaagtgcatatatcattgaggctttcagccaatcagtgagcaacagctggcagaccgtggcaaaccatgtaaagaccaccctctatactgtaagaggactgcggcccaatacaatctacttattcatggtcagagcgatcaacccccaaggtctcagtgacccaagtcccatgtcagatcctgtgcgcacacaagatatcagcccaccagcacaaggagtggaccacaggcaagtgcagaaagagctaggagatgtccttgtccgtcttcataatccagttgtgctgactcccaccacggttcaggtcacatggacggttgatcgccaaccccagtttatccaaggctaccgagtgatgtatcgtcagacttcaggtctgcaggcgacatcttcgtggcagaatttagatgccaaagtcccgactgaacgaagtgctgtcttagtcaacctgaaaaagggggtgacttatgaaattaaagtacggccatattttaatgagttccaaggaatggatagtgaatctaaaacggttcgtactactgaagaagccccaagtgccccaccacagtctgtcactgtactgacagttggaagctacaatagcacaagtattagtgtttcctgggatcctcctcctccagatcaccagaatggaattatccaagaatacaagatctggtgtctaggaaatgaaacgcgattccatatcaacaaaactgtggatgcagccattcggtccgtaataattggtggattattcccaggtattcaataccgggtagaggttgcagctagtaccagtgcaggggttggagtaaagagtgagccacagccaataataatcgggagacgcaatgaagttgtcattactgaaaacaataacagcataactgagcaaatcactgatgtggtgaagcaaccagcctttatagctggtattggtggtgcctgctgggtaattctgatgggttttagcatatggttgtattggcgaagaaagaagaggaagggactcagtaattatgctgttacgtttcaaagaggagatggaggactaatgagcaatggaagccgtccaggtcttctcaatgctggtgatcccagctatccatggcttgctgattcttggccagccacgagcttgccagtaaataatagcaacagtggcccaaatgagattggaaattttggccgtggagatgtgctgccaccagttccaggccaaggggataaaacagcaacgatgctctcagatggagccatttatagtagcattgacttcactaccaaaaccagttacaacagttccagccaaataacacaggctaccccatatgccacgacacagatcttgcattccaacagcatacatgaattggctgtcgatctgcctgatccacaatggaaaagctcaattcagcaaaaaacagatctgatgggatttggttattctctacctgatcagaacaaaggtaacaatggtgggaaaggtggaaaaaagaagaaaaataaaaactcttctaaaccacagaaaaacaatggatccacttgggccaatgtccctctacctccccccccagtccagccccttcctggcacggagctggaacactatgcagtggaacaacaagaaaatggctatgacagtgatagctggtgcccaccattgccagtacaaacttacttacaccaaggtctggaagatgaactggaagaagatgatgatagggtcccaacacctcctgttcgaggcgtggcttcttctcctgctatctcctttggacagcagtccactgcaactcttactccatccccacgggaagagatgcaacccatgctgcaggctcacctggatgagttgacaagagcctatcagtttgatatagcaaaacaaacatggcacattcaaagcaataatcaacctccacagcctccagttccaccgttaggttatgtgtctggagccttgatttctgatttggaaacggatgttgcagatgatgatgccgacgacgaagaggaagctttagaaatccccaggcccctgagagcactggaccagactcctggatccagcatggacaatctagacagctctgtgacaggaaaagcctttacctcctctcaaagacctcgacctaccagcccattttctactgacagtaacaccagtgcagccctgagtcaaagtcagaggcctcggcccactaaaaaacacaagggagggcggatggaccaacaaccagcattgcctcatcgaagggaaggaatgacagatgaggaggccttggtgccctatagcaagcccagtttcccatctccaggtggccacagctcatcaggaacagcttcttctaagggatccactggacctaggaaaaccgaggtgttgagagcaggccaccagcgcaatgccagcgaccttcttgacataggatatatgggctccaacagtcaaggacagtttacaggtgaattatagtaaatgagaggagacatacaaagctgctctgaaggaccatcaggtccggactcatggaagtgatgactctaaacagtgcaatgaacaatttatttatgtactattaaaagaactgtaaatgcaatgtaaagacacacagccacacatatcccacagatattttcattgtgttcttctcttaagtacaccacccaccttaactctttcttgtcaggagtatataaaaaagaaagaaaacaaaactcgccctacaggaagaaaaggattctcctctgtatataatttcttttgtgcattgctatgcaagctcactctttttagctctgctcatattattgtctgttcttattggtctgttgtactatatgtgaattaataggctgtggtgccatatattaacttttaattgtgtaacttttatgtttaaattttgcactgcaattttatttggtgataagcacaaatctctactcctcatgacatgaagaaaaagactgaatgtgaagggagtttctgtactgtaagctagattggataatgatggctgtaacaaatcatgttagatggttttcagttggggtgtagaaataggaagatgcaaaggaacaatggtgttggcaaagtcttctttgaatatcagggactgagtcaataaaaaaaatagtagaaaggtggcttttactattgacaaaagccggggtcaaaaaaagtagtttaagtcttaagactgaatatgcattaaagtatgcaggtagcaaagatgtaataaatttgcttaaaaaaagaaattaaagttttatttagaatcaattttacctgtcattgtaattgacccatctgagaattacaataagcaagaggaaattaaggtgttttgcaagagctgtatttatattacagttttttaaaaacattttctgaattatcgtaattaagctctccaactcgttaagtcagaatataatatgaagttccccaaggaaacgaacaaaatgaactctagaatatctagcaaatagttaaagaagcaatttattattagggcatactcgggctgtttccaaatataaactctattgcaatatcttatttcatctttctaatacatgtacagtgcacactagaggatagagctgcatcacttaaattcatgacttaaaaaataatacagtttatatacaacttgttttttatttgattaagaagtgaagtttacgccacccaatgtatagccaaattgtacgtgcttaaaaaacagtgccgagagtatgttcagttcgcagtaagtagatttattggaataaatattctatggtacattctcagaaattggcttccaactaaaatacgtttgacccattttgaataaggaaattgaaaagaaaaatttaaaaggagaaaaaaatgcatgtttataaactttttaaataaaaccagaccttgtaagtggacattaataattgtcctgcctcatttgttttcacgactttgacaacaagaagttcctgaacattagtcatgtatgctcagaataaatgtgactttgaaatatatgttagctactgtacatgtatagtcagtcaagtagaagaggaccttcctgaaattcccacttgtgacattttcccatgggtttcctacacaatcttaaattttatttctgtctatactttctcaaatttttcctatgataagttcagttgttggtactcttctaaaaatattcaacgtgattaggatcagttctaaaatacgggacccctttgagtgacaattcgcactccatgcattattggctcagtagccaatttttgtcacgtcgttataacaaggagatgacataattaaacatttccatcctttctattccctgagactgcatcagcacaggcaagtatagaatgtaatgttcttcatgggccccaccagctttttggtgccatgtaatttatttcttcgctgaagagaaaaagaattctgagacacagttattaaaccctttatcaactttctaccatcagtgcctgaattctaatgcagtgtgatttctctgggacaaagagactgaggaagatgaaaagtttcttcaaagagtgaatacatacttattcacaactctaggatgtgaggactttaaatatctctttatgaagttccctgcctaacctctttctatttaaaggcaaacaaatttcgaagaggttttgtgttccctctttatgtttctctatgacccagtttagtctaaaaccttagttcattacatatacaacacatagcctttgatccctggtaactggcaggtgttggtgattaataaaccaaggcttcaaagtgaagtatgtgtgtgcagatgacttttggaataacgtgggcatagcatcataccttcctgattgtcttcagcatataaaaattaactgttgtagttaaaattatgtcagtgcagagcttgtggttacttggaatgttctttcagaatagtccatgttgcctattaaacctagttttaaacacattgggcagtcaatttatgcacccaaaatatcaccctcaggtagattgagggcaagataaaatgctgtatgtagctatacaaaggaattcagaaacattactggaaagcaaagcctttgtcagcttgctactgacaaagtagtaaaaagctactaatcagtgttgagtcagatgtcaacagaaaaatacaaatacctatgagagccacagcagtttctcgtttcatagccgattcaatgaatatgattagaaattcactgagctcactcttgcaggtttaaatggaggcctgcataaggactgcaagaggaaatctgggtgggagagaatgtaatctgatcttgcactcataggcaatgctgcaatgcaatcatgtccaatacaagcacagcttcattcataacaggaaacgtcttctttgggaaaatagctctattggtgcccaaactcaggtatgccagtgtatgcaggtggagtcgccctacccctcttccaaacatgtcctgtgagatttttaaaataagatgggatagtacaggggcatgaaaagaattgattccttcacaggatttgaatccagttcaagggagaatgtagaaaattcaaaaccaacatataaggtatcacacaaccaagaaaagtaaaaccattgcaagtttacttgcgttgagtacaaaacagatttaatggtgttctatgtcatagtttaatgctctgggtatttaaatatgttttcaacaggatttgagttgaaagtttgtaatgtgctttgatggaacacctctcaatttctattcaataaacttatgtaattgtccattgacaatataatgataacagtaccattgaactctaaactgtggtttatcttcactactgggaagcaactgtgcatcagtattaaagatatgcagaaacataatattcactaatttgttcatctgcttctgtatattgtttatggaattacatggcaagaactgttctaaagcaacatgtctttccacattattttagaggtgaaattacttttgttttgcttctctataatgtgtacttcaaatgaaacaccatacttttttctaaaaaaagatgttcaatttactaatttttttaaatctcataatttaaaaagcatttgttgtgattttaaagtgttgcaagaaaagggattttgtggccgtgggtagactttttatactttgttttatagatggattttttttaactgtagtttgtttaagtcaccaagcagcatccaaaatcttaatgtgtttcatttgatgttgttagatcagagaagaaattggcataaaatcggttaatagtattgtcaaagaattgtgtattgtgtactcactgggaaaaaataaaatatattcacatttcaaa

SEQ ID NO: 178084 - DNA, 4569 bp, Homo sapiens
  Payload ID: 14932
  Gene Symbol: ROBO3
  Gene Name: roundabout guidance receptor 3
  Uniprot ID: Q96MS0
  ENST ID: ENST00000397801
  CDS Start-End: 193-4353
ggagagaaggacgagggaaggaggagggcacgaagaggcaccgaccgtacccaggcgcaccggcaggagagcggcaccgtggctgccgcagcgcgcagaggctgtggaggggcttacggctcccagcccacgggtctcagacccaggggctgggcccccagcccccagtcccgatcccagctgggtcgagccatgctgcgctacctgctgaaaacgctgctgcagatgaacttgttcgcggactctctggccggggacatctccaactccagcgagctgctcttgggcttcaactcctcgctggcggcgctcaaccacaccctgctgcctcccggcgatccctctctcaacgggtcaagggtaggaccggaggacgctatgccccgcatcgtggagcagccgccagatctgctggtctcccgaggcgagcccgccacgttgccctgccgcgctgaaggccgaccccgacccaacattgagtggtacaagaacggggcgcgtgtggccactgtgcgggaggatccgcgtgcgcaccgcctgctgctgcccagcggcgccctcttcttcccgcgcatcgtgcacgggcgccgcgcgcggccggacgaaggtgtctacacttgcgtggctcgcaactacctgggggcagcagcgagcagaaacgcctcgctggaagtggcagtcctccgtgatgatttccggcagtctcctggaaacgtggtggtggcagtgggggagccagcagtactggaatgcgtgcccccccgcggccacccggagccttccgtgtcctggaggaaggacggtgcaagactcaaggaagaggaaggaaggatcacgatccgtggagggaagctgatgatgtcacatacactcaagagcgatgcaggcatgtatgtgtgcgtagcctccaacatggcgggagaacgggagagtgcggcagctgaagtcatggtactggagcgtccctcattcctgcgcagaccagtgaatcaggtggtcctggctgatgcccctgtgactttcctatgtgaggtgaagggggatcccccacctcgtctacgctggcgcaaggaggatggggaactgcccacaggcaggtatgagatccggagtgaccacagcctttggattgggcatgtgagtgccgaagatgagggaacgtacacctgtgtggcggagaacagtgtgggccgcgctgaagcatctggctccctcagtgttcacgtcccaccccagttggtgacccagccccaggaccagatggcagctcctggagagagcgtggctttccagtgcgagaccaaaggaaaccccccacctgccatcttctggcagaaggaggggagtcaggtcctgcttttccccagtcagtcacttcagccgacggggcgcttctcagtgtctccaagaggccaacttaacatcaccgcggtgcagcgtggggatgctgggtactacgtgtgccaggctgtcagtgtggctggcagcatcctggccaaggccctgctggagataaaaggagcctctttggatgggctgcctcctgtcatcctccagggaccagccaatcagacgctggtgcttggctcctccgtgtggctgccctgcagagtgactgggaaccctcaacccagtgtccgatggaagaaggatgggcagtggctgcagggggatgacctccagttcaagacaatggccaacggtaccctgtacatcgccaatgtgcaggagatggacatgggcttctacagctgcgtggccaagagttccacaggggaagccacatggagcggctggcttaagatgcgggaagactggggagtatcaccagacccccctacagaacccagttcccctccgggggctccctctcagccagtggtcactgagatcaccaagaacagcattaccctgacctggaagcccaacccacaaactggggctgcagtcacgtcttatgtgatagaggccttcagcccagcagctggcaacacatggcgtactgtggcagatggcgtgcagctggagacacacacagtcagcggtctgcagcccaataccatctacctgtttctggttcgagcagtgggagcctggggcctcagtgagcccagccccgtctctgagcctgtccgtacacaggatagcagcccctctaggccagtggaggacccatggagaggccagcagggactggcggaagtggctgtgcgcctgcaggagcccatagtcctgggaccccggaccctgcaggtgtcctggactgtggatggcccagtccagctggtgcaaggtttccgggtgtcttggagggtagcaggccctgagggaggaagctggacaatgttggacctacagtccccaagccagcaaagtactgtgctaagaggactccctccagggacccaaatccagatcaaggtgcaagcccaaggccaggaggggctgggggctgaaagcctctctgtgaccaggagcattcctgaggaggcccccagtggccccccacagggagtggcggtggccttggggggtgatggcaacagcagtatcactgtgtcctgggaacctccactcccctcccagcaaaatggggtcatcacggaataccagatctggtgcctgggcaatgagagccgctttcacctcaatcgatctgcagcaggctgggcacgctccgcaatgctccgaggactggtgcccggtctcctctatcgaaccctggtcgcggcggccaccagcgcaggcgtgggcgtgcccagtgccccagtgctggtgcagctgccgtccccgccggacctggagcccgggctggaggtgggcgcggggctggcggtgcggctggcgagggtgctgcgggagcccgccttcctcgcgggcagcggcgcagcctgcggggcgctgcttctcgggctctgcgccgccctctactggcgccggaaacagcgcaaagagctcagccactacacggcctcttttgcctacacaccggcagtgtccttcccgcactcagagggcctctctggagccagttccaggccacccatgggccttggccccgccccctactcatggctggcagattcgtggccccacccatctcgaagcccctcggcccaggaacccaggggaagctgctgccctagcaatcctgacccggacgacagatattacaacgaagcgggaatctccctgtatctagctcagacggccaggggcacggccgcccctggcgagggtcctgtctatagcaccattgacccagcgggggaggagctgcagaccttccatgggggcttcccccaacatccctcaggagatctgggtccctggagccagtacgctcctccagagtggagccagggggacagtggagccaagggaggcaaagtgaagcttctggggaaacctgtgcagatgccctctctgaactggccagaagccctgcccccacctcctccttcttgtgaactgagctgcctagaagggccggaggaggagctggagggcagctcagagccagaggagtggtgcccgccaatgcctgagagaagtcacctgacggagcccagctccagtggagggtgcctggtcaccccatcccgaagggaaaccccctctcccacaccttcctatggacagcagtccacagccactcttacaccctcacctcctgaccctccccagcccccaactgacatgccccatctccatcagatgcccaggagggtgccccttgggccgagttcccctctcagtgtatcccagcccatgctgggcatccgtgaagcgaggcctgctggcttgggtgctggccctgcagcctcaccccacctcagccccagtcctgcccctagcacagccagcagtgccccaggcagaacctggcaggggaatggggagatgactcccccacttcaaggaccccgtgctcgattccggaagaaacccaaggctcttccctacaggagggagaacagtcctggggacttgcccccaccacccttgccaccgccagaggaagaggcgagctgggccctagagctgagggcagcaggcagcatgtcctccctggagcgggagcgcagtggggagaggaaagcggtccaggccgtgcccctggcagcccagcgggtgctccacccagatgaagaggcctggctcccatacagcagaccaagcttcctgtcccggggccagggcaccagcacatgttccacggccggcagcaactcttccaggggctccagcagctctaggggctcccggggccctggccggagccggagtcggagtcagagccggagccagagccaaaggccaggacagaaacgccgagaggaaccaagatgacccttgttggggcattgagaatatcatgagtgccacggggaaggggagtagggatgtcttttcccccccagcagtgatgagtggggctagctgaagcccattggtttccacgatttcaattggctgagaaggcagagagctagctcctccctttctttctttttccacctgagacttgtttataaaaaacaaaacaataaaaagagtctgatcaga

SEQ ID NO: 178085 - DNA, 1520 bp, Homo sapiens
  Payload ID: 14932
  Gene Symbol: ROBO3
  Gene Name: roundabout guidance receptor 3
  ENST ID: ENST00000543966
  CDS Start-End: 858-1307
ggagggagcatggccacctcccaccccaacaccaccgccactgtcctgaaactcccgaatatcgccacctccctttcctttgctggcctcttcaggctctccgtccccaacgctcacctgctctccctcaggccacccatgggccttggccccgccccctactcatggctggcagattcgtggccccacccatctcgaagcccctcggcccaggaacccaggggaagctgctgccctagcaatcctgacccggacgacagatattacaacgaagcgggaatctccctgtatctagctcagacggccaggggcacggccgcccctggcgagggtcctgtctatagcaccattgacccagcgggggaggagctgcagaccttccatgggggcttcccccaacatccctcaggagatctgggtccctggagccagtacgctcctccagagtggagccagggggacagtgctcagagccagaggagtggtgcccgccaatgcctgagagaagtcacctgacggagcccagctccagtggagggtgcctggtcaccccatcccgaagggaaaccccctctcccacaccttcctatggacagcagtccacagccactcttacaccctcacctcctgaccctccccagcccccaactgacatgccccatctccatcagatgcccaggagggtgccccttgggccgagttcccctctcagtgtatcccagcccatgctgggcatccgtgaagcgaggcctgctggcttgggtgctggccctgcagcctcaccccacctcagccccagtcctgcccctagcacagccagcagtgccccaggcagaacctggcaggggaatggggagatgactcccccacttcaaggaccccgtgctcgattccggaagaaacccaaggctcttccctacaggagggagaacagtcctggggacttgcccccaccacccttgccaccgccagaggaagaggcgagctgggccctagagctgagggcagcaggcagcatgtcctccctggagcgggagcgcagtggggagaggaaagcggtccaggccgtgcccctggcagcccagcgggtgctccacccagatgaagaggcctggctcccatacagcagaccaagcttcctgtcccggggccagggcaccagcacatgttccacggccggcagcaactcttccaggggctccagcagctctaggggctcccggggccctggccggagccggagtcggagtcagagccggagccagagccaaaggccaggacagaaacgccgagaggaaccaagatgacccttgttggggcattgagaatatcatgagtgccacggggaaggggagtagggatgtcttttcccccccagcagtgatgagtggggctagctgaagcccattggtttccacgatttcaattggctgagaaggcagagagctagctcctccctttctttctttttccacctgagacttgtttataaaaaacaaaacaataaaaagagtctgatc

SEQ ID NO: 178086 - DNA, 4551 bp, Homo sapiens
  Payload ID: 14932
  Gene Symbol: ROBO3
  Gene Name: roundabout guidance receptor 3
  ENST ID: ENST00000538940
  CDS Start-End: 241-4335
tcgccaagcgtggttcagccactcccgcttaaacttggcaggagaggagacggaggtctctaggtggtccagaaagccggcctagaagtttgtgtcccgatccctctactaaccggcctgtctgtaggcatcttcctttgagacgaggaacgcggaacgtctgccaataaggacatattggatcctgcagagggagagggtaggcaggtggggactgagctccgcagagaagcataggagatggaacgaccagaggattctctttccctctggagcctcaatctctccccacaatttccctgtctgaacgctctgcgccaccccctgtccccagggtcaagggtaggaccggaggacgctatgccccgcatcgtggagcagccgccagatctgctggtctcccgaggcgagcccgccacgttgccctgccgcgctgaaggccgaccccgacccaacattgagtggtacaagaacggggcgcgtgtggccactgtgcgggaggatccgcgtgcgcaccgcctgctgctgcccagcggcgccctcttcttcccgcgcatcgtgcacgggcgccgcgcgcggccggacgaaggtgtctacacttgcgtggctcgcaactacctgggggcagcagcgagcagaaacgcctcgctggaagtggcagtcctccgtgatgatttccggcagtctcctggaaacgtggtggtggcagtgggggagccagcagtactggaatgcgtgcccccccgcggccacccggagccttccgtgtcctggaggaaggacggtgcaagactcaaggaagaggaaggaaggatcacgatccgtggagggaagctgatgatgtcacatacactcaagagcgatgcaggcatgtatgtgtgcgtagcctccaacatggcgggagaacgggagagtgcggcagctgaagtcatggtactggagcgtccctcattcctgcgcagaccagtgaatcaggtggtcctggctgatgcccctgtgactttcctatgtgaggtgaagggggatcccccacctcgtctacgctggcgcaaggaggatggggaactgcccacaggcaggtatgagatccggagtgaccacagcctttggattgggcatgtgagtgccgaagatgagggaacgtacacctgtgtggcggagaacagtgtgggccgcgctgaagcatctggctccctcagtgttcacgtcccaccccagttggtgacccagccccaggaccagatggcagctcctggagagagcgtggctttccagtgcgagaccaaaggaaaccccccacctgccatcttctggcagaaggaggggagtcaggtcctgcttttccccagtcagtcacttcagccgacggggcgcttctcagtgtctccaagaggccaacttaacatcaccgcggtgcagcgtggggatgctgggtactacgtgtgccaggctgtcagtgtggctggcagcatcctggccaaggccctgctggagataaaaggagcctctttggatgggctgcctcctgtcatcctccagggaccagccaatcagacgctggtgcttggctcctccgtgtggctgccctgcagagtgactgggaaccctcaacccagtgtccgatggaagaaggatgggcagtggctgcagggggatgacctccagttcaagacaatggccaacggtaccctgtacatcgccaatgtgcaggagatggacatgggcttctacagctgcgtggccaagagttccacaggggaagccacatggagcggctggcttaagatgcgggaagactggggagtatcaccagacccccctacagaacccagttcccctccgggggctccctctcagccagtggtcactgagatcaccaagaacagcattaccctgacctggaagcccaacccacaaactggggctgcagtcacgtcttatgtgatagaggccttcagcccagcagctggcaacacatggcgtactgtggcagatggcgtgcagctggagacacacacagtcagcggtctgcagcccaataccatctacctgtttctggttcgagcagtgggagcctggggcctcagtgagcccagccccgtctctgagcctgtccgtacacaggatagcagcccctctaggccagtggaggacccatggagaggccagcagggactggcggaagtggctgtgcgcctgcaggagcccatagtcctgggaccccggaccctgcaggtgtcctggactgtggatggcccagtccagctggtgcaaggtttccgggtgtcttggagggtagcaggccctgagggaggaagctggacaatgttggacctacagtccccaagccagcaaagtactgtgctaagaggactccctccagggacccaaatccagatcaaggtgcaagcccaaggccaggaggggctgggggctgaaagcctctctgtgaccaggagcattcctgaggaggcccccagtggccccccacagggagtggcggtggccttggggggtgatggcaacagcagtatcactgtgtcctgggaacctccactcccctcccagcaaaatggggtcatcacggaataccagatctggtgcctgggcaatgagagccgctttcacctcaatcgatctgcagcaggctgggcacgctccgcaatgctccgaggactggtgcccggtctcctctatcgaaccctggtcgcggcggccaccagcgcaggcgtgggcgtgcccagtgccccagtgctggtgcagctgccgtccccgccggacctggagcccgggctggaggtgggcgcggggctggcggtgcggctggcgagggtgctgcgggagcccgccttcctcgcgggcagcggcgcagcctgcggggcgctgcttctcgggctctgcgccgccctctactggcgccggaaacagcgcaaagagctcagccactacacggcctcttttgcctacacaccggcagtgtccttcccgcactcagagggcctctctggagccagttccaggccacccatgggccttggccccgccccctactcatggctggcagattcgtggccccacccatctcgaagcccctcggcccaggaacccaggggaagctgctgccctagcaatcctgacccggacgacagatattacaacgaagcgggaatctccctgtatctagctcagacggccaggggcacggccgcccctggcgagggtcctgtctatagcaccattgacccagcgggggaggagctgcagaccttccatgggggcttcccccaacatccctcaggagatctgggtccctggagccagtacgctcctccagagtggagccagggggacagtggagccaagggaggcaaagtgaagcttctggggaaacctgtgcagatgccctctctgaactggccagaagccctgcccccacctcctccttcttgtgaactgagctgcctagaagggccggaggaggagctggagggcagctcagagccagaggagtggtgcccgccaatgcctgagagaagtcacctgacggagcccagctccagtggagggtgcctggtcaccccatcccgaagggaaaccccctctcccacaccttcctatggacagcagtccacagccactcttacaccctcacctcctgaccctccccagcccccaactgacatgccccatctccatcagatgcccaggagggtgccccttgggccgagttcccctctcagtgtatcccagcccatgctgggcatccgtgaagcgaggcctgctggcttgggtgctggccctgcagcctcaccccacctcagccccagtcctgcccctagcacagccagcagtgccccaggcagaacctggcaggggaatggggagatgactcccccacttcaaggaccccgtgctcgattccggaagaaacccaaggctcttccctacaggagggagaacagtcctggggacttgcccccaccacccttgccaccgccagaggaagaggcgagctgggccctagagctgagggcagcaggcagcatgtcctccctggagcgggagcgcagtggggagaggaaagcggtccaggccgtgcccctggcagcccagcgggtgctccacccagatgaagaggcctggctcccatacagcagaccaagcttcctgtcccggggccagggcaccagcacatgttccacggccggcagcaactcttccaggggctccagcagctctaggggctcccggggccctggccggagccggagtcggagtcagagccggagccagagccaaaggccaggacagaaacgccgagaggaaccaagatgacccttgttggggcattgagaatatcatgagtgccacggggaaggggagtagggatgtcttttcccccccagcagtgatgagtggggctagctgaagcccattggtttccacgatttcaattggctgagaaggcagagagctagctcctccctttctttctttttccacctgagacttgtttataaaaaacaaaacaataaaaagagtctgatcaga

SEQ ID NO: 178087 - DNA, 4710 bp, Homo sapiens
  Payload ID: 14933
  Gene Symbol: ROBO4
  Gene Name: roundabout guidance receptor 4
  Uniprot ID: Q8WZ75
  ENST ID: ENST00000306534
  CDS Start-End: 487-3510
acttcactcagcctccccagcctgcagccccactgccctctgtcttcagcttcttgctgtgtcctgagactcctggggttttcactcttctctagcaggtgtcaaagggataaggattgggatccagggataagatttaaatagaggattaaggctctgatcggagttttggttagtgtaaggataccctgtaagaaatccccgagtagatcatgagataaagcttagcgctgaagttagggtcgggggttatagctaaatggtcgaggtcagagagtttctcgcctctggtctcctcccagttctccaaggcactgagggccaggcaggaagcatcggtttcctcaaagccgcttccctcctggggcagagtctcggtcacaaacaaccaccaccggcccaccccgcccctccttccctcttcactgtgagctcagagcagcaggacaaagtgctcgggacaaggacatagggctgagagtagccatgggctctggaggagacagcctcctggggggcaggggttccctgcctctgctgctcctgctcatcatgggaggcatggctcaggactccccgccccagatcctagtccacccccaggaccagctgttccagggccctggccctgccaggatgagctgccaagcctcaggccagccacctcccaccatccgctggttgctgaatgggcagcccctgagcatggtgcccccagacccacaccacctcctgcctgatgggacccttctgctgctacagccccctgcccggggacatgcccacgatggccaggccctgtccacagacctgggtgtctacacatgtgaggccagcaaccggcttggcacggcagtcagcagaggcgctcggctgtctgtggctgtcctccgggaggatttccagatccagcctcgggacatggtggctgtggtgggtgagcagtttactctggaatgtgggccgccctggggccacccagagcccacagtctcatggtggaaagatgggaaacccctggccctccagcccggaaggcacacagtgtccggggggtccctgctgatggcaagagcagagaagagtgacgaagggacctacatgtgtgtggccaccaacagcgcaggacatagggagagccgcgcagcccgggtttccatccaggagccccaggactacacggagcctgtggagcttctggctgtgcgaattcagctggaaaatgtgacactgctgaacccggatcctgcagagggccccaagcctagaccggcggtgtggctcagctggaaggtcagtggccctgctgcgcctgcccaatcttacacggccttgttcaggacccagactgccccgggaggccagggagctccgtgggcagaggagctgctggccggctggcagagcgcagagcttggaggcctccactggggccaagactacgagttcaaagtgagaccatcctctggccgggctcgaggccctgacagcaacgtgctgctcctgaggctgccggaaaaagtgcccagtgccccacctcaggaagtgactctaaagcctggcaatggcactgtctttgtgagctgggtcccaccacctgctgaaaaccacaatggcatcatccgtggctaccaggtctggagcctgggcaacacatcactgccaccagccaactggactgtagttggtgagcagacccagctggaaatcgccacccatatgccaggctcctactgcgtgcaagtggctgcagtcactggtgctggagctggggagcccagtagacctgtctgcctccttttagagcaggccatggagcgagccacccaagaacccagtgagcatggtccctggaccctggagcagctgagggctaccttgaagcggcctgaggtcattgccacctgcggtgttgcactctggctgctgcttctgggcaccgccgtgtgtatccaccgccggcgccgagctagggtgcacctgggcccaggtctgtacagatataccagtgaggatgccatcctaaaacacaggatggatcacagtgactcccagtggttggcagacacttggcgttccacctctggctctcgggacctgagcagcagcagcagcctcagcagtcggctgggggcggatgcccgggacccactagactgtcgtcgctccttgctctcctgggactcccgaagccccggcgtgcccctgcttccagacaccagcactttttatggctccctcatcgctgagctgccctccagtaccccagccaggccaagtccccaggtcccagctgtcaggcgcctcccaccccagctggcccagctctccagcccctgttccagctcagacagcctctgcagccgcaggggactctcttctccccgcttgtctctggcccctgcagaggcttggaaggccaaaaagaagcaggagctgcagcatgccaacagttccccactgctccggggcagccactccttggagctccgggcctgtgagttaggaaatagaggttccaagaacctttcccaaagcccaggagctgtgccccaagctctggttgcctggcgggccctgggaccgaaactcctcagctcctcaaatgagctggttactcgtcatctccctccagcacccctctttcctcatgaaactcccccaactcagagtcaacagacccagcctccggtggcaccacaggctccctcctccatcctgctgccagcagcccccatccccatccttagcccctgcagtccccctagcccccaggcctcttccctctctggccccagcccagcttccagtcgcctgtccagctcctcactgtcatccctgggggaggatcaagacagcgtgctgacccctgaggaggtagccctgtgcttggaactcagtgagggtgaggagactcccaggaacagcgtctctcccatgccaagggctccttcaccccccaccacctatgggtacatcagcgtcccaacagcctcagagttcacggacatgggcaggactggaggaggggtggggcccaaggggggagtcttgctgtgcccacctcggccctgcctcacccccacccccagcgagggctccttagccaatggttggggctcagcctctgaggacaatgccgccagcgccagagccagccttgtcagctcctccgatggctccttcctcgctgatgctcactttgcccgggccctggcagtggctgtggatagctttggtttcggtctagagcccagggaggcagactgcgtcttcatagatgcctcatcacctccctccccacgggatgagatcttcctgacccccaacctctccctgcccctgtgggagtggaggccagactggttggaagacatggaggtcagccacacccagcggctgggaagggggatgcctccctggccccctgactctcagatctcttcccagagaagtcagctccactgtcgtatgcccaaggctggtgcttctcctgtagattactcctgaaccgtgtccctgagacttcccagacgggaatcagaaccacttctcctgtccacccacaagacctgggctgtggtgtgtgggtcttggcctgtgtttctctgcagctggggtccaccttcccaagcctccagagagttctccctccacgattgtgaaaacaaatgaaaacaaaattagagcaaagctgacctggagccctcagggagcaaaacatcatctccacctgactcctagccactgctttctcctctgtgccatccactcccaccaccaggttgttttggcctgaggagcagccctgcctgctgctcttcccccaccatttggatcacaggaagtggaggagccagaggtgcctttgtggaggacagcagtggctgctgggagagggctgtggaggaaggagcttctcggagccccctctcagccttacctgggcccctcctctagagaagagctcaactctctcccaacctcaccatggaaagaaaataattatgaatgccactgaggcactgaggccctacctcatgccaaacaaagggttcaaggctgggtctagcgaggatgctgaaggaagggaggtatgagaccgtaggtcaaaagcaccatcctcgtactgttgtcactatgagcttaagaaatttgataccataaaatggtaaagacttgagttctgtgagatcattccccggagcaccatttttaggggagcacctggagagatggcaagaatttcctgagttaggcagggatcaggcattcattgacactcagggagtgtcacacatttctgttctgcaattaaagggagaatgaggttcatccaccaaattttaagcagaatataggaagggcaggggtggggagtttcagggtctgctggtcctggcaacttatattaaatccacctcctcaagataagccttagggatatttatggctgagggaagtgggatggtctaaggcatggggaagggtgattggctgtggggaaaatgaagtaataggttcattctgcccaagtgtacttggggttcatggcatttcataaggacatttgtgtagaaaattgttttgctggctgggcacggtggctcacgcctgtaatcccagcactttgggaggcggaggtaggcagatcatgaggtcaggagatcgagaccatcctggctaacatggtgaaaccccgtctctact

SEQ ID NO: 178088 - DNA, 3071 bp, Homo sapiens
  Payload ID: 14933
  Gene Symbol: ROBO4
  Gene Name: roundabout guidance receptor 4
  ENST ID: ENST00000533054
  CDS Start-End: 303-2891
cttccctcttcactgtgagctcagagcagcaggacaaagtgctcgggacaaggacatagggctgagagtagccatgggctctggaggagacagcctcctggggggcaggggttccctgcctctgctgctcctgctcatcatggccccctgcccggggacatgcccacgatggccaggccctgtccacagacctgggtgtctacacatgtgaggccagcaaccggcttggcacggcagtcagcagaggcgctcggctgtctgtggctgtcctccgggaggatttccagatccagcctcgggacatggtggctgtggtgggtgagcagtttactctggaatgtgggccgccctggggccacccagagcccacagtctcatggtggaaagatgggaaacccctggccctccagcccggaaggcacacagtgtccggggggtccctgctgatggcaagagcagagaagagtgacgaagggacctacatgtgtgtggccaccaacagcgcaggacatagggagagccgcgcagcccgggtttccatccaggagccccaggactacacggagcctgtggagcttctggctgtgcgaattcagctggaaaatgtgacactgctgaacccggatcctgcagagggccccaagcctagaccggcggtgtggctcagctggaaggtcagtggccctgctgcgcctgcccaatcttacacggccttgttcaggacccagactgccccgggaggccagggagctccgtgggcagaggagctgctggccggctggcagagcgcagagcttggaggcctccactggggccaagactacgagttcaaagtgagaccatcctctggccgggctcgaggccctgacagcaacgtgctgctcctgaggctgccggaaaaagtgcccagtgccccacctcaggaagtgactctaaagcctggcaatggcactgtctttgtgagctgggtcccaccacctgctgaaaaccacaatggcatcatccgtggctaccaggtctggagcctgggcaacacatcactgccaccagccaactggactgtagttggtgagcagacccagctggaaatcgccacccatatgccaggctcctactgcgtgcaagtggctgcagtcactggtgctggagctggggagcccagtagacctgtctgcctccttttagagcaggccatggagcgagccacccaagaacccagtgagcatggtccctggaccctggagcagctgagggctaccttgaagcggcctgaggtcattgccacctgcggtgttgcactctggctgctgcttctgggcaccgccgtgtgtatccaccgccggcgccgagctagggtgcacctgggcccaggtctgtacagatataccagtgaggatgccatcctaaaacacaggatggatcacagtgactcccagtggttggcagacacttggcgttccacctctggctctcgggacctgagcagcagcagcagcctcagcagtcggctgggggcggatgcccgggacccactagactgtcgtcgctccttgctctcctgggactcccgaagccccggcgtgcccctgcttccagacaccagcactttttatggctccctcatcgctgagctgccctccagtaccccagccaggccaagtccccaggtcccagctgtcaggcgcctcccaccccagctggcccagctctccagcccctgttccagctcagacagcctctgcagccgcaggggactctcttctccccgcttgtctctggcccctgcagaggcttggaaggccaaaaagaagcaggagctgcagcatgccaacagttccccactgctccggggcagccactccttggagctccgggcctgtgagttaggaaatagaggttccaagaacctttcccaaagcccaggagctgtgccccaagctctggttgcctggcgggccctgggaccgaaactcctcagctcctcaaatgagctggttactcgtcatctccctccagcacccctctttcctcatgaaactcccccaactcagagtcaacagacccagcctccggtggcaccacaggctccctcctccatcctgctgccagcagcccccatccccatccttagcccctgcagtccccctagcccccaggcctcttccctctctggccccagcccagcttccagtcgcctgtccagctcctcactgtcatccctgggggaggatcaagacagcgtgctgacccctgaggaggtagccctgtgcttggaactcagtgagggtgaggagactcccaggaacagcgtctctcccatgccaagggctccttcaccccccaccacctatgggtacatcagcgtcccaacagcctcagagttcacggacatgggcaggactggaggaggggtggggcccaaggggggagtcttgctgtgcccacctcggccctgcctcacccccacccccagcgagggctccttagccaatggttggggctcagcctctgaggacaatgccgccagcgccagagccagccttgtcagctcctccgatggctccttcctcgctgatgctcactttgcccgggccctggcagtggctgtggatagctttggtttcggtctagagcccagggaggcagactgcgtcttcatagatgcctcatcacctccctccccacgggatgagatcttcctgacccccaacctctccctgcccctgtgggagtggaggccagactggttggaagacatggaggtcagccacacccagcggctgggaagggggatgcctccctggccccctgactctcagatctcttcccagagaagtcagctccactgtcgtatgcccaaggctggtgcttctcctgtagattactcctgaaccgtgtccctgagacttcccagacgggaatcagaaccacttctcctgtccacccacaagacctgggctgtggtgtgtgggtcttggcctgtgtttctctgcagctggggtccaccttcccaagcctccagagagttctccctccacgattgtgaaaacaaatgaaaacaaaattagagc

SEQ ID NO: 178089 - DNA, 670 bp, Homo sapiens
  Payload ID: 14934
  Gene Symbol:
  Gene Name: RP11-1012A1.4
  ENST ID: ENST00000553306
  CDS Start-End: 1-356
caaggatagtaaatgtgtcttccctcgcacatcacctgggaaggatccacttccataacctgcagggcgagaaattctacaatgcaggcctggcctactgtcacagcaagctagccaacatcctcttcacccaggaactggcccggagactaaaaggctctggcgttacgacgtattctgtacaccctggcacagtccaatctgaactggttcggcactcatctttcatgagatggatgtggtggcttttctcctttttcatcaagactcctcagcagggagcccagaccagcctgcactgtgccttaacagaaggtcttgagattctaagtgggaatcatttcaggggagattagtaatttttaggtattaaagatacactcaaccaaagggacagaatgggaaaggctgaaaggggaatgaataacgttctcatcgttcaagtcattgccggtgccacacccagagaaaaacaagcaccacaccagacagcctctcagcaagccgaaagaaaagaagaaattgatcagggattttgatgaaaagcaacaggaagcaaatgaaacgctggcagagatggaggaggagctacgttatgcacccctgtctttccgaaaccccatgatgtctaagcttcgaaactaccggaaggaccttgctaaactccatc

SEQ ID NO: 178090 - DNA, 274 bp, Homo sapiens
  Payload ID: 14934
  Gene Symbol:
  Gene Name: RP11-1012A1.4
  ENST ID: ENST00000557564
  CDS Start-End: 1-274
caaggatagtaaatgtgtcttccctcgcacatcacctgggaaggatccacttccataacctgcagggcgagaaattctacaatgcaggcctggcctactgtcacagcaagctagccaacatcctcttcacccaggaactggcccggagactaaaagaagaaaagaagaaattgatcagggattttgatgaaaagcaacaggaagcaaatgaaacgctggcagagatggaggaggagctacgttatgcacccctgtctttccgaaaccccatgat

SEQ ID NO: 178091 - DNA, 378 bp, Homo sapiens
  Payload ID: 14935
  Gene Symbol:
  Gene Name: RP11-101E3.5
  ENST ID: ENST00000482796
  CDS Start-End: 57-378
acaagagcaagcagaacctctctgaccgctcgcgccaggcctacactttccacctcatggaggcctctggcaccacctggagcccggagaactggagcagtagagaactgtggactattctgcttggaaggtcagctctgagagagctgagtcagattgaggcagaactgaataaacattggcggcgattgttagaggggctttcttactacaaacctcccagtccaagttcagctgaaaaagtgaaagctaataaagatgtagcttcaccattgaaggaactgggtttaagaatcagcaagtttttgggtcttgatgaagaacagagtgtgcagttactccagtgttacctgcaagaggactacaggggtactcggg

SEQ ID NO: 178092 - DNA, 498 bp, Homo sapiens
  Payload ID: 14936
  Gene Symbol:
  Gene Name: RP11-1021N1.1
  ENST ID: ENST00000568766
  CDS Start-End: 145-498
aatcgctccggagcttctggagggggcagatgcaggtgccggctgctgcagtgcagtagctgctggaggctggggaggcccggacccggtgcaggaagacgccgaccacgcgggctcctgatcgcgggcgcccacagcgcggacatggcgggctggtggccggcgttgtcgcgcgcggcccggcgccacccgtggcccaccaacgtgctgctttacggctcgctcgtctcggccggggacgcgctgcaacagcggctgcagggccgcgaggccaactggcgccagacgcggcgcgtggccacgttggtggtgaccttccacgccaacttcaactacgtgtggctgcgcctgctggagcgcgcgctcccgggccgagcgccgcacgccctgctggccaagttgctgtgcgaccaggtggtcggtgcgcccatcgcggtctcggccttctatgtcgatcagctggacatcatctccatggcggagacaaccatgatgcca

SEQ ID NO: 178093 - DNA, 476 bp, Homo sapiens
  Payload ID: 14936
  Gene Symbol:
  Gene Name: RP11-1021N1.1
  ENST ID: ENST00000567442
  CDS Start-End: 1-293
ccaccaacgtgctgctttacggctcgctcgtctcggccggggacgcgctgcaacagcggctgcagggccgcgaggccaactggcgccagacgcggcgcgtggccacgttggtggtgaccttccacgccaacttcaactacgtgtggctgcgcctgctggagcgcgcgctcccgggccgagcgccgcacgccctgctggccaagttgctgtgcgaccaggtggtcggtgcgcccatcgcggtctcggccttctatgtcgggtctcactctattccccaggctgaagtgcagtgatgtgatcacagctcattgcagcctcgacctcctgggctcaagcgatcctcccacctctgcctctggagtagctgggactacaggtatgagcattctccaaggaaaggatgacatatttttggacctgaaacagaaattctggaatacctatctgatcagctggacatcatctccatggcggag

SEQ ID NO: 178094 - DNA, 652 bp, Homo sapiens
  Payload ID: 14936
  Gene Symbol:
  Gene Name: RP11-1021N1.1
  ENST ID: ENST00000568222
  CDS Start-End: 1-362
ccaccaacgtgctgctttacggctcgctcgtctcggccggggacgcgctgcaacagcggctgcagggccgcgaggccaactggcgccagacgcggcgcgtggccacgttggtggtgaccttccacgccaacttcaactacgtgtggctgcgcctgctggagcgcgcgctcccgggccgagcgccgcacgccctgctggccaagttgctgtgcgaccaggtggtcggtgcgcccatcgcggtctcggccttctatgtcgagttatcacctgcccctctgtctccctacccagcccccaagcctcccctccaagcctccactgcgcatgtgccgtgcatccctgccccttctgggtacccgtaggcgctcccgggcgctggcggcggcggaggagagggagcagcgtcacgggcgcccggcccgttaaaacgctgctggctggagccacctccctccctgcagcccgcaacgggaatggagtaaagggagacccgtcgacctggccacggggatcagcgatggaattaaagcaatctttgtccacccatctggaagccgagaagcctctgaggcgctatggggcggtggaggagacggcttggaaaacggagagactggggagaaatcagctggacatcatctccatggcggag

SEQ ID NO: 178095 - DNA, 652 bp, Homo sapiens; identical to SEQ ID NO: 178094
  Payload ID: 14936
  Gene Symbol:
  Gene Name: RP11-1021N1.1
  ENST ID: ENST00000634007
  CDS Start-End: 1-362

SEQ ID NO: 178096 - DNA, 476 bp, Homo sapiens; identical to SEQ ID NO: 178093
  Payload ID: 14936
  Gene Symbol:
  Gene Name: RP11-1021N1.1
  ENST ID: ENST00000633358
  CDS Start-End: 1-293

SEQ ID NO: 178097 - DNA, 498 bp, Homo sapiens; identical to SEQ ID NO: 178092
  Payload ID: 14936
  Gene Symbol:
  Gene Name: RP11-1021N1.1
  ENST ID: ENST00000633491
  CDS Start-End: 145-498

SEQ ID NO: 178098 - DNA, 764 bp, Homo sapiens
  Payload ID: 14937
  Gene Symbol:
  Gene Name: RP11-1035H13.3
  ENST ID: ENST00000567078
  CDS Start-End: 54-764
gaggactcgttggggaggtggcctgcgcttgtagagactgcatccccgagacgatggcggagggagataatcgcagcaccaacctgctggctgcagagactgcaagtctggaagaacagctgcaaggatggggagaagtgatgctgatggctgataaagtcctccgatgggaaagagcctggtttccacctgccatcatgggtgtggtttctttggtgtttctgattatctactatctagatccatctgttctgtccggcgtttcctgttttgttatgtttttgtgcttggctgactaccttgttcccattctagcgcctagaatttttggctccaataaatggaccactgaacaacagcaaagattccatgaaatttgcagcaatctagtaaaaactcgacgcagagctgtgggttggtggaaacgcctcttcacactaaaggaagaaaaacctaagatgtacttcatgaccatgatcgtttcccttgctgcggttgcttgggtgggacaacaagtccacaacctgcttctcacctacctgatagccacaatggtgcgcatgaatgtcctggcagatgctctcaagagtatcaacaatgccgaaaagagaggcaaacgccaggtgcttattaggccgtgctccaaagtcatcgtccggtttctcactgtgatgatgaagcatggttacattggcgaatttgaaatcattgatgaccacagagctgggaaaattgttgtgaacctcacaggcaggctaaacaag

SEQ ID NO: 178099 - DNA, 4374 bp, Homo sapiens
  Payload ID: 14938
  Gene Symbol:
  Gene Name: RP11-106M3.2
  ENST ID: ENST00000379915
  CDS Start-End: 10-693
cagcgggccatgacaagctccaggctttggttttcgctgctgctggcggcagcgttcgcaggacgggcgacggccctctggccctggcctcagaacttccaaacctccgaccagcgctacgtcctttacccgaacaactttcaattccagtacgatgtcagctcggccgcgcagcccggctgctcagtcctcgacgaggccttccagcgctatcgtgacctgcttttcggttccgggtcttggccccgtccttacctcacagggaaacggcatacactggagaagaatgtgttggttgtctctgtagtcacacctggatgtaaccagcttcctactttggagtcagtggagaattataccctgaccataaatgatgaccagtgtttactcctctctgagactgtctggggagctctccgaggtacccctgagcagaaggctctggtgattggtggagaggcttgtatgtggggagaatatgtggacaacacaaacctggtccccaggctctggcccagagcaggggctgttgccgaaaggctgtggagcaacaagttgacatctgacctgacatttgcctatgaacgtttgtcacacttccgctgtgaattgctgaggctgcaagggagacgaatgtgtctgaggctcaggggtaagaaagtggttaaagacaccgaagacagagatgtgtgatggggcggggtgggattggctccgagggactggctcgatagtgggaatagagaagaggaatccccatccacccccgcaggaaacgcaccagcgtttggaggtgtgtgtgcctgcgtgtgcctgcgtttgcctgtgtgtgcctgtgtgtgcggtggggattagccccgactccggcagacaccatcacgcatgacgaagctgcttcccctcacgcggcccaaggcgcacacgcgcgatccacggccacgcccgcacacactcgacacacacagggcattcgagggtccggttgccatggcgagcaggagcgcgtgagcccagccgccccccccgcccccggcgagcccagtcaactcccactctgattggcggctgcttcctcattatgcaaatcatttgcgtagactcggcggccagctgcctgacgtcaccaagcacgggggctggggctcggggctcggctctgggagagctcgggcgggagcccagagagagccgcacggggacctcaagccagaccccagcgttcagccgccacctcggcccgggcccgccccgccccggccccgcccctttcctgcccgccccaccccctctacgcccctccacccggaccccgccccctgggcagccccccgccctctccgcccgggctccgccccctccccctggccctcgccaccggtccagggaggggacggcgggacaggcgggaccagtgggaccggcgggagggctgacagggcggggacatggccgcggcgccgggagggtcagcgcagcccgctggccccggcccgcgcctgggtttcagcaccgcggacagcggcgtcggcatgagcgggctaaaccccggtcccgccgtacccatgaaggaccacgacgccatcaagctcttcgtggggcagatcccgcggggcttggacgagcaggacctcaagccgctgttcgaggagttcggccgcatctacgagctgacggtgctgaaggaccggctcaccggcctccacaaaggctgtgccttcctcacctactgcgcccgggactctgctctcaaggcccagagtgcactgcacgagcagaagaccctgccagggatgaatcgtccgatccaagtgaagccagctgccagtgagggccgaggagaggaccgaaagctgtttgtggggatgctgggcaagcagcagggtgaggaggacgtcagacgcctgttccagccctttggccacatcgaggagtgcacggtcctgcggagtcctgacggcaccagtaaagggcgcctcgtccagcctcgtggtcaagctggcggacaccgaccgggagcgcgcgctgcggcggatgcagcagatggccggccacctgggcgccttccaccccgcgccactgccgctaggggcctgcggcgcctacaccacggcgatcctgcagcaccaggcggccctgctggcggcggcacagggcccaggcctaggcccggtggcggcagtggcggcccagatgcaacacgtggcggcctttagcctggtagctgcgcctctgttgcccgcggcagcagccaactccccgcctggcagcggccctggcaccctcccaggtcttccggcgcccatcggggtcaatggattcggccctctgaccccccagaccaatggccagccgggctccgacacgctctacaataacgggctctccccttatccagcccagagccccggcgtggctgaccccctgcagcaggcctacgctgggatgcaccactacgcaggccccgaaggctgtaacctcttcatctatcacctgcctcaggagtttggtgatgcggaactcatacagacattcctgccctttggagccgttgtctctgctaaagtctttgtggatcgagccaccaaccagagcaagtgttttgggtttgttagttttgacaatccaactagtgcccagactgctattcaggcgatgaatggctttcaaattggcatgaagaggctcaaggtccagctaaagcggcccaaggatgccaaccggccttactgacctgctttcactgaccagccacagaaagaaacagaagagtgagaagaaaggagaggaaaagcacagaaacgcttgagcagcccttcccgaaggagcagctgcggacggaggtggatcggacccaaggctggtgcctggggctaaggccactctaaggattgtttttatcaagtgggttgttctgtgcctgcagcatagagcgcaggctggcagagcaaatagggctggtgaggagtgactgtccaggggaaccagcagagggcgttgggggtgccaagggcttctccgcaagggaagcccagatttacttctttcaaaatcatatcattccttagagtttagggaccaaaggactattgcttttttaagaatatatatatctatataaattaaaacaaagaaacaaacaaacaaaaaacaagacaaacaactacaaaaaaagacagtatagagtctcataaaagctgcctttaaatatccctaggagacagggtgaaggagacccttgacagccccagcctaggcagatgggggctgtggaaagattgttctgtgtctcattccctcttaagccactcccccaccctgcccttttaaaaataattaaggatttgaggtctaggctcacatgcaggtaatgagaacgttatggaagcagtgaacccacaatccacaatccccaaactcagagtgcatcccagaagaggccccaggcagagctcaggttggccctggcctttgccatcccgggaggccccctagccagcaagagtgggattgcctttcctgtggaaccactgcttccccaggcgggaagaaagagggagttctggccacctgagcctttcccttgccaatccaggtagacagaggccctgcctttggctgagctgagacacctcctgtttcccttccccttgaaccagtcccagtgtccccttgctccaggctaccttctgtctcttagtctaagtttgcccacctgtaaagtagattcaggatatctgtagagggctgtgacaacagacttggaaggtttgctactgtatatactgccattgagaaggggaaatttttcaatatgtagaagcttcagaattagaggtccctctttaccccagacctgggagggaagtagatgttttgccaaaatacttcttcattcctttaaaaactacatctttcctatgcaagagtgtctcacatgtgcttaaccgaggtgcttctagttggtgagcagtgttgagcttagaagtggtgtgtgctctgtctgtctgtctttgtctgtctgttgtatacagtgggtgccatataaagctgatcaatggtggtgcttcctgcctgcttctgtgagatgggcaaaagattcagcttagaacaccatgactcaccttgccttggtcagcctttcctgggcctgtagggccttgcacatatttttcccaggaggatttcccctccaccccacaggcatggatcagcttggtctgaggccccagctgtgtggggtccctctaatccccagatgttgctgaggctgaaggcctctgatctgataacatgtcagatagtaaaagatgtgggggtgggggtggagggctcctccttcataacagtttctaagaaaacttgttcccacctgtt

SEQ ID NO: 178100 - DNA, 1902 bp, Homo sapiens
  Payload ID: 14939
  Gene Symbol:
  Gene Name: RP11-106M3.5
  ENST ID: ENST00000569547
  CDS Start-End: 73-1518
accggtccagggaggggacggcgggacaggcgggaccagtgggaccggcgggagggctgacagggcggggacatggccgcggcgccgggagggtcagcgcagcccgctggccccggcccgcgcctgggtttcagcaccgcggacagcggcgtcggcatgagcgggctaaaccccggtcccgccgtacccatgaaggaccacgacgccatcaagctcttcgtggggcagatcccgcggggcttggacgagcaggacctcaagccgctgttcgaggagttcggccgcatctacgagctgacggtgctgaaggaccggctcaccggcctccacaaaggctgtgccttcctcacctactgcgcccgggactctgctctcaaggcccagagtgcactgcacgagcagaagaccctgccagggatgaatcgtccgatccaagtgaagccagctgccagtgagggccgaggagaggaccgaaagctgtttgtggggatgctgggcaagcagcagggtgaggaggacgtcagacgcctgttccagccctttggccacatcgaggagtgcacggtcctgcggagtcctgacggcaccagtaaaggctgtgcctttgtgaagttcgggagtcaaggggaagctcaggcggccatccggggtctgcacggcagccggaccatggcgggcgcctcgtccagcctcgtggtcaagctggcggacaccgaccgggagcgcgcgctgcggcggatgcagcagatggccggccacctgggcgccttccaccccgcgccactgccgctaggggcctgcggcgcctacaccacggcgatcctgcagcaccaggcggccctgctggcggcggcacagggcccaggcctaggcccggtggcggcagtggcggcccagatgcaacacgtggcggcctttagcctggtagctgcgcctctgttgcccgcggcagcagccaactccccgcctggcagcggccctggcaccctcccaggtcttccggcgcccatcggggtcaatggattcggccctctgaccccccagaccaatggccagccgggctccgacacgctctacaataacgggctctccccttatccagcccagagccccggcgtggctgaccccctgcagcaggcctacgctgggatgcaccactacgcagcagcctatccgtcggcctatgccccagtgagcacagcttttccccagcagccttcagccctgccccagcagcagagagaaggccccgaaggctgtaacctcttcatctatcacctgcctcaggagtttggtgatgcggaactcatacagacattcctgccctttggagccgttgtctctgctaaagtctttgtggatcgagccaccaaccagagcaagtgttttgggtttgttagttttgacaatccaactagtgcccagactgctattcaggcgatgaatggctttcaaattggcatgaagaggctcaaggtccagctaaagcggcccaaggatgccaaccggccttactgacctgctttcactgaccagccacagaaagatcagcacttgactgtttattttcaaatctcacgaacctcaccccaagatcttcacattctggatctcagctgctcttgaaggacagtgacttgttaccaccgcaacagcagagcctgccatccccaacagatcaccagttgtccctgacatcgtgccctaccttgtctccctttgtggtctcctaaatgcccatctcgttggccttggttcggctagtggtatggaggggtgctgcctagcactgacctgagagtgtgtgtgacccactgacccaatggacatcaaaggccagttctggaatgatgacgactcggagggagataatgaatcagaggaatttctctatggcgttca

SEQ ID NO: 178101 - DNA, 5183 bp, Homo sapiens
  Payload ID: 14940
  Gene Symbol:
  Gene Name: RP11-1070B7.1
  ENST ID: ENST00000611424
  CDS Start-End: 4-5106
agaatgacttccgctcagtgcccggcactagcgtgtgtcatgtccccgctgcgtttctggggcccatggcccctccttatgtggcaactattgtggctactagtcaaggaggctcagcctctggagtgggtcaaggacccgctccagctgacctctaaccccctggggccgcctgagccctggtcttcccactcctcccatttcccacgggaatctccccatgcgcctactctcccagcagacccgtgggactttgatcacctggggccctctgcttcctcagagatgccagccccaccccaggaatcgactgaaaatttggttccattcctggacacctgggattcagctggagagctgcccctggagccagagcagttcttggcttcacagcaggatttaaaggacaagctgagtccacaggaaaggctccctgtttcgcccaagaagctgaagaaagatccagctcagcgttggagccttgctgagattattggaattatacgccaattatccacacctcagagtcagaaacagactttgcagaatgaatattccagtacagatacaccgtatcccggtagcctgcctccagaactccgggtgaagtcagatgagcctccagggccctctgagcaagttggaccttctcaattccatctagagcccgaaactcaaaatccagagacccttgaagacatccagtcctcttcactccagcaagaagccccagcacagcttccacagctccttgaggaagaaccttcttcaatgcagcaggaggccccagctctgcctccagagtcctctatggagagtctaactctaccgaatcatgaggtgtcagttcaacctccaggtgaggatcaagcttattatcacttgcccaacattacagttaaacctgcagatgtggaggttaccataacttcagagcctaccaatgagacagaatcttcccaagcccagcaggagaccccaattcagtttccagaggaggtggaaccttctgcaacccaacaggaggccccaattgagcctccagttcctcctatggagcatgaactttccatcagtgagcagcagcagccagttcagccttctgagtctcctagggaggtcgaatcttctccgacccagcaggagaccccaggtcagcctccagaacatcatgaagtcacagtttcacctccaggtcaccatcaaactcatcatttagcttcacccagtgtctctgtgaagcctccagacgtgcagctcaccatagcagcagagcctagtgcagaggtgggaacttctctagtccaccaggaggctacaactcggctctcagggtcaggtaatgatgtagaacctcccgccatccagcacgggggcccacctctgcttccagagtcatcagaagaagctggacctttagcagttcaacaggagacttcatttcaatctccggaacctattaataatgagaacccctctccaacccagcaggaggctgcagctgagcatccacagaccgctgaggagggtgagtcttccctaacccatcaggaggccccagctcagactccagagttccctaatgtagttgtagctcaacctccagagcattcacacctgactcaagccacagttcaacctttggatctggggtttaccatcactccagaatccaagacagaggttgaactttctccaaccatgaaggagaccccaactcagcctcctaagaaagttgtaccccaacttcgagtatatcaaggggtaacaaatccaacaccaggtcaggatcaagctcagcatccagtgtcacccagcgttacagttcaacttttggacctgggacttaccatcactccagaacctactacggaggttggacattctacacccccgaagaggactatagtttctccaaagcatcctgaggtgacacttccacatccagaccaggttcagactcagcattcacacctgactcgagccacagttcaacctttggacctggggtttaccatcactccaaaatccatgacagaggttgaaccttctacagccctgatgactacagctcctcctccaggacaccctgaggtgacacttccaccttcagacaagggtcaggctcagcattcacacctgactcaagccaccgttcaacctctggacctggagcttaccataactacaaaacctactacagaggttaaaccatctccaaccacggaggagacctcaactcagcctccagacctgggacttgccatcattccagaacccactacagagactggacattctacagccctggagaagactacagctcctcgtccagaccgggttcagactctgcatcgaagcctgactgaagtcacaggtccacctactgaactagaacctgctcaggattcactggtgcagtctgaaagttacacccaaaataaggctttaactgcaccagaggaacacaaggcctccacaagcaccaacatatgtgagctctgtacctgcggagatgagatgttgtcatgtattgatctcaacccagagcagaggctccgccaagtgcctgtgccagagcccaacacccacaatggcaccttcaccatcttaaatttccaaggaaactatatttcttacattgatggaaatgtatggaaagcatacagttggaccgagaaactaattctcagagaaaataacttgactgaattacacaaggattcatttgaaggcctgctatccctccagtatttagatttatcctgcaataaaatacagtctattgaaagacatacatttgaaccactaccatttttgaagtttataaatcttagttgcaatgtaattacagaactcagctttggaacatttcaggcctggcacggaatgcagtttttacataagttaattctcaatcacaatcctctgacaactgttgaagatccgtatctctttaaattgccagcattaaaatatctagacatgggaacaacgctagtcccacttacaacacttaagaacattctcatgatgactgttgaactggaaaaactgatcttacctagccatatggcctgctgcctctgccaatttaaaaacagcattgaggctgtctgcaagacagtcaagctgcattgcaacagtgcatgtctgacaaacaccatacattgtcctgaagaagcatcggtagggaatccagaaggagcgttcatgaaggtgttacaagcccggaagaactacacaagcactgagctgattgttgagccagaggagccctcagacagcagtggcatcaacttgtcaggctttgggagtgagcagctagacaccaatgacgagagtgattttatcagtacactacgttacatcttgccttatttctcagcggtaaacctagatgtgaaatcactgttactaccgttaattaaactgccaaccacaggaaacagcctggcaaagattcaaactgtaggccaaaaccggcagagagtgaagagagtcctcatgggcccaaggagcatccagaaaaggcacttcaaagaggtaggaaggcagagcatcaggagggaacagggtgcccaggcatctgtggagaacgctgccgaagaaaaaaggctcgggagtccagccccaagggaggtggaacagccccacacacagcaggggcctgagaagttagcgggaaacgccgtctacaccaagccttccttcacccaagagcataaggcagcagtctctgtgctgaaacccttctccaagggcgcgccttctacctccagccctgcaaaagccctaccacaggtgagagacagatggaaagacttaacccacgctatttccattttagaaagtgcaaaggctagagttacaaatacgaagacgtctaaaccaatcgtacatgccagaaaaaaataccgctttcacaaaactcgctcccacgtgacccacagaacacccaaagtcaaaaagagtccaaaggtcagaaagaaaagttatctgagtagactgatgctcgcaaacaggcttccattctctgcagcgaagagcctcataaattccccttcacaaggggctttttcatccttaggagacctgagtcctcaagaaaacccttttctggaagtatctgctccttcagaacattttatagaaaagaataatacaaaacacacaactgcaagaaatgcctttgaagaaaatgattttatggaaaacactaacatgccagaaggaaccatctctgaaaacacaaactacaatcatcctcctgaggcagattccgctgggactgcattcaacttagggccaactgttaaacaaactgagacaaaatgggaatacaacaacgtgggcactgacccgtcccccgagcccaaaagcttcaattacccattgctctcgtccccaggtgatcagtttgaaattcagctaacccagcagctacagtcccttatccccaacaacaatgtgagaaggctcattgctcatgttatccggaccttgaagatggactgctctggggcccatgtgcaagtgacctgtgccaagctcatctccaggacaggccacctgatgaagcttctcagtgggcagcaggaagtaaaggcatccaagatagaatgggatacggaccaatggaagattgagaactacattaatgagagcacagaagcccagagtgaacagaaagagaagtcgcttgagctcaaaaaagaagttccaggatatggctatactgacaaactcatcttggcattaattgttactggaatactaacgattttgattatacttttctgccttattgtgatatgttgtcaccgaaggtcattacaagaagatgaagaaggattctcaaggggcattttcagatttctgccacggaggggatgctcttcgcgaagggagagtcaggatggactttcctcatttggacagccgctctggtttaaagatatgtacaaacctctcagtgccacaagaataaataatcatgcatggaagctgcacaagaagtcatctaatgaggacaagatcctcaacagggaccctggggacagcgaagccccaacggaggaggaggagagtgaagccctgccataggaggagaacacagcccacctcaggcctcctgcaaaaatacatagaataaacaacaacagttactaaatgaatgaaaa

SEQ ID NO: 178102 - DNA, 3856 bp, Homo sapiens
  Payload ID: 14940
  Gene Symbol:
  Gene Name: RP11-1070B7.1
  ENST ID: ENST00000626350
  CDS Start-End: 1571-3787
ttgaaaactataatgcctttcaaatatggcttattgcttggatctcaatatctcccacgtatcttgggtggaatattttgctgaagatctttctgtcaatcatttacaatcatgtgctgcaaaatgaagtttgggtcaacagtagaccacatatatgatggtggttccgtaagcgtataatggagctatccctatataggtataccatttttatcttttttttttttttttttttgagatggagtctcactctgttgtccaggctggagtgcagtggtatgatcccagctcattgcaacctccacctcccaggttcaagtgattctcctacctcagcctcctgagtagctgggattatagacacgcgtcaccacactcagctaatttttgtatttttagtagagatggggtttcatcatgttggccaggctggtcttgaactcctgagctcaagtgatccacccaccttggcgtcccaaagtgctgggattacaggcatgagccactgtgcccaggccccatttttatcttttacacagtattttaactatatattttccatgtttacatacacaaatacctgccattctgtgacagttgcctttagtattcagtacagtaacatacagtacaggtttgtagcctaggagtcctaagccataccgtgtaccctaggtatggtggctacaccacctaggtttgtgtaagtatacgctatgatattagcacaatggtgaaatcacctagtgacccatttctcaagctcctcacgtgggaagcaatgcatgactgcatatgaaagctcttaaatagggattgtttctaaattaatctcaaaacagtcattatttactatttatggaattttttttaaaaaaaggagcaaaagtatcatttcagtgggaacttaacttggggctacagtgttttatttaacttttaccccaaagttgcaaagtgttttgaaatttttccctgtaaaataattattttaattcaatttaaataaaacccaccaaggagacttcaagctttaagaagtctagcttcctgtgaaatgtgagaggaagtcagcactcatttcagaaatctgattataacaatagctccatccctaaatgaggtgaatcttggaatctcttccattttattttattttatttttttgagatggagtttctctcttgttgcccaggctgaagtgcaatgttgtgatctcggctcactgcaacctctgcctcccaggttcaagcgattctcctgctttggcctcctgagtagctgggattgcagaaatttccaaggaaactatatttcttacattgatggaaatgtatggaaagcatacagttggaccgagaaactaattctcagagaaaataacttgactgaattacacaaggattcatttgaaggcctgctatccctccagtatttagatttatcctgcaataaaatacagtctattgaaagacatacatttgaaccactaccatttttgaagtttataaatcttagttgcaatgtaattacagaactcagctttggaacatttcaggcctggcacggaatgcagtttttacataagttaattctcaatcacaatcctctgacaactgttgaagatccgtatctctttaaattgccagcattaaaatatctagacatgggaacaacgctagtcccacttacaacacttaagaacattctcatgatgactgttgaactggaaaaactgatcttacctagccatatggcctgctgcctctgccaatttaaaaacagcattgaggctgtctgcaagacagtcaagctgcattgcaacagtgcatgtctgacaaacaccatacattgtcctgaagaagcatcggtagggaatccagaaggagcgttcatgaaggtgttacaagcccggaagaactacacaagcactgagctgattgttgagccagaggagccctcagacagcagtggcatcaacttgtcaggctttgggagtgagcagctagacaccaatgacgagagtgattttatcagtacactacgttacatcttgccttatttctcagcggtaaacctagatgtgaaatcactgttactaccgttaattaaactgccaaccacaggaaacagcctggcaaagattcaaactgtaggccaaaaccggcagagagtgaagagagtcctcatgggcccaaggagcatccagaaaaggcacttcaaagaggtaggaaggcagagcatcaggagggaacagggtgcccaggcatctgtggagaacgctgccgaagaaaaaaggctcgggagtccagccccaagggaggtggaacagccccacacacagcaggggcctgagaagttagcgggaaacgccgtctacaccaagccttccttcacccaagagcataaggcagcagtctctgtgctgaaacccttctccaagggcgcgccttctacctccagccctgcaaaagccctaccacaggtgagagacagatggaaagacttaacccacgctatttccattttagaaagtgcaaaggctagagttacaaatacgaagacgtctaaaccaatcgtacatgccagaaaaaaataccgctttcacaaaactcgctcccacgtgacccacagaacacccaaagtcaaaaagagtccaaaggtcagaaagaaaagttatctgagtagactgatgctcgcaaacaggcttccattctctgcagcgaagagcctcataaattccccttcacaaggggctttttcatccttaggagacctgagtcctcaagaaaacccttttctggaagtatctgctccttcagaacattttatagaaaagaataatacaaaacacacaactgcaagaaatgcctttgaagaaaatgattttatggaaaacactaacatgccagaaggaaccatctctgaaaacacaaactacaatcatcctcctgaggcagattccgctgggactgcattcaacttagggccaactgttaaacaaactgagacaaaatgggaatacaacaacgtgggcactgacccgtcccccgagcccaaaagcttcaattacccattgctctcgtccccaggtgatcagtttgaaattcagctaacccagcagctacagtcccttatccccaacaacaatgtgagaaggctcattgctcatgttatccggaccttgaagatggactgctctggggcccatgtgcaagtgacctgtgccaagctcatctccaggacaggccacctgatgaagcttctcagtgggcagcaggaagtaaaggcatccaagatagaatgggatacggaccaatggaagattgagaactacattaatgagagcacagaagcccagagtgaacagaaagagaagtcgcttgagctcaaaaaagaagttccaggatatggctatactgacaaactcatcttggcattaattgttactggaatactaacgattttgattatacttttctgccttattgtgatatgttgtcaccgaaggtcattacaagaagatgaagaaggattctcaaggggcattttcagatttctgccacggaggggatgctcttcgcgaagggagagtcaggatggactttcctcatttggacagccgctctggtttaaagatatgtacaaacctctcagtgccacaagaataaataatcatgcatggaagctgcacaagaagtcatctaatgaggacaagatcctcaacagggaccctggggacagcgaagccccaacggaggaggaggagagtgaagccctgccataggaggagaacacagcccacctcaggcctcctgcaaaaatacatagaataaacaacaacagttactaaatg

SEQ ID NO: 178103 - DNA, 5018 bp, Homo sapiens
  Payload ID: 14940
  Gene Symbol:
  Gene Name: RP11-1070B7.1
  ENST ID: ENST00000628214
  CDS Start-End: 36-4943
cttacaaggggcacgagcgtctcggagctgccagaatgacttccgctcagtgcccggcactagcgtgtgtcatgtccccgctgcgtttctggggcccatggcccctccttatgtggcaactattgtggctactagtcaaggaggctcagcctctggagtgggtcaaggacccgctccagctgacctctaaccccctggggccgcctgagccctggtcttcccactcctcccatttcccacgggaatctccccatgcgcctactctcccagcagacccgtgggactttgatcacctggggccctctgcttcctcagagatgccagccccaccccaggaatcgactgaaaatttggttccattcctggacacctgggattcagctggagagctgcccctggagccagagcagttcttggcttcacagcaggatttaaaggacaagctgagtccacaggaaaggctccctgtttcgcccaagaagctgaagaaagatccagctcagcgttggagccttgctgagattattggaattatacgccaattatccacacctcagagtcagaaacagactttgcagaatgaatattccagtacagatacaccgtatcccggtagcctgcctccagaactccgggtgaagtcagatgagcctccagggccctctgagcaagttggaccttctcaattccatctagagcccgaaactcaaaatccagagacccttgaagacatccagtcctcttcactccagcaagaagccccagcacagcttccacagctccttgaggaagaaccttcttcaatgcagcaggaggccccagctctgcctccagagtcctctatggagagtctaactctaccgaatcatgaggtgtcagttcaacctccaggtgaggatcaagcttattatcacttgcccaacattacagttaaacctgcagatgtggaggttaccataacttcagagcctaccaatgagacagaatcttcccaagcccagcaggagaccccaattcagtttccagaggaggtggaaccttctgcaacccaacaggaggccccaattgagcctccagttcctcctatggagcatgaactttccatcagtgagcagcagcagccagttcagccttctgagtctcctagggaggtcgaatcttctccgacccagcaggagaccccaggtcagcctccagaacatcatgaagtcacagtttcacctccaggtcaccatcaaactcatcatttagcttcacccagtgtctctgtgaagcctccagacgtgcagctcaccatagcagcagagcctagtgcagaggtgggaacttctctagtccaccaggaggctacaactcggctctcagggtcaggtaatgatgtagaacctcccgccatccagcacgggggcccacctctgcttccagagtcatcagaagaagctggacctttagcagttcaacaggagacttcatttcaatctccggaacctattaataatgagaacccctctccaacccagcaggaggctgcagctgagcatccacagaccgctgaggagggtgagtcttccctaacccatcaggaggccccagctcagactccagagttccctaatgtagttgtagctcaacctccagagcattcacacctgactcaagccacagttcaacctttggatctggggtttaccatcactccagaatccaagacagaggttgaactttctccaaccatgaaggagaccccaactcagcctcctaagaaagttgtaccccaacttcgagtatatcaaggggtaacaaatccaacaccaggtcaggatcaagctcagcatccagtgtcacccagcgttacagttcaacttttggacctgggacttaccatcactccagaacctactacggaggttggacattctacacccccgaagaggactatagtttctccaaagcatcctgaggtgacacttccacatccagaccaggttcagactcagcattcacacctgactcgagccacagttcaacctttggacctggggtttaccatcactccaaaatccatgacagaggttgaaccttctacagccctgatgactacagctcctcctccaggacaccctgaggtgacacttccaccttcagacaagggtcaggctcagcattcacacctgactcaagccaccgttcaacctctggacctggagcttaccataactacaaaacctactacagaggttaaaccatctccaaccacggaggagacctcaactcagcctccagacctgggacttgccatcattccagaacccactacagagactggacattctacagccctggagaagactacagctcctcgtccagaccgggttcagactctgcatcgaagcctgactgaagtcacaggtccacctactgaactagaacctgctcaggattcactggtgcagtctgaaagttacacccaaaataaggctttaactgcaccagaggaacacaaggcctccacaagcaccaacatatgtgagctctgtacctgcggagatgagatgttgtcatgtattgatctcaacccagagcagaggctccgccaagtgcctgtgccagagcccaacacccacaatggcaccttcaccatcttaaatttccaaggaaactatatttcttacattgatggaaatgtatggaaagcatacagttggaccgagaaactaattctcagagaaaataacttgactgaattacacaaggattcatttgaaggcctgctatccctccagtatttagatttatcctgcaataaaatacagtctattgaaagacatacatttgaaccactaccatttttgaagtttataaatcttagttgcaatgtaattacagaactcagctttggaacatttcaggcctggcacggaatgcagtttttacataagttaattctcaatcacaatcctctgacaactgttgaagatccgtatctctttaaattgccagcattaaaatatctagacatgggaacaacgctagtcccacttacaacacttaagaacattctcatgatgactgttgaactggaaaaactgatcttacctagccatatggcctgctgcctctgccaatttaaaaacagcattgaggctgtctgcaagacagtcaagctgcattgcaacagtgcatgtctgacaaacaccatacattgtcctgaagaagcatcggtagggaatccagaaggagcgttcatgaaggtgttacaagcccggaagaactacacaagcactgagctgattgttgagccagaggagccctcagacagcagtggcatcaacttgtcaggctttgggagtgagcagctagacaccaatgacgagagtgattttatcagtacactacgttacatcttgccttatttctcagcggtaaacctagatgtgaaatcactgttactaccgttaattaaactgccaaccacaggaaacagcctggcaaagattcaaactgtaggccaaaaccggcagagagtgaagagagtcctcatgggcccaaggagcatccagaaaaggcacttcaaagaggtaggaaggcagagcatcaggagggaacagggtgcccaggcatctgtggagaacgctgccgaagaaaaaaggctcgggagtccagccccaagggaggtggaacagccccacacacagcaggggcctgagaagttagcgggaaacgccgtctacaccaagccttccttcacccaagagcataaggcagcagtctctgtgctgaaacccttctccaagggcgcgccttctacctccagccctgcaaaagccctaccacaggtgagagacagatggaaagacttaacccacgctatttccattttagaaagtgcaaaggctagagttacaaatacgaagacgtctaaaccaatcgtacatgccagaaaaaaataccgctttcacaaaactcgctcccacgtgacccacagaacacccaaagtcaaaaagagtccaaaggtcagaaagaaaagttatctgagtagactgatgctcgcaaacaggcttccattctctgcagcgaagagcctcataaattccccttcacaaggggctttttcatccttaggagacctgagtcctcaagaaaacccttttctggaagtatctgctccttcagaacattttatagaaaagaataatacaaaacacacaactgcaagaaatgcctttgaagaaaatgattttatggaaaacactaacatgccagaaggaaccatctctgaaaacacaaactacaatcatcctcctgaggcagattccgctgggactgcattcaacttagggccaactgttaaacaaactgagacaaaatgggaatacaacaacgtgggcactgacccgtcccccgagcccaaaagcttcaattacccattgctctcgtccccaggtgatcagtttgaaattcagctaacccagcagctacagtcccttatccccaacaacaatgtgagaaggctcattgctcatgttatccggaccttgaagatggactgctctggggcccatgtgcaagtgacctgtgccaagctcatctccaggacaggccacctgatgaagcttctcagtgggcagcaggaagtaaaggcatccaagatagaatgggatacggaccaatggaagattgagaactacattaatgagagcacagaagcccagagtgaacagaaagagaagtcgcttgagctcaaaaaagaagttccaggatatggctatactgacaaactcatcttggcattaattgttactggaatactaacgattttgattatacttttctgccttattgtgatatgttgtcaccgaaggtcattacaagaagatgaagaaggattctcaagggacagcgaagccccaacggaggaggaggagagtgaagccctgccataggaggagaacacagcccacctcaggcctcctgcaaaaatacatagaataaacaacaacagttactaaatgaatgaa

SEQ ID NO: 178104 - DNA, 1605 bp, Homo sapiens
  Payload ID: 14941
  Gene Symbol:
  Gene Name: RP11-108K14.8
  ENST ID: ENST00000468317
  CDS Start-End: 256-1275
cctccccatatgtgatccaggagttgaggccagatcactattcagtgtttacaccccttgttttctctaaaagctgttcacacctgagctgcggggtgcagtggcttcctttcccacccattggtggatgcgtgtgagccgtcttcccacccgttggtggatgcgtgtgagccgttttcccgcccgttggtggatgcgtgtgagccgttttcccgcccgttggtggatgcgtgtgagccgttttcctggctgttgatggatacatctccagatcctgtttgcgggggaagccacacatcgcacgttttactccacgacgcacggggctctgctgtcgggatggagggaggccgaccgcctcctcagtctgtgggccccgcagggctgaagaagatgcagagcagcctgaagctggtggactgtatcatcgaggtccacgatgcccggatcccactttcaggccgcaaccctctgtttcaggaaacccttgggcttaagcctcacttgctggtcctcaacaagatggacttggcggatcttacagagcagcagaaaattatgcaacacttagaaggagaaggcctaaaaaatgtcatttttaccaactgtgtaaaggatgaaaatgtcaagcagatcatcccgatggtcactgaactgattgggagaagccaccgctaccaccgaaaagagaacctggagtactgtatcatggtcattggggtccccaacgtgggcaagtcctccctcatcaactccctccggaggcagcacctcaggaaagggaaagccaccagggtgggtggcgagcctgggatcaccagagctgtgatgtccaaaattcaggtctctgagcggcccctgatgttcctgttggacactcctggcgtgctggctcctcggattgaaagtgtggagacaggcctgaagctggccctgtgtggaacggtgctggaccacctggtcggggaggagaccatggctgactacctgctgtacaccctcaacaaacaccagcgctttgggtacgtgcagcactacggcctgggcagtgcctgtgacaacgtagagcgcgtgctgaagagtgtggctgtgaagctggggaagacgcagaaggtgaaggtgctcacgggcacgggtaacgtgaacattattcagcctaactatcctgcggcagcccgtgacttcctgcagactttccgccgtgggctgctgggttccgtgatgctggacctcgacgtcctgcggggccaccccccggctgagactttgccctgaacttgtccgggtagggagggccggaggcatgtggcctcccagacctcctgacctgggtggttgaggctcaagacagctcacccggtccagaagctccatgctggtcactagggtgctgtgctctctggcgccccacagcctggccagctccagggaccccagttgcagggcccaagcaggtgggagtggacaccaggcttcccagtggacgtccctgagcagctccgcatgcttggttctcccggagcttcctgctcaggcctcttgagaaatggatgctgtctcagaaggagttaaagctataacctgtaacctttaaaatctccagtt

SEQ ID NO: 178105 - DNA, 817 bp, Homo sapiens
  Payload ID: 14942
  Gene Symbol:
  Gene Name: RP11-108O10.8
  ENST ID: ENST00000542429
  CDS Start-End: 1-641
gtaaggctgtggcagggtacaagtgcactggatataggagtcaagataagtcctttcatgtagaaggtgctttgaaccatatcttcaccaggagcttaccttttgaaggttctcaacccagaatcttcaggatcaaactgggtaaccagtggttttcctttccagaaccagaagcacttgtaggaaagttgaacaggggtttcctggaagcaccttcatgtcatcctatcaaaaccataaatgagaaactcattgctgaattaggcaaagttttcccgctaaaaaggctgaagtgttcctaccctttgctgccacaggaaggtaccagtgttcttcctttctggaattgtgactttctgtcagctgctttttggattagtctccatgaagataactcaaattctgagtccctgactggtgggacatcacaagatgtggaagactttctagtgtcattttcagaacttagccttctcaagaatcctggaagagatggtaaagaagaagcttgtgaaggaacctgtggccaggccaagatctgccttagaccttctctcctagtgcatgttcaggatgtcatcgaagtaccagacttcctctcaggcttgccatggctagtcgaggggctcggcagcgcctgaagggcagcggggccagcagtggggatacggccccggctgcggacaagctgcgggagctgctgggcagccgagaggcgggcggcgcggagcaccggaccgagttatctgggaacaaagcaggacaagtctgggcacctgaaggatctactgctttcaagtgtctgctttcagcaagg

SEQ ID NO: 178106 - DNA, 432 bp, Homo sapiens
  Payload ID: 14942
  Gene Symbol:
  Gene Name: RP11-108O10.8
  ENST ID: ENST00000526587
  CDS Start-End: 1-432
ttctcaacccagaatcttcaggatcaaactgggtaaccagtggttttcctttccagaaccagaagcacttgtaggaaagttgaacaggttatctgggaacaaagcaggacaagtctgggcacctgaaggatctactgctttcaagtgtctgctttcagcaaggttatgtgctgctctcctgagcaacatctctgactgtgatgaaacattcaactactgggagccaacacactacctcatctatggggaagggtttcagacttgggaatattccccagcatatgccattcgctcctatgcttacctgttgcttcatgcctggccagctgcatttcatgcaagaattctacaaactaataagattcttgtgttttactttttgcgatgtcttctggcttttgtgagctgtatttgtgaactttacttttacaa

SEQ ID NO: 178107 - DNA, 2939 bp, Homo sapiens
  Payload ID: 14942
  Gene Symbol:
  Gene Name: RP11-108O10.8
  ENST ID: ENST00000622211
  CDS Start-End: 294-2828
gcttgtgacctcatgcaggtgtgatgaagtcgctcaaggccatgcttgggctaaagacactttgatcttcccgagggggtgaaagggcgaggtgacaggaaagtgcgcgtcttgcttttgcactcatagttatcatccaccggggagtcggtacaccggctcgtctagacaaccaggcgccatgggtgcgtcatcaactagtgacgggagaagacggggcggagagagatccgtgaaggaagtgacgtaaaacgagcgccacagagaacgcgagccgggagtccgtggaggccatggcccctcggcgcctcctgttggttggggaggggaatttctccttcgccgccgctctgagcgaaaccctggatcagagcactcaacttaccgccacctgcctccagcgcccggccgagttggctcgggatccactggcctgggagaatctgcagtgcctgcgcgagcgaggtatcgatgtacgtttcggtgtggactgcacccagctggcagatgtctttgaactgcacgagagagaatttgatcaaatttatttcatcttcccgcattgtggacgcaaagctggcgtagctaagaacagggaactgcttgccaaatttttccaaagctgtgcagacgttcttgcagaggaaggagaagtccacgtggcattatgtagaggacaaggtggaactcctgcggataagccccagagagaatggcacaacagttggcaagtggttgccatggcagccctgggggggctcattttaagcgacgtgtatccattcagctgtaaggctgtggcagggtacaagtgcactggatataggagtcaagataagtcctttcatgtagaaggtgctttgaaccatatcttcaccaggagcttaccttttgaaggttctcaacccagaatcttcaggatcaaactgggtaaccagtggttttcctttccagaaccagaagcacttgtaggaaagttgaacaggcttgccatggctagtcgaggggctcggcagcgcctgaagggcagcggggccagcagtggggatacggccccggctgcggacaagctgcgggagctgctgggcagccgagaggcgggcggcgcggagcaccggaccgagttatctgggaacaaagcaggacaagtctgggcacctgaaggatctactgctttcaagtgtctgctttcagcaaggttatgtgctgctctcctgagcaacatctctgactgtgatgaaacattcaactactgggagccaacacactacctcatctatggggaagggtttcagacttgggaatattccccagcatatgccattcgctcctatgcttacctgttgcttcatgcctggccagctgcatttcatgcaagaattctacaaactaataagattcttgtgttttactttttgcgatgtcttctggcttttgtgagctgtatttgtgaactttacttttacaaggctgtgtgcaagaagtttgggttgcacgtgagtcgaatgatgctagccttcttggttctcagcactggcatgttttgctcatcatcagcattccttcctagtagcttctgtatgtacactacgttgatagccatgactggatggtatatggacaagacttccattgctgtgctgggagtagcagctggggctatcttaggctggccattcagtgcagctcttggtttacccattgcctttgatttgctggtcatgaaacacaggtggaagagtttctttcattggtcgctgatggccctcatactatttctggtgcctgtggtggtcattgacagctactattatgggaagttggtgattgcaccactcaacattgttttgtataatgtctttactcctcatggacctgatctttatggtacagaaccctggtatttctatttaattaatggatttctgaatttcaatgtagcctttgctttggctctcctagtcctaccactgacttctcttatggaatacctgctgcagagatttcatgttcagaatttaggccacccgtattggcttaccttggctccaatgtatatttggtttataattttcttcatccagcctcacaaagaggagagatttcttttccctgtgtatccacttatatgtctctgtggcgctgtggctctctctgcacttcagaaatgttaccactttgtgtttcaacgatatcgcctggagcactatactgtgacatcgaattggctggcattaggaactgtcttcctgtttgggctcttgtcattttctcgctctgtggcactgttcagaggatatcacgggccccttgatttgtatccagaattttaccgaattgctacagacccaaccatccacactgtcccagaaggcagacctgtgaatgtctgtgtgggaaaagagtggtatcgatttcccagcagcttccttcttcctgacaattggcagcttcagttcattccatcagagttcagaggtcagttaccaaaaccttttgcagaaggacctctggccacccggattgttcctactgacatgaatgaccagaatctagaagagccatccagatatattgatatcagtaaatgccattatttagtggatttggacaccatgagagaaacaccccgggagccaaaatattcatccaataaagaagaatggatcagcttggcctatagaccattccttgatgcttctagatcttcaaagctgctgcgggcattctatgtccccttcctgtcagatcagtatacagtgtacgtaaactacaccatcctcaaaccccggaaagcaaagcaaatcaggaagaaaagtggaggttagcaacacacctgtggccccaaaggacaaccatcttgttaactattgattccagtgacctgactccctgcaagtcatcgcctgtaacatttgtaataaaggtcttctgacatg

SEQ ID NO: 178108 - DNA, 348 bp, Homo sapiens
  Payload ID: 14943
  Gene Symbol:
  Gene Name: RP11-1099M24.7
  ENST ID: ENST00000573621
  CDS Start-End: 1-17
ccgcccgggctggctgaagcaacctacctcaagtctcaggagaattcatgtctgcctggggcccttccgaacctgtgccaactaagggcccccactgaacctagggaagtctggtcttcgggtatcctgtcttggcctaggtacctgggtcacatttggttctcagatctcagatgagacagcagaggatgtgctgactgtagcctatgagcatggtgtaaacctgtttgacaccgccgaagtgtacgcagcaggaaaggctgaaagaaccctagggaacatcctcaagagcaaaggttggaggagatcaagctatgtcatcactaccaagattttttggggaggaca

SEQ ID NO: 178109 - DNA, 1947 bp, Homo sapiens
  Payload ID: 14944
  Gene Symbol:
  Gene Name: RP11-111H13.1
  ENST ID: ENST00000424491
  CDS Start-End: 637-1212
gagcgacgcgtacgtctacctgcctgccttacagggcacctaggagggaccccttcctggcccatccgcgccgcgcaggcgcacgcccacgcagcgcctagacgcccgagccgagcgtcccgtctcctagtaaccagccgctagcccccttttccacgactcatttcttaatctctgcctgaggctgccgcacctggatggaacgcgcatgcgcaaggctgtctctcgcagccccgccttccctcagcttgaaacacctgctgcttcgcggcggtggctttgtgccacttttcccagggcttgggcatcattctggacccatgttcggtgaaccggttactctcagagctgctttcgggcgcagctcctgctgcagccagggcccgttttaagagaggcttccaggtccagccctcccgctgcagcctgcagggagcgagccggcctgtcccgatgacatagacactaggtttttacagcaattctctgatgaccttgatatggtagaacgctgtgtatttcaagagtaagctctcgtttgaggagactaacaattcctgttttcgccagatttcttcttgaatggcaacctaaatgccagtccaaagaggcccccaatagacttgttcacccttcatgtcctcaactctggggaagttaagtaatcaagttgaagaaacacttccactacttaaaaagcctctaaagagagcaatcactacacttatggctgggattttgcgcttagtagttcaatggcccccaggcagactacagactgtgacaaaaggtgtggagtctcttatttgtacagattggattcgtcacaaattcaccagatcaagaattccagaaaaagtgtttcaggcctcacctgaagatcatgaaaaatacggtggggatccacagaaccctcataaactgcatattgttaccagaataaaaagtacaagaagacgtccatattgggaaaaagatataataaagatgcttggattagaaaaagcacatacccctcaagttcacaagaatatcccttcagtgaatgcaaaattgaaagtagttaagcatttgataagaatcaagcccttgaagttgccacaaggacttccagcagaggagaacatgtctaacacgtgcctcaaaagcactggggagttagtagtgcagtggcatctgaaacctgtggagcagaaagcacatgagtcctaatgccccagcagcttccgattggaaaatgcaaattgtttttatttaaagatgacggagtcttgctctgtcacccaggatggagtgtaatgccacggtttcagcttactgcaatctctctgcctcctggcttcaagcatttctcctgcctcagcctcccgagtagctgggaccacagaaaccacaacaaaggtgcttgcccatggctcctcgcttccctctgcctcatgactgatgccaattattccccttgtggccccctgtggtgtgacatgtactccctctccggggatccgaaatgaaaccaatttctacaacataggaatgatttcggcatgtctaggagagtcagagaaaagacgggagggaaatgggggagaaagaaaaacgtgagagaaccttctacttcctgaaaggcaccatgactctggaatgttacctgtaattaagaatgtcagaagaaccgagcctccattctaaagtttctgtggtgaagtcatctgtatttcctaggaaacttgaagaggaacaaactgaaacttgacaaaactcggaagagacttacaagaatcagaagtgcacacatggtgccatatttggaagtcatgaagaaaaactgaacagcattaccgaggaaaaacttcttactcctaaatatgcaacgctgtcagtaagaagcacattaaggctaagggttactaataatatttaaataaatgtggccattatgcttctagg

SEQ ID NO: 178110 - DNA, 2430 bp, Homo sapiens
  Payload ID: 14945
  Gene Symbol:
  Gene Name: RP11-111K18.1
  ENST ID: ENST00000442788
  CDS Start-End: 17-721
ggctcttcgggtaaagatggcggagcgcgggtacagcttttcgctgactacattcagcccgtctggtaaacttgtccagattgaatatgctttggctgctgtagctggaggagccccgtccgtgggaattaaagctgcaaatggtgtggtattagcaactgagaaaaaacagaaatccattctgtatgatgagcgaagtgtacacaaagtagaaccaattaccaagcatataggtttggtgtacagtggcatgggccccgattacagagtgcttgtgcacagagctcgaaaactagctcaacaatactatcttgtgtaccaagaacccattcctacagctcagctggtacagagagtagcttctgtgatgcaagaatatactcagtcaggtggtgttcgtccatttggagtttctttacttatttgtggttggaatgagggacgaccatatttatttcagtcagatccatctggagcttactttgcctggaaagctacagcaatgggaaagaactatgtgaatgggaagactttccttgagaaaagatataatgaagatctggaacttgaagatgccattcatacagccatcttaaccctaaaggaaagctttgaagggcaaatgacagaggataacatagaagttggaatctgcaatgaagctggatttaggaggcttactccaactgaagttaaggattacttggctgccatagcataacaatgaagtgactgaaaaatccagaatttcagataatctatctacttaaacatgtttaaagaaaggaataatgctgacagcatgtctgcacattccatgctctgtgaacgaatcgccatagccaaggaactgatcaagagagcagaatcactttctagatcaagaaaaggtggcatagaaggtggtgcaaagctgtgcagcaaattgaaggcagaattaaaattcttgcagaaagtagaagctgggaaagtagctattaaagagtctcatttacagagcactaacctaacacacctgagagccattgtggaatcagcagaaaacctggaagaagttgttagtgttcttcatgtctttggttatacagataccttaggagaaaagcaaacccttgtggtagatgtagttgcaaatggtggtcatacttgggtgaaagccattggccggaaggctgaagctcttcataacatctggctgggcaggggccaatatggtgacaaaagcatcattgagcaggctgaagacttcctccaggccagtcaccagcagccagtgcagtatagcaaccctcacatcatctttgcattttacaacagtgtctccagccccatggcagagaagctgaaagaaatgggcatatctgtgagaggagacatagtagcagtcaacgctctgttagatcaccctgaagagcttcaaccaagtgagagtgaatcagatgatgagggccctgaacttttgcaggtgaccagagttgaccgagaaaatatactagcaagtgttgcgtttccaacagaaattaaggtcgatgtgtgcaaaagagtaaatctggacattactactttaatcacatatgtatctgccctcagctatggaggctgccactttattttcaaagagaaagtgctcacagaacaagcagagcaagagaggaaagagcaggttctacctcagctggaggcctttatgaaggacaaggagttgtttgcttgtgaatctgctgtcaaggactttcagtctattttagataccttaggaggacctggggagagagagagggccactgtgttaattaagcgaattaatgtggtaccagaccagccttctgagcgtgccttgagactagtggccagttcaaaaattaatagccgctcattaacaatttttgggacgggagacaccctaaaagccatcacaatgactgctaatagtggttttgtcagagctgcaaacaaccagggtgttaaatttagtgtgtttatccatcagcccagagcacttactgagagtaaagaggctctagccacccccttaccaaaagactacacaactgacagtgaacactaaagataccctttaaatatttttgtggaagtaagttatttataccaaaggctgggtcttcccatctaaactggtgggaaaaaaggtctatagtaaaagtaaaactgagaactcttaaaccagtagagtttctttgtctctcatctaaagtatataacctcccaaagtagaaaaagcacaagagagaagcttatctatcaaactgtctgcattagtgcaattaagaaccgaaatacgtctatataaagctttcagctgtattgtaatactttgattcgatagggctacaactcccctactgctaaccacatttcatggaatatggctacattgcatcttgcattaaatatctggagaaaattcaa

SEQ ID NO: 178111 - DNA, 1231 bp, Homo sapiens
  Payload ID: 14945
  Gene Symbol:
  Gene Name: RP11-111K18.1
  ENST ID: ENST00000433579
  CDS Start-End: 14-160
tcttcgggtaaagatggcggagcgcgggtacagcttttcgctgactacattcagcccgtctggtaaacttgtccagattgaatatgctttggctgctgtagctggaggagccccgtccgtgggaattaaagagtgcttgtgcacagagctcgaaaactagctcaacaatactatcttgtgtaccaagaacccattcctacagctcagctggtacagagagtagcttctgtgatgcaagaatatactcagtcaggtggtgttcgtccatttggagtttctttacttatttgtggttggaatgagggacgaccatatttatttcagtcagatccatctggagcttactttgcctggaaagctacagcaatgggaaagaactatgtgaatgggaagactttccttgagaaaagccctaatctttctgggtgactctggacactctactacagtaatatgaatatggcagcccctcggaagccatgcaatcatttcttctcttcagaaggacagcacactttctttggagggcccaggacaatgcagtggaaagtgctttggcttggaggcagaagtcccagaggcagtacttctcagctgtcacctctgacaagcttctccagcgtttcttctgttaaaatgagcccccaaaatgcctacgacccggttgcgatcgagtggccgacgcccccagtgggagtgaggcccagcacgcgagctcggtccctcttcctggagccaggtgggtgcgcgccttcaggctcacccggcggcgcaagcgggagaagccaggtgccctcaataaacatggccgccacgccagcgtcaacccggctcgggaggccgcgctgccgcttgggaatcgcaggtttggcgtcacccggcccggaaccacgtgatgcaggaggtgcccgaggcggcggggctcgcgcgggtggagccgcctcggcgttcgagcggggtgggggctgcccggttgagatttcccggcgggtcccggcctctgcgtgcacgcgcctgcgtgctcgcgctcgcggttctggcgctgccggaaaggaataatgctgacagcatgtctgcacattccatgctctgtgaacgaatcgccatagccaaggaactgatcaagagagcagaatcactttctagatcaagaaaaggtggcatagaaggtggtgcaaagctgtgcagcaaattgaaggcagaattaaaattcttgcagaaagtagaagct

SEQ ID NO: 178112 - DNA, 5363 bp, Homo sapiens
  Payload ID: 14946
  Gene Symbol:
  Gene Name: RP11-111M22.2
  Uniprot ID: Q3ZCU0
  ENST ID: ENST00000321844
  CDS Start-End: 505-1269
gcgcgcctgtctcccgggacgctagagcaggcggttcctgggctgctccggtaggtttggcgtgcgcgggtttctgcagatctagggcgagcttgcacgttacatcaccgatgcatctcttcttgcttgcttaatttgccaccacttaggcctttcttgcagaattcgccatatactccttaagggccgcggaatcggagcgaccttggtgactggcaaactctcggcagatgtgcgtgcactggtttgatgcagacgtggttgtaggcgatttaatttttcccagctttgcagcgactgttggcttcccagaacggatctccccagcctcgactggaagctgagggacaaaaattcataaaagcaattactctttcccggcgaggcttctagaagagcaagaagagcgatatgattacacctgcagccctataaagattgatctgtccgtctttcccttacagtcgtggcctgttaaacgttcctgtgttgttcagtgccagaatgagtgaccgctatttagaacaaaggattagtatcaaattttgcgtgaaattgaacaagtctgcaagtgagacccaccatcttttaaaagaagcttatggggatgaagtcatgtcaagggccagagtttttgactggcacaaaaggtttaaagaaggacgggaagatgttcgagatgatgcccgaagtgggcgtccagtcacccaccgaacagatgacaatatccagaaggtcaaggacttggtttgttcaaacaggcagttaaccgtgaggatgatggctgaagagttaaatttagacaaagaaactgttaggctcattttgaaagaaaacttgaacatgaggaagatttctgcaaaagttatttcgggtgttttgaaggagacggaacctcactatgttgcccaggctggtctcgaactccttgtctcaagggatcctcccaccttggcctcccaaagctctgggattatcagcatgagccaccatgccaagccaaaaccaggagttcaatggtgtaaattccagtctgagtccacaggccgaagagcgaggagtgctgatgtacaagggcaggagaagatggatgtcacagctcaagaagcgagaacaaatttgcccttctatctttttgttctattcaggtcctcaatgaattggatgatgtccatgcacattagggagggctgcctcttcattactcggtctaccaattcaaatgctaatctcttccggaaacatccccacagacacacccagaaataatgttttcccatctatctcagtaccccatgatccagtcaagtgaacatataaaattggctgtcacatctccattttgtttatttatttacttatttattttagactagttaagttcagtagtgagaaagagggaaggaatagaacgaggagttcaatctgtgactgacagtgaacaattgattgagataactcactacctttggaccagccatctccattttataaataagaaaactgaagctcagaaaggttgtctaaactgccaaagccatagaactttaagtgcggaaataggttttgtgttcaatctgcttctctataaaatcccatacaggacatccaggcatctaaaaggtagctcagtatctctgccttctctccattgttagccttgatggacaatttttgctggagcaaatattctgaaaaagattcctcctgtttcctatgggagtagacagcaagcaggtgaagccgggctctcttgagcctgggaccccccggtaggagcatttggctggaaagatgtggaagtcaataagcatttcctccaccacccagaagcatctccaagctcaggcaggaggtgggcagtgaaggggaataccaagcatcctgcacatcaggtagaaggaggaagcccaggccatggcaggacttacctgttgagtcctgctgggtttgggcaatgtctcagcagagactggcatactctcaggcttttcacttccttccttagactgggggcgcctcttgccctgtgcatcttgcacaaagcctggtcctgagtaggtgccctgcaaaggtgcaggggatcaatgggggtgactgagtctaactgaagaaaaagaaggcatttcaagtctctataggttggggactttaatgagtgtaaatagctaccctttattgagcattgtttatgtgtggacactttttatgcatgtatattggaatatttttagctgtaagtaatgataactaacagtgacttaaataagtagttattttctggcataataagaattccaaaggtgctcctttggtctttccatcttggttacaagatggctgtgacaccctgccctcacctccaagttcaaggcaggcaggggttgggaggtgcggacagttcagactcagcagtcctgtttcatcaggaaagcaaaagctctcccagtaactcccagcagagttctactaaatctcattggcccaagggagctgcagtggtaggtaacaaggagcaaatggcttttgggtagccagtcaacagggtctgccatgtgcatagaaagcacagtatgtatttggcatggagtcggtactcaataagcattagctatttggcgtgcctgtgtgtgtttgtgtgtctgcgtgtggttatatgtatattttccattttcccaaacagtccttggaagtagcatcctcctttactaatgggacctaacacacagctggcaaaaggcacagttagagccacacatcagactcatttctttctgactgaagtctgagggctctttccattgccatgctatgttccaccctccccttcaactgcccctctaaagtcttgtcttggagtcacatgaggtccaagtgggcttgatgaagaaagaatagggaaggagatcagatcagtactgttgtccaggctggagcgcagttgattgtagctcactgcagcctccaactccatggctcaagtgatcctcctgcctcagccttccaagtagctaggacaacaggtgcgtgctaccatgcatggctaattaattaaaagaattttttttggtagagacagggtctcactatgttgcccaggctggtcttgaactcctgggctccagtgatcctcccccttcagcctcccaaagtgctagaattacaggcattagccaccatgcctggcctggagatcagttcttttttacttttttttgagacaggctctccctatgtcaccgaggctacagtgcagtggttcaatcgcagctcactgtagcctctatctcctgggctcaagtgatcctcccacctcagcctcctgagtagctgggactagaggcatgtatcaccatgcccagctaatttttgcattttttgtagagtcagggtttcaccctgttgcccactctggtctcaaactcctgggctcaaccaatctgcccacctaggcctcccaaaatgctgggactataggtgtgagccactgcacctggcctggagctcagttctgaaataagttgacacctgtccctggggctatccacagagtaacgatgaagtcatgagaggaggttcaataactgtgtgctagagtcatacctccacctgagtgcagccactttggaatggtcaggctagaaggttcagcctttattctgatgatgccactactgcccagaactcctctgggactctttgcaagttgcaaaagacctcaatctcattactgtaatattgcacctcatttctgaccccaaacccagctgcagcttctcatctcacgaatttcaagtgacttttgactattgccaaaaatcaaaaatcattccctgaaaacagaatctattgtaatttagatgcaaaagaatgtgttgtctgctttgcagccaattttcaaataaaaaagaaatgtttaaagcagtggaagcactgtttaaataaatatgccgggccaggcgtggtggctcacgcctgtaatcccagcactttaggaggccaaggcgggtcgatcacgaagtcaggagatcgagaccaacctggctaacacagtgaaaccccgtctctaccaaaaatacaaaaaattagctgggagtggtggcgggtgcctgtagtcccagctatttgggaggctgaggcaggagaatggcaagaacctgggaggcggagcttgcagtgagccaaggtcacaccactgcactccagcctgggctacagagcgagactctgtctcaaaaaataaataaaataaaataaaataaataaataaataaatatgccctcccaggttgacatcttggaagaggataactctaagtttggttgtataatttctgctgtgtttaagaaaaattacttaacttgtgagacattatgaaaaggatgctggacttggtaaagatacaaatgggcttataatgttggtcaggtgagacatgttgcattggtgaaattataaattgatattgttttctcagagcaatttcgcaatgagcatcacgaagctttaaagagtttaaaccacaccggtcacagtggttcacgcctgtaatcccaatactttgggaggccgaggtgggcagatcacaagtcaggagctagagaccagcctggtcaacatggtgaaaccccttctctactaaaaatacaaaaattagctgggtgtggtggtgcatgcctgtaatcccagctactcgggaggctgaggcaggagcatcgcttgaacctgggaggtggaggttgcagtgagctgagatcgcaccactgcactccagcctgggcggcagagcaagactccctctcaaaaaaaaaaaaaaaaaaaaaaaaaaagaatttaagccagttgacctaggaatcttctaggacgatttcttaggaatctttcttaggaaaacagtcagagatgcagacaaagatttatgtaacagccattcattgcagacttatttgtaaaagtagtaaaaagaaggaaataacccaaatgtcccacaatggagaaattgttaagaaaattacagcatactcattaagtgaaataatgcagctatttaagatgatgtttttaaagaactgtcaatgatgtttgaagatgttcacaataagataggtgataaaacagactataaaaccacatgcattatatagtcccatttttactttctgtatgctaaaacaaacccctcaagatagatccaaaacattaccagtggtttgatctgggtgatgaaattataagtgattttaaacttgcttcattatgcttttatatatataatttttcttattataacaataaatattacttttgtagttagaaaatatgtataatgaacattaaaattacttgttaagaaagaaagaaa

SEQ ID NO: 178113 - DNA, 700 bp, Homo sapiens
  Payload ID: 14946
  Gene Symbol:
  Gene Name: RP11-111M22.2
  ENST ID: ENST00000529331
  CDS Start-End: 25-588
gttcctgtgttgttcagtgccagaatgagtgaccgctatttagaacaaaggattagtatcaaattttgcgtgaaattgaacaagtctgcaagtgagacccaccatcttttaaaagaagcttatggggatgaagtcatgtcaagggccagagtttttgactggcacaaaaggtttaaagaaggacgggaagatgttcgagatgatgcccgaagtgggcgtccagtcacccaccgaacagatgacaatatccagaaggtcaaggacttggtttgttcaaacaggcagttaaccgtgaggatgatggctgaagagttaaatttagacaaagaaactgttaggctcattttgaaagaaaacttgaacatgaggaagatttctgcaaaagttatttcgggtgttttgaagggtgagcctaaaccacgaaaacttgactttcggtccgatctttcaaaggaaactaggaaaaatagctcatgtttgaggaaaaagagacggaacctcactatgttgcccaggctggtctcgaactccttgtctcaagggatcctcccaccttggcctcccaaagctctgggattatcagcatgagccaccatgccaagccaaaaccaggagttcaatggtgtaaattccagtctgagtccacaggccgaagagcgaggagtgctgatgtacaagggcaggagaagatggatgtcac

SEQ ID NO: 178114 - DNA, 2462 bp, Homo sapiens
  Payload ID: 14946
  Gene Symbol:
  Gene Name: RP11-111M22.2
  ENST ID: ENST00000530460
  CDS Start-End: 514-1146
attgcgcatgcgcgcctgtctcccgggacgctagagcaggcggttcctgggctgctccggtaggtttggcgtgcgcgggtttctgcagatctagggcgagcttgcacgttacatcaccgatgcatctcttcttgcttgcttaatttgccaccacttaggcctttcttgcagaattcgccatatactccttaagggccgcggaatcggagcgaccttggtgactggcaaactctcggcagatgtgcgtgcactggtttgatgcagacgtggttgtaggcgatttaatttttcccagctttgcagcgactgttggcttcccagaacggatctccccagcctcgactggaagctgagggacaaaaattcataaaagcaattactctttcccggcgaggcttctagaagagcaagaagagcgatatgattacacctgcagccctataaagattgatctgtccgtctttcccttacagtcgtggcctgttaaacgttcctgtgttgttcagtgccagaatgagtgaccgctatttagaacaaaggattagtatcaaattttgcgtgaaattgaacaagtctgcaagtgagacccaccatcttttaaaagaagcttatggggatgaagtcatgtcaagggccagagtttttgactggcacaaaaggtttaaagaaggacgggaagatgttcgagatgatgcccgaagtgggcgtccagtcacccaccgaacagatgacaatatccagaaggtcaaggacttggtttgttcaaacaggcagttaaccgtgaggatgatggctgaagagttaaatttagacaaagaaactgttaggctcattttgaaagaaaacttgaacatgaggaagatttctgcaaaagttatttcgggtgttttgaagggtgagcctaaaccacgaaaacttgactttcggtccgatctttcaaaggaaactaggaaaaatagctcatgtttgaggaaaaaggtaacaggttctgaaacatggagttatctccagggtgaagctggtggggaaatgcccctgccggtatcccatcccagagtccactactctgccagtcagcttctgcaggcgtcatcttcaacaagccttccccccagggtagctgagaattggttcaccccatggtgagaggaatgtgagttagctgaaccagaactaggatgctgcctcactgttaggcaccttctttggctgctcacgtatttttcagtcttcaccactcctccctatgtgccatggccctcctcattactctttgctggactcttggaccattttccttgctgttctccataactttgaaaaacttttggctgttcccttctggtatttgcttgttcttgatttcttttgctcaacaagtttggatttcttctctgcccagaccttagcttgttgtggctgtcctgttcctttgttctcaaccttctgcctcagaggatcatgccagtgagaagagaggaacaggatctcctggaatctgtatctctgtgcccagggaagcatgcttttctgggaggaccccaaaagaaggcttacagtttcagcctgctttgcagtcagggcctgaggtatggtacagaaggtagtagcatgctggtattactgaacagtgctgggcctaggggctgatctggcccagatgactcagtaggcacccttaggaatcaggggttggccaccaatactgatcttctcacaggcctacacctcacagaagagctgggtttgtttcattctagtcctatgctttggacctccactcatttgggtatcacccctgttggaagaggaggatctggtgctagaaaatataaacccggggacccaggcaaggctgtgttgtgtggggaggaagaccaggtggctctctagtccctgaattaagggagcctgctgcctatgtgcggattcccacacagcagcctgtttttagtaactaatgcctatagttttgagaacttgctgtttttaggacactgctgggcattgacaatgtggaggttatgaacaagatctccaagggctgatgggcttcatggatgagatggttcttgaactggatccatgaggatgggtgagacagggctgtgaaattagggaaagcttccggggcaggtggaacagcatgaggcttccaacctgcatcagtagaaaatgacactggccaggtgtggtgaatcacgcctgtaatcccagcactttgggagactgaggtgggtggatcacaaggtcaagagatcgagaccatcctggccaacatggtgaaaccccgtctctactaaaaatacaaaaattagctgggcgtggtggtgcacacctgtagtcccaactactcaggaggctgaggcaggagaatctgttgaacccggaaggcagaggttgcagtgagtggagattgcgccactgtactccaacctggcgacagagctagactctgtccc

SEQ ID NO: 178115 - DNA, 451 bp, Homo sapiens
  Payload ID: 14947
  Gene Symbol:
  Gene Name: RP11-11N7.5
  ENST ID: ENST00000489705
  CDS Start-End: 1-131
caattctggggtcagaagccatggagtcagcattatcaccaaggatattattgaatacccaaataaaacgaactgatacatatttctccaaaaccttcacaagaagtcgactgttttctttagtaggctaactttttaaacattccacaagaggaagtgcctgcgggttccttttttagaagcttttctgtccatgtgaatgtgctgtgtggaagagttaaagggcccaactaaatgttccagtgattccaatagctatttagctggtacctactgctatatcacctagtgtgacatttcggaattaatggaacaatgaaggaagctgtacactggaggttccaggtggtcatggaaggtttccagtttatgcaaacttctgtgaaaatgagctttgttattggtgaagacattggaaattttaccagccaaaacagagtttctctcttat

SEQ ID NO: 178116 - DNA, 496 bp, Homo sapiens
  Payload ID: 14947
  Gene Symbol:
  Gene Name: RP11-11N7.5
  ENST ID: ENST00000475997
  CDS Start-End: 1-194
ctggccgtggtagttactcaaacagagggaactacaacagaggtggaatgcccaacagagggaactacaaccagaacttcagaggacgaggaaacaatcgtggctacaaaaatcaatctcagggctacaaccagtggcagcagggttctgtccatgtgaatgtgctgtgtggaagagttaaagggcccaactaaatgttccagtgattccaatagctatttagctggtacctactgctatatcacctagtgtgacatttcggaattaatggaacaatgaaggaagctgtacactggaggttccaggtggtcatggaaggtttccagtttatgcaaacttctgtgaaaatgagctttgttattggtgaagacattggaaattttaccagccaaaacagagtttctctcttattcagggtaagatgtaattgcagtgtgctagcgctggaagggacctgttttatatgttatgtatgttacacgtcagccctccatgt

SEQ ID NO: 178117 - DNA, 462 bp, Homo sapiens; identical to SEQ ID NO: 103623
  Payload ID: 14948
  Gene Symbol:
  Gene Name: RP11-1212A22.4
  ENST ID: ENST00000327792
  CDS Start-End: 1-462

SEQ ID NO: 178118 - DNA, 1547 bp, Homo sapiens; identical to SEQ ID NO: 116860
  Payload ID: 14948
  Gene Symbol:
  Gene Name: RP11-1212A22.4
  ENST ID: ENST00000427999
  CDS Start-End: 412-1521

SEQ ID NO: 178119 - DNA, 699 bp, Homo sapiens; identical to SEQ ID NO: 103627
  Payload ID: 14948
  Gene Symbol:
  Gene Name: RP11-1212A22.4
  ENST ID: ENST00000531453
  CDS Start-End: 1-699

SEQ ID NO: 178120 - DNA, 671 bp, Homo sapiens
  Payload ID: 14948
  Gene Symbol:
  Gene Name: RP11-1212A22.4
  ENST ID: ENST00000528301
  CDS Start-End: 1-671
atcgtcatcgtgggactgactttggtggaagtccttggttacttatcattactgtgtttctgagaagttataaatttgccatctccctctgcacaagttacctttgtgtgtctttcctgaagactatcttcccgtctcaaaatggacatgatggatccacggatgtacagcagagagccaggaggtccaactgccgtagacaggaaggaattaaaattgtcctggaagacatctttactttatggagacaggtggaaaccaaagttcgagctaaaatccgtaagatgaaggtgacaacaaaagtcaaccgtcatgacaaaatcaatggaaagaggaagaccgccaaagaacatctgaggaaactaagcatgaaagaacgtgagcacggagaaaaggagaggcaggtgtcagaggcagaggaaaatgggaaattggatatgaaagaaatacacacctacatggaaatgtttcaacgtgcgcaagcgttgcggcggcgggcagaggactactacagatgcaaaatcaccccttctgcaagaaagcctctttgcaaccgggtaagtttgcttgttttccttgcttttggacatagtctgccaggtcaggacatggatacatttttctccctacggctctgtgctcaagccctgcagagggagatggcagagagg

SEQ ID NO: 178121 - DNA, 1522 bp, Homo sapiens; identical to SEQ ID NO: 116861
  Payload ID: 14948
  Gene Symbol:
  Gene Name: RP11-1212A22.4
  ENST ID: ENST00000545114
  CDS Start-End: 308-1006

SEQ ID NO: 178122 - DNA, 240 bp, Homo sapiens; identical to SEQ ID NO: 125944
  Payload ID: 14949
  Gene Symbol:
  Gene Name: RP11-1236K1.1
  ENST ID: ENST00000437818
  CDS Start-End: 1-240

SEQ ID NO: 178123 - DNA, 2107 bp, Homo sapiens
  Payload ID: 14950
  Gene Symbol:
  Gene Name: RP11-123K3.4
  ENST ID: ENST00000548184
  CDS Start-End: 1-195
tattttgggatggaccacaatgttgatcaaactgggaaagctgtcatcatcaacaaaactagtaacacaagaatccctgaacagaggttctcagaacatataaaggatgagaagaatacagaatttcaacagaggttcattctcaagagagatgatgccagtatggaccgagatgataaccagggggaaccgtgaaggactgagccgcacctcaagcagccgccagagcagcacagacagcgaactcaaatccctggagccacgcccttggagcagcacagactctgatggctctgtccggagcatgcgaccccctgtcaccaaagctagcagcttcagtggaatctctatccttacccgaggtgacagcatcggcagcagtaaaggcggcagtgcgggaaggatctccaggccaggtatggcactaggtgccccagaagtgtgcaaccaggtcacctcatcccagtctgtccgggggcttctcccttgtactgcccagcagcaacagcagcagcagcagcagcaacttcctgctctcccacccacgcctcagcaacagccacccttgaataatcacatgatctcacaggcagatgacctcagcaacccctttggacaaatgagccttagtcgccaaggttctactgaagcagctgacccatctgcagctctattccagaccccacttatctcccagcaccctcagcagactagcttcatcatggcttccacgggtcagcccctccccacttccaactattccacctctagccatgcaccacctactcagcaagttctgccaccccaggggtacatgcagccccctcaacagatccaggtttcttactatccccctggacaatatcctaactccaaccagcaatatcgacctctctctcacccggtggcctatagcccccaacgtggtcagcagctgcctcagccatcccagcagcctggtttacagcccatgatgcctaaccagcagcaggcggcttaccaaggcatgattggggtccagcagccacagaaccagggcctgctcagcagccagaggagcagcatggggggccagatgcaaggcctggtggttcagtacactccactgccttcttaccaagttccagtgggtagtgactcgcaaaatgtggtccagccgcctttccagcaacccatgctggtccctgtgagccagtctgtgcaaggaggcctcccagcagcgggggtaccagtgtactatagcatgatcccacctgctcagcagaacggtacgagcccttctgtagggtttctgcaaccccctggctctgagcagtaccagatgcctcagtctccctctccctgcagtccaccacagatgccacagcagtactcaggagtgtcaccttctggaccaggtgtagtggtcatgcagctgaatgtccctaatggaccccagccccctcagaacccatccatggtccagtggagtcattgtaaatactacagcatggaccagcgggggcagaagcctggagacctgtacagtcctgacagcagcccccaggccaacacacaaatgagcagcagccctgtcacatctcctacccagtctccagcaccctctcctgtcaccagcctcagcagtgtctgcacaggactcagtcccctgcctgtcctcacacagttcccccggcctgggggtccagcacagggtgatgggcgctactcccttttgggccagccattacagtacaatctgtccatctgccctcccttgctccatggccagtcaacttacacggtgcaccagggacagagtggactgaagcatggaaaccggggcaagagacaagcactcaaatctgcctccactgacctggggacagcagatgttgccctgtcatttcagccctgacaccaaggcaggaggctaggaggtctacaaatagcgactgggtagctggtgtgaacacagggggtactgggggggcttagcccccaaggaagaggaccagtttttccccagcaccaccatcaaggcctcgaggctcccagctccctctacagcctgtggactgacttagggaatcccgaacgatgacagaaaaggaggtgctggagtccc

SEQ ID NO: 178124 - DNA, 545 bp, Homo sapiens
  Payload ID: 14951
  Gene Symbol:
  Gene Name: RP11-125O5.2
  ENST ID: ENST00000543498
  CDS Start-End: 1-284
agtatggttggtctgcatctaagactaactttttgttggtcttagatgctttcctctgtgcagttggacttacctcatattccgtgctggtgattaggattgttcaacctgaattgaaagcacttgcaatcggcttccattcaatgattatgcgatcgctaggaggtattctagttccaatatattttggggctctgattgatacaacgtgtatgaagtggtccaccaacagctgtggagcacgaggggcttgtaggatatataattccacatatttggggtgattgtttcaaactgagcatcaacaacaaaaacatttgtatgatatctatatttcaatcatggaccaaaatcaacatttgaataaaacagcagaggcacaaccttcagagaataagaaaacaagatactgcaatggattgaagttacaggtattctaaagaaactaatatcaattcatcagaaaattcaacatcgaccttatccacttgtttaattaatcaaattttatcactcaatagagcatcacctgagatagtgggaaa

SEQ ID NO: 178125 - DNA, 581 bp, Homo sapiens
  Payload ID: 14951
  Gene Symbol:
  Gene Name: RP11-125O5.2
  ENST ID: ENST00000592513
  CDS Start-End: 1-190
gattgttcaacctgaattgaaagcacttgcaatcggcttccattcaatgattatgcgatcgctaggaggtattctagttccaatatattttggggctctgattgatacaacgtgtatgaagtggtccaccaacagctgtggagcacgaggggcttgtaggatatataattccacatatttgggttactgaagagacattttcaccagtatcttctaggtatgagacactattcttggaactgagtatacagcagtgaacaaataaaacaaaaacctatccttgttcttctggagattcctctgcagtgtaacttcatggtttttgaggcaaaggaaggctggcagtaaacaaaatatagcaatgacataataaggtggttaatcatcactggacttgttttcaaaaagccaactactttaagaggaataaagggtggacttgttgcagttgctgtaggattctaaatccaggtgattgtttcaaactgagcatcaacaacaaaaacatttgtatgatatctatatttcaatcatggaccaaaatcaacatttgaataaaacagcagaggcacaaccttcag

SEQ ID NO: 178126 - DNA, 600 bp, Homo sapiens
  Payload ID: 14951
  Gene Symbol:
  Gene Name: RP11-125O5.2
  ENST ID: ENST00000590779
  CDS Start-End: 1-236
tctgtgcagttggacttacctcatattccgtgctggtgattaggattgttcaacctgaattgaaagcacttgcaatcggcttccattcaatgattatgcgatcgctaggaggtattctagttccaatatattttggggctctgattgatacaacgtgtatgaagtggtccaccaacagctgtggagcacgaggggcttgtaggatatataattccacatatttgggtatcttctaggtatgagacactattcttggaactgagtatacagcagtgaacaaataaaacaaaaacctatccttgttcttctggagattcctctgcagtgtaacttcatggtttttgaggcaaaggaaggctggcagtaaacaaaatatagcaatgacataataaggtggttaatcatcactggacttgttttcaaaaagccaactactttaagaggaataaagggtggacttgttgcagttgctgtaggattctaaatccaggtgattgtttcaaactgagcatcaacaacaaaaacatttgtatgatatctatatttcaatcatggaccaaaatcaacatttgaataaaacagcagaggcacaaccttcag

SEQ ID NO: 178127 - DNA, 519 bp, Homo sapiens
  Payload ID: 14951
  Gene Symbol:
  Gene Name: RP11-125O5.2
  ENST ID: ENST00000593147
  CDS Start-End: 1-291
gctttcctctgtgcagttggacttacctcatattccgtgctggtgattaggattgttcaacctgaattgaaagcacttgcaatcggcttccattcaatgattatgcgatcgctaggaggtattctagttccaatatattttggggctctgattgatacaacgtgtatgaagtggtccaccaacagctgtggagcacgaggggcttgtaggatatataattccacatatttgggaagagccttcttcggcttgaagtatcttctaggtatgagacactattcttggaactgagtatacagcagtgaacaaataaaacaaaaacctatccttgttcttctggagattcctctgcagtgtaacttcatggtttttgaggcaaaggaaggctggcagtaaacaaaatatagcaatgacataataaggtggttaatcatcactggacttgttttcaaaaagccaactactttaagaggaataaagggtggacttgttgcagttgctgtaggattctaaatccag

SEQ ID NO: 178128 - DNA, 594 bp, Homo sapiens
  Payload ID: 14951
  Gene Symbol:
  Gene Name: RP11-125O5.2
  ENST ID: ENST00000585342
  CDS Start-End: 1-270
ttcctctgtgcagttggacttacctcatattccgtgctggtgattaggattgttcaacctgaattgaaagcacttgcaatcggcttccattcaatgattatgcgatcgctaggaggtattctagttccaatatattttggggctctgattgatacaacgtgtatgaagtggtccaccaacagctgtggagcacgaggggcttgtaggatatataattccacatatttggggtatgagacactattcttggaactgagtatacagcagtgaacaaataaaacaaaaacctatccttgttcttctggagattcctctgcagtgtaacttcatggtttttgaggcaaaggaaggctggcagtaaacaaaatatagcaatgacataataaggtggttaatcatcactggacttgttttcaaaaagccaactactttaagaggaataaagggtggacttgttgcagttgctgtaggattctaaatccaggtgattgtttcaaactgagcatcaacaacaaaaacatttgtatgatatctatatttcaatcatggaccaaaatcaacatttgaataaaacagcagaggcacaaccttcag

SEQ ID NO: 178129 - DNA, 3422 bp, Homo sapiens
  Payload ID: 14952
  Gene Symbol:
  Gene Name: RP11-12J10.3
  ENST ID: ENST00000494792
  CDS Start-End: 1-605
agcattgggatgctgtctatgagagagaactgcaaactttccgagaatatggagatacaggtgaaatctggtttggagaagagagtatgaatcgactaataaggtggatgcagaaacacaagattccactggatgcttcagtgcttgatattggaactggaaatggtgttttcctggttgaacttgcaaaatttggtttctctaatattactggaattgattactctccttctgcaattcagctttctggaagtattatagaaaaagaaggtttatctaacattaagttaaaggtagaagactttttgaatctctccacacagctgtctggatttcatatttgtattgacaaagggacttttgatgccataagccttaatcctgacaatgcaattgagaagaggaagcaatatgtgaaatctctctccagggtgttgaaagtaaaaggcttttttctaataacgtcatgtaattggaccaaggaagagttgctaaatgaattcagtgaaggatttgaacttctcgaagagctaccaacacccaagttcagctttggaggcagatctggaaacagtgtagcagcattggttttccaaaaaatgtgagactttttcttggacgaattcagggagttgaccacatttggccatttcccagaagggccccaccccaagggtgagtggccaatggggagctgtttctgctgacatcaattccccaggaggtactcaccccaagtctgcccaagtgaagatggctgatacccaccctgggatggagcccagcgcctgaggcccttatcatggtgatggtcctaagtgaaagcctcagcacccggggagctgactccattgcatgtgggaccttcagccgtgaactgcacacgccaaagaagatgagtcaaggacctacacttttctcttgtggaattatggaaaatgacagatggcgagacctggacaggaaatgccctcttcagattgaccaaccgagcaccagcatctgggaatgcctgcctgaaaaggacagctcactatggcaccgggaggcagtgaccgcctgcgctgtgaccagtctgatcaaagacctcagcatcagcgaccacaacgggaacccctcagcaccccctagcaagcgccagtgccgctcactgtccttctccgatgagatgtccagttgccggacatcatggaggcccttgggctccaaagtctggactcccgtggaaaagagacgctgctacagcgggggcagcgtccagcgctattccaacggcttcagcaccatgcagaggagttccagcttcagcctcccttcccgggccaacgtgctctcctcaccctgcgaccaggcaggactccaccaccgatttggagggcagccctgccaaggggtgccaggctcagccccgtgtggacaggcaggtgacacctggagccctgacctgcaccccgtgggaggaggccggctggacctgcagcggtccctctcttgctcacatgagcagttttcctttgtggaatactgtcctccctcagccaacagcacacctgcctcaacaccagagctggcgagacgctccagcggcctttcccgcagccgctcccagccgtgtgtccttaacgacaagaaggtcggtgttaaaaggcggcgccctgaagaagtgcaagagcagaggccttctctagaccttgccaagatggcacaggcagcacagtgcagacttctgctgcgtgagtgagttgcgggggccccagaagcacgaagcccagcccggcgtggcccactgtctcccgtgcatggccctctgcttacccggactcaggagaagggcgtgtttgcggcctggaggacaggcgtggagaggtttgcttgatttccataactcaacacttgcccacacaatctgcccatggaagtctggcctagaatgcttgttagggccagagcagcccctctgggaatgaggctctgtagcccccgcttttcttttggtttttgcttttagcaagattttttttttttaagtctatgagcactgaactcaagaaacaaacatgtgaagtggggctgctggggggaggtgagccccttgtcctcactgccatccctgcagccctgccttacccaaggcctagggactcactgattcgaggctggatgcattgacttccccagcacaccctcccctcacccctgcctccgtatctgacagatgactggtgggccaggggctggcggggggcttctacccagcgcagtgcccccacccttgtgccccacctgagggtagggcacagagtggccctggaattacctctggcccttaccagccccttgctgcccccaatccctagatgaggtccctggctggatggatagctccgttctgcccccacgtggggcctggccccaggcctcacccccagtgcagtgcccaggccaggcacaggtgcttctgacatggggcacacgtgtagtctccttacctgcacagcgatcataaccctgtgggcttacgagagagactcagccactctgtccagtgtgcagggaaagggctggaaggaagaaggccgaaaggaaaggccccagagagcacagtgctcagactcccgggtgacttctggtttctttttatatacttctgttaaatttcctgtaataacacatgctgcttttataatgttaaaaaaaccacgtagaatgtaggctgccccgtgtgttcacctcctaaaccaggacagttctgaggggcagctggaactgttgacacgcactctggcacgggaggcggacccaagagcacccaccccagaggggcaccacactcgcccgtcccgccctgtgtccccacctctgccctgaggtgaacacaggaggctttccacctgccagctgccagccaacctccccgagaggggcaggaaccgaccagcaggacagacccacccaggacagcggcaccaggtcaggcctcagcctttccgatcctctggagggctcaagccgaacggaaggagggaagaactgcagtcacctgggccggtggcgctcacatctgacgtggaggcctctgcttcacttggcccagttcccagccttgtcggcagtgaggacatggaccctcgctggcatccgtcctccgtctggcacaacgtgccgtgttctctctggttagggtttgggtgggacggagactgcgcccctgttcctggtccgcctaagtctctgccagtctgagtctcgtgggccttttctgcaggccctggggttgcggagcaggcagggggacgtcggtggctgggggacatcccgccacctgccaagtagctgcaatgggaagagatgcggttcccgtgacagccaggcctggatgttcaagtcatgtgagaccaccaaataccttgttgcactaagcc

SEQ ID NO: 178130 - DNA, 950 bp, Homo sapiens
  Payload ID: 14953
  Gene Symbol:
  Gene Name: RP11-136C24.3
  ENST ID: ENST00000443313
  CDS Start-End: 111-431
atcggcgagtggcgcccaccatctctgcttgctgaaaagctgcagaggccgccaggagcccacgcacctgagacttttacctttacccagaaaggaataaaagaggtcagatgatgacagctgtgtccttaacaaccaggccccaggaatcagtggcttttgaggacgtggctgtgtacttcactacgaaggaatgggccatcatggtgcctgccgagagggccttgtacagggatgtgatgctggagaactatgaggctgtggcctttgtagtgccacccacttccaaaccagctttggtctctcatctggagcaagggaaagagtcctgtttcacccagccacagggagtcctaagcaggaatgactggagagcaggctggataggtccacgaccgcttggatcgctactgctgtggcttcgagcctgagccctcagacccctgtgtggaagagaggctccgagagaaatgccagaacccagccgagctgcggctggtccacatcctggtccggagcagcgatccatctcacctggtctacatcgataacgctggcaaccttcagcaccctgaggacaagctgaactttcggctgctggagggcatagatgggtgagggtcaaaagggttgggtggaagttcatgggactgagacctgatggccttgctgcaaaccttgggaccttcaactgtggccctgagaagcccacagtccatcagacagaagttattggatcagaactttaggcggtggtggggagccctgggaaagctgagaggggatacagttggcagggcctaccccaatatccagagggcctcgtgcctgcagaatactagctgtattgctggggtgtgggaaggctagtccttcccttgttctgggtgagagagctaggccagagagtctacccctcccagctcactcttggcaggcagctctgcctt

SEQ ID NO: 178131 - DNA, 554 bp, Homo sapiens
  Payload ID: 14953
  Gene Symbol:
  Gene Name: RP11-136C24.3
  ENST ID: ENST00000446977
  CDS Start-End: 252-554
atcagttattttcgcctgccatagtgtacaccagtcttgaaacttgttactgtcgtagagcaaccaaaaatttgagaataccgaattgtattccctacccgtccccaggatgtcccattttggaaaatatggagccctgcgatctggattggctcataagaatgttaaatctaaaaagactgatcgtatccgtcatgcacctaatcacctgagacttttacctttacccagaaaggaataaaagaggtcagatgatgacagctgtgtccttaacaaccaggccccaggaatcagtggcttttgaggacgtggctgtgtacttcactacgaaggaatgggccatcatggtgcctgccgagagggccttgtacagggatgtgatgctggagaactatgaggctgtggcctttgtagtgccacccacttccaaaccagctttggtctctcatctggagcaagggaaagagtcctgtttcacccagccacagggagtcctaagcaggaatgactggagagcaggctggataggcgtcttggctccggagaaagctgcg

SEQ ID NO: 178132 - DNA, 1221 bp, Homo sapiens
  Payload ID: 14954
  Gene Symbol:
  Gene Name: RP11-140L24.4
  ENST ID: ENST00000555531
  CDS Start-End: 46-540
attctcagttttgctggaggccgcaaccaggcccgcgccgccaccatgtttcgaaatcagtatgacaatgatgtcactgtttggagcccccagggcaggattcatcaaattgaatatgcaatggaagctgttaaacaaggttcagccacagttggtctgaaatcaaaaactcatgcagttttggttgcattgaaaagggcgcaatcagagcttgcagctcatcagaaaaaaattctccatgttgacaaccatattggtatctcaattgcggggcttactgctgatgctagactgttatgtaattttatgcgtcaggagtgtttggattccagatttgtattcgatagaccactgcctgtgtctcgtcttgtatctctaattggaagcagtatcctttttatgatatgggccctcacattttccaaacctgtccatctgctaactattttgactgcagagccatgtccattggagcccgttcccaatcagctcgtacttacttggagagacatatgtctgaatttatggagtgtaatttaaatgaactagttaaacatggtctgcgtgccttaagagagacgcttcctgcagaacaggacctgactacaaagaatgtttccattggaattgttggtaaagacttggagtttacaatctatgatgatgatgatgtgtctccattcctggaaggtcttgaagaaagaccacagagaaaggcacagcctgctcaacctgctgatgaacctgcagaaaaggctgatgaaccaatggaacattaagtgataagccagtctatatatgtattatcaaatatattttctggcatccttaaatcttgtgtcaaggattggttataatataaccagaaaccatgacggcggctgagaacgtatgctacacgttaattaacgtgccaatggattcagaaccaccatctgaaattagcttaaaaaatgatctagaaaaaggagatgtaaagtcaaagactgaagctttgaagaaagtaatcattatgattctgaatggtgaaaaacttcctggacttctgatgaccatcattcgttttgtgctacctcttcaggatcacactatcaagaaattacttctggtattttgggaaattgttcctaaaacaactccagatgggagacttttacatgagatgatccttgtatgtgatgcatacagaaaggatcttcaacatcctaatgaatttattcg

SEQ ID NO: 178133 - DNA, 1620 bp, Homo sapiens; identical to SEQ ID NO: 116410
  Payload ID: 14955
  Gene Symbol:
  Gene Name: RP11-141O19.1
  ENST ID: ENST00000634648
  CDS Start-End: 1-819

SEQ ID NO: 178134 - DNA, 935 bp, Homo sapiens
  Payload ID: 14956
  Gene Symbol:
  Gene Name: RP11-145E5.5
  ENST ID: ENST00000404796
  CDS Start-End: 114-545
ctccgcactgctcactcccgcgcagtgaggttggcacagccaccgctctgtggctcgcttggttcccttagtcccgagcgctcgcccactgcagattcctttcccgtgcagacatggcctctggcaccaccaccaccgccgtgaagattggaataattggtggaacaggcctggatgatccagaaattttagaaggaagaactgaaaaatatgtggatactccatttggcaagccatctgatgccttaattttggggaagataaaaaatgttgattgcgtcctccttgcaaggcatggaaggcagcacaccatcatgccttcaaaggtcaactaccaggcgaacatctgggctttgaaggaagagggctgtacacatgtcatagtgaccacagcttgtggctccttgagggaggagattcagcccggcgatattgtcattattgatcagttcattgacaggactatttgccacgacatttcaaaggattccaagagagaatattggtgtccatgctgtgatgattcctcagctcctctcatctgatctccgtcctggcccccatgactttctttgtggtagttagggtgtggtatgtgccactgaggcccacacctattgctgcaatttatagcactgatctgtcatcaataccacttgctgtcttggatgtgaagatgatttttcctgcagggattccctctacaaaattaaaaacactgggcatgtggaaataatattcatgctttaaattgtcttttctcttcactacaccaggggtccccaacccctaggccacagactgtggccctagtgtagtgaatagaaaagacaatttaaagcgtgaatattatttcctcatgcccagtgtttttaattttgtactggtctgtggcttgttagaaaccaggctgcacagcagaaggtgggcagcag

SEQ ID NO: 178135 - DNA, 3406 bp, Homo sapiens
  Payload ID: 14957
  Gene Symbol:
  Gene Name: RP11-146B14.1
  ENST ID: ENST00000536108
  CDS Start-End: 153-2594
atggctgacatgatggtctgtgacctgaaagttgttgaatagttggagtgttctgcattcatgtggaagaggctaaaggatgtttgatgaagcactatgggctgccctggaagaggactgaagaagcagctgcagacactgccctaaccatcatggaggtggccgaggtggaaagtcctctgaaccccagctgtaagataatgaccttcagaccctccatggaggagttccgggagttcaacaaataccttgcatacatggagtctaaaggagcccatcgtgcgggtcttgcaaaggtgattcctcctaaggagtggaagccaagacagtgctatgatgacattgataatttgctcattccagcaccaattcagcagatggtcacagggcagtcaggactgttcactcagtacaacatccagaaaaaagcgatgactgtgaaggagttcaggcagctggccaacagtggcaaatattgtactccaagatacttggattacgaagatttggagcgcaagtactggaagaacttaacttttgtggcacctatctatggtgcagatattaatgggagcatatatgatgagggtgtggatgaatggaacatagctcgcctcaatacagtcttggatgtggttgaagaagagtgtggcatttctattgagggtgtaaataccccatatctctattttggcatgtggaagaccacgtttgcatggcacaccgaagacatggacctctatagcattaattatctccactttggagagcccaagtcttggtatgctatacctccggagcatggaaaacgacttgaaagactagctcaaggttttttcccaagcagctcccaagggtgtgatgcatttcttcgccacaagatgacattgatttctccatcagtattgaagaaatatggtattccctttgacaagataacccaggaggctggagaattcatgatcactttcccatatggctaccatgctggttttaatcatggtttcaactgtgcagaatctacaaattttgctactgtcagatggattgactatggaaaagttgccaaattgtgcacttgcaggaaagacatggtgaagatttcaatggatatctttgtgaggaaatttcagccagacagatatcagctttggaaacaaggaaaggatatatacaccattgatcacacgaagcctactccagcatccacccctgaagtaaaagcatggctgcagaggaggaggaaagtaagaaaagcatcccgaagcttccagtgtgctaggtctacctctaaaaggcctaaggctgatgaggaagaggaagtgtcagatgaagtcgatggggcagaggtccctaaccccgactcagtcacagatgacctcaaggtcagtgaaaagtcagaagcagcagtgaagctgaggaacacagaagcatcttcagaagaagagtcatctgctagcaggatgcaggtggagcagaatttatcagatcatatcaaactctcaggaaacagctgcttaagtacatctgtaacagaagacataaaaactgaggatgacaaagcttatgcatatagaagtgtaccttctatatccagtgaggctgatgattccattccattgtctagtggctatgagaagcccgagaaatcagacccatccgagctttcatggccaaagtcacctgagtcatgctcatcagtggcagagagtaatggtgtgttaacagagggagaagagagtgatgtggagagccatgggaatggccttgaacctggggaaatcccagcggtccccagtggagagagaaatagcttcaaagtccccagtatagcagagggagagaacaaaacctctaagagttggcgccatccacttagcaggcctccagcaagatctccgatgactcttgtgaagcagcaggcgccaagtgatgaagaattgcctgaggttctgtccattgaggaggaagtggaagaaacagagtcttgggcgaaacctctcatccacctttggcagacgaagtcccctaacttcgcagctgagcaagagtataatgcaacagtggccaggatgaagccacactgtgccatctgcactctgctcatgccgtaccacaagccagatagcagcaatgaagaaaatgatgctagatgggagacaaaattagatgaagtcgttacatcggagggaaagactaagcccctcataccagagatgtgttttatttatagtgaagaaaatatagaatattctccacccaatgccttccttgaagaggatggaacaagtctccttatttcctgtgcaaagtgctgcgtacgggttcatgcaagttgttatggtattccttctcatgagatctgtgatggatggctgtgtgcccggtgcaaaagaaatgcgtggacagcagaatgctgtctctgcaatttgagaggaggtgctcttaagcaaacgaagaacaataagtgggcccatgtcatgtgcgccgttgcggtcccagaagttcgattcactaatgtcccagaaaggacacaaatagatgtaggcagaatacctttacagaggttaaaattgggaaggctgggaatctagacacagcaacagtaacaacaacaacaataacaatgaaggctcactgtgaaaacatcaattcattaggaaagttacatcccctccgccactgtttcagatgctgtttctcattctccatgggagcagccagcatcgtgtttaggatggggatacaatagcctgagctcctgattgagtcagaccctggactttcccttttgtatctgtcattttcctctggatcctcacacctttgtgtttaatttttttaaatttcatttgttgacttcctatgtggggtaaaatgacttcctttgattaatgtactttctgtatcctagagtttccctttccctttgtgatttagtccaacgtgtcctactacagcctcaaaaattgtcattggaatcaaaagctttccaaggtgcatcaggttaatgatttggatgcatcctgaggttgtctcctgtagcatggaggcattataataggagtctcagaagttacaccatttttctacagcacatcacaggcccagaggcttgaatctaagagaatccactctatgtctgtcagcctgaatccttccttcttgctgcacaacaaagcaactgaacgtattttgagtttaggtgaaaactatcactcattcatcaaagttctatctgggtgatatatgctatcgaaacagatgtggacactgggctgacagatgttgagaacggacctgttgctgaagctcatgttatcacacatgctgtgggaagagaggtcattggcattcaagatgcaacacctacaatatggtgaattaaagatgccatttgcatgga

SEQ ID NO: 178136 - DNA, 2046 bp, Homo sapiens
  Payload ID: 14958
  Gene Symbol:
  Gene Name: RP11-14J7.7
  ENST ID: ENST00000335950
  CDS Start-End: 1-258
aaaaaggagcatgtcttcatccatgagaggcctcgaaaaatcaatggtatttgcatttctcccaagaaggttgcttgccaaaacctttcggccattttctgctttcagagtgagacaaagttcaaaatgacagtctgtcagctcattgaaggcacaagataccctgcctgcaggtaccactattcccccacagaggggtttgttcttgtcacttgtgatgacttgaggccagatagtttccttggctatgttaaataactcaagatcagctcccgagtctgagatctcttctctcaatggcattggagctggctgtgcctgaggcagacctggaccgtggacatggggcaatgccttgagcggaaggggaagccactgaattttgggtgtcaccaggtaaacagagccctcagcatctgaatagaaactgaacaggaacagaagagattacactacatctgagatggagacctttcctctgctgctgctcagcctgggcctggttcttgcagaagcatcagaaagcacaatgaagataattaaagaagaatttacagacgaagagatgcaatatgacatggcaaaaagtggccaagaaaaacagaccattgagatattaatgaacccgatcctgttagttaaaaataccagcctcagcatgtccaaggatgatatgtcttccacattactgacattcagaagtttacattataatgaccccaagggaaacagttcgggtaatgacaaagagtgttgcaatgacatgacagtctggagaaaagtttcagaagcaaacggatcgtgcaagtggagcaataacttcatccgcagctccacagaagtgatgcgcagggtccacagggcccccagctgcaagtttgtacagaatcctggcataagctgctgtgagagcctagaactggaaaatacagtgtgccagttcactacaggcaaacaattccccaggtgccaataccatagtgttacctcattagagaagatattgacagtgctgacaggtcattctctgatgagctggttagtttgtggctctaagttgtaaatcccacagagctttaggactagggtcttactaaagaaggacctcttcttgttcattcttgtttaaacctttccttaatatctactctttagcactatagtgaactcctgattatttattctaactggaggagtgaaaaatccaaaattgtggataattcaattaaaagttatgactgatactggcgtgcagattcttctctctctatctctctctctgtgtggggggagggtggggagggtgtaaaacaaactgaatttcatcctagctcagctataaagccaagaaacagaatccacctaactaggcagaattaaggaaacaaggactaaagccaatatggacaatgaaaagctaattgtactgccaatgatactattcagaaaaatagtgaatgagtgtgacatatattattatcactactctcttcaaagggtatgtgctcacacttgtgtgaattgatgtatgcacataacaaagagtctgcctgtccttcaggaaatgccagaggaaaaagattctttggctgagctgatgctctcagtgtcaatagctccagccctatgcaatctccattcttccacccccatctctatttcacaggttgctgtaaagagaagaaaattcttattgtaatctttattcaagccaagtcttgataccctggggctgtgggagaggaatggcaagccatggaagaatagaggagccagaaagatgggaatagaaagtctgtgctaagtaccaggcaggactggtcttcaaccttgatgtcttatgatactgtagttaattttgttcactaccagctatttatttgcaaacgttcgtggttcaacattctgcttaaagtatggacagttatcttcttcatcgatgtgtggccatatgtttctattcctctccttaaatcctccctccatcctgagaccactctttcttaatgttctaattttaactaaatgcatgtaaatgtatgtaaa

SEQ ID NO: 178137 - DNA, 578 bp, Homo sapiens
  Payload ID: 14958
  Gene Symbol:
  Gene Name: RP11-14J7.7
  ENST ID: ENST00000555283
  CDS Start-End: 291-578
agctttcgccggccgcgcgcacggcggtcggtacctgttaaggacgagatgccttccgaccaccggataactcgggacggtccctgatttgcctgctccctgtccaacagcatcttcggctcactcggaagtgaaaacatgcaatttcatgttataacatgcaatttcatgtcataaattattcccactgacgcctgaacatttttcctaaaagggatctgcagtcacaaggcgccgccttccggaatttagcagtcaaagccaaagatgcgaagtcactcttacctctgatgataataatggtgataattttcttggtgcttctgttctgggaaaatgaggtgaatgatgaagcagtgatgtcaactttagaacacttgcatgtggactaccctcagaatgacgttcccgttcctgcaagaagagattacactacatctgagatggagacctttcctctgctgctgctcagcctgggcctggttcttgcagaagcatcagaaagcacaatgaagataattaaagaagaatttacagacgaagagatgcaatatgacatggcaaaaagtggccaagaa

SEQ ID NO: 178138 - DNA, 880 bp, Homo sapiens
  Payload ID: 14959
  Gene Symbol:
  Gene Name: RP11-152F13.10
  ENST ID: ENST00000562833
  CDS Start-End: 1-880
tcgaagctcccaaagaccccttcagcatagagagagaggccaggctgcaccgacaagctgcagctgtgaatgaagccacctgtacctggagtggccagcttcctccccggaactataagaaccccatctactcttgcaaggtgtttctaggaggtgttccttgggatattacagaagctggattagttaacaccttccgtgtttttggctctttgagtgtggagtggcctggtaaggatggcaagcatccccggtgtcctcccaaagggtatgtgtatctggtcttcgaactagagaagtctgtccgatccttgcttcaggcttgctctcatgacccgctgagcccagatggcctgagtgaatattatttcaagatgtccagccgaaggatgcgctgcaaggaggtgcaggtgatcccctgggtattagccgacagtaactttgtccggagcccatctcagaggcttgaccccagcaggacggtgtttgtcggtgctctgcatggaatgctaaatgctgaggccctggcagccatcttgaacgacctatttggtggagtggtgtatgccgggattgacacagataagcacaagtatcccattggttctggtcgtgtgactttcaataaccaacggagttacctgaaagcagtcagcgctgcttttgtggagatcaaaaccaccaagttcacaaagaaggttcagattgacccctacctagaagattctctgtgtcatatctgcagttctcagcctggtcctttcttctgtcgagatcagggccgcgttcgcaccaaaaccgtgaagaaggcggcccgggtcatcatagaaaagtactacacgcgcctgggcaacgacttccacacgaacaagcgcgtgtg

SEQ ID NO: 178139 - DNA, 880 bp, Homo sapiens; identical to SEQ ID NO: 178138
  Payload ID: 14959
  Gene Symbol:
  Gene Name: RP11-152F13.10
  ENST ID: ENST00000633171
  CDS Start-End: 1-880

SEQ ID NO: 178140 - DNA, 889 bp, Homo sapiens
  Payload ID: 14960
  Gene Symbol:
  Gene Name: RP11-156P1.2
  ENST ID: ENST00000571841
  CDS Start-End: 61-759
gctgtgaggacgtgttccgaggaagccagagccggagccgtggcctgcggggccggcgacatggatcccctgttccagcaaacgcacaagcaggtccacgagatccagtcttgcatgggacgcctggagacggcagacaagcagtctgtgcacatagtagaaaacgaaatccaagcaagcatagaccagatattcagccgtctagaacgtctggagattttgtccagcaaggagccccctaacaaaaggcaaaatgccagacttcgggttgaccagttaaagtatgatgtccagcacctgcagactgcgctcagaaacttccagcatcggcgccatgcaagggagcagcaggagagacagcgagaagagcttctgtctcgaaccttcaccactaacgactctgacaccaccataccaatggacgaatcactgcagtttaactcctccctccagaaagttcacaacggcatggatgacctcattttagatgggcacaatattttagatggactgaggacccagagactgaccttgaaggggactcagaagaagatccttgacattgccaacatgctgggcttgtccaacacagtgatgcggctcatcgagaagcgggctttccaggacaagtactttatgatagagacaaggtctcaccatgttgcccagaatggacccgaactcctgagctcaagagatcctcctgcatcagcctcccgaagtgctgggattatagaattctcagagaaaataacttgactgaattacacaaggattcatttgaaggcctgctatccctccagtatttagatttatcctgcaataaaatacagtctattgaaagacatacatttgaaccactaccatttttgaagtttatgatcttacc

SEQ ID NO: 178141 - DNA, 711 bp, Homo sapiens
  Payload ID: 14961
  Gene Symbol:
  Gene Name: RP11-159D12.5
  ENST ID: ENST00000578794
  CDS Start-End: 320-508
acattcccttcgtgtctttgataaattgtattttaagtgatgtcatagacaggattgtttaaatttagttaactccatactcttcagactgtgatattgtgtaaatgtctatctgccctggtttgtgtgaactgggatgttgggggtgtttgtggttatcttacctggggaagttcttatgtttatcttgcttttcatgtgtctttctgtagacatatctgaagagatggattaagaatgctttggattaaggattgtggagcacatttcaatcattttaggattgtcaaaaggaggattgaggaggatcagatcaataatggaggcaatggctgaccggttccctgatgtgttacctgcttctgctactgatccaaactgcagaacttctcattcatccccaaggcctccaggcagtatccaatggggaatcagctctaaaaggaaccagaccaacgttttccagccccttcattctgtagcttccctctgtgtgaggaaaggatagaaatgttcaggacatcatcatacaggctcctcatctacaaagttccagtagcagtgacgcctacacggaagacttggaactgcaaacaggctggggtcacctcagtgacatctgacgctgtccaaccagaagttcgatttttgttctgggggtgaaggaggaaacagactgtactaaaggactaaaataatttgtctatacta

SEQ ID NO: 178142 - DNA, 1732 bp, Homo sapiens
  Payload ID: 14962
  Gene Symbol:
  Gene Name: RP11-15K19.2
  ENST ID: ENST00000426595
  CDS Start-End: 994-1671
cctctaggaccggaaaattctgggaaggctcgaggccgcggtccccggggtccgcatagtcccgatgaaaaacagacccgggaaagctggtgggagtcaggagccccggcgatgaggattgcgatgaaggaagcaggctcggagcgccgccagcgcatgcgtattggggatctgaggccagcgtcttgcgccgccattgcggggaggctgtcctcagagcaggtctggcgcgccggtggctggaccggccccaggagcccagtcaccgggcgtcattggctcaggctgcggggccctcggcaccttctccctcccgggtccaccgcggcggcggcggcggcggcggcggcggcggcggcggcgtcagggggcggagcctgccgaagcgccctttgtctgcggaggtcaacatacctggcctaaggaggcaggattgagtgactctcactcaccactggtgttgctctttgaaagtggcgcttggcaccagcatgaactccccatcctcagcaatcccatcaggtgttttgggtcttcaacctaaaattctatcttacaagatccttgccaggatgcagatttgaatactatagtgaagtctgtacatgaagaaatgatgcttttagggaggaaaaaaaaaggtaataacaaccttcaagagccccttcatctcaactcggcataaacaaggcaagattctgagagtggccgcccctggaagcagaaattattcttgtggctatccattggctcctgaggctctaatcagagatggggcacctttagtaccaggggagtgactgttgcccataaggtactggacatcaactttcaagagcagccccagctccttaagctgctggtcctggtgcatctgctgactttcatgtagaagatagcagagctttggcgacattacaacataagaactgcagagaggtgtaatcccagtggaagactgaatcgagagactcaaaaaggaaggaggggaacatggaggaggaagaaatgaatgatggctcacagatggtgagatctcaggaatcactgacgtttcaggatgtggccgtggacttcaccagagaggagtgggaccagctgtaccctgcccaaaagaacctctatcgagacgtgatgctggagaactacaggaatctagttgcactggggtatcagctttgtaagccagaggtaatcgcgcagttggagctagaggaagaatgggtgatagaaagagacagcctgctggatactcatccaggtgaccaaagccacgtaatgtccgtagttcgctcatccgtccatgccagatggattgtggggaaggtgattgggacaaaaatgcaaaagactgctaaagtgagagtgaccaggcttgttctggatccctatttattaaagtattttaataagcggaaaacctactttgctcacgatgcccttcagcagtgcacagttggggatattgtgcttctcagagctttacctgttccacgagcaaagcatgtgaaacatgaactggctgagatcgttttcaaagttggaaaagtcatagatccagtgacaggaaagccctgtgctggaactacctacctggagagtccgttgagttcggaaaccacccagctaagcaaaaatctggaagaactcaatatctcttcagcacagtgaagcgggagtggaagaaggatctaaagggaaaaactgacatgtttatgttatggaaaaagaa

SEQ ID NO: 178143 - DNA, 784 bp, Homo sapiens
  Payload ID: 14963
  Gene Symbol:
  Gene Name: RP11-162P23.2
  ENST ID: ENST00000546840
  CDS Start-End: 6-784
acctcatggacctggcaggaaacaaggctgcagccttggatatagccatgattaaaatggtcgccccgtccatggcctcccgagtgattgatcgtgcgattcagattttcataaacaatgaatggcacgatgccgtcagcaggaaaacattccccaccgtcaatccgtccactggagaggtcatctgtcaggtagctgaaggggacaaggaagatgtggacaaggcagtgaaggccgcccgggccgccttccagctgggctcaccttggcgccgcatggacgcatcacacaggggccggctgctgaaccgcctggccgatctgatcgagcgggaccggacctacctggcggccttggagaccctggacaatggcaagccctatgtcatctcctacctggtggatttggacatggtcctcaaatgtctccggtattatgccggctgggctgataagtaccacgggaaaaccatccccattgacggagacttcttcagctacacacgccatgaacctgtgggggtgtgcgggcagatcattccgtggaatttcccgctcctgatgcaagcatggaagctgggcccagccttggcaactggaaacgtggttgtgatgaaggtagctgagcagacacccctcaccgccctctatgtggccaacctgatcaaggaggctggctttccccctggtgtggtcaacattgtgcctggatttggccccacggctggggccgccattgcctcccatgaggatgtggacaaagtggcattcacaggctccactga

SEQ ID NO: 178144 - DNA, 495 bp, Homo sapiens
  Payload ID: 14964
  Gene Symbol:
  Gene Name: RP11-166N6.3
  ENST ID: ENST00000565169
  CDS Start-End: 1-206
aagcaatcccagtgagcatccacgtcaatgtcattctcttctctgccatccttattgtgttaaccatggtggggacagccttcttcatgtacaatgcttttggaaaaccttttgaaactctgcatggtcccctagggctgtaccttttgagcttcatttcagaagctgcggcagatcctgtttggaaacacagtccatgtctttagctataactggaaaaaggcctatttcaggttccatgatccttcttctgaactagctttcactctggaagtgggaaaggtgatgttcattccaatggtttcctactcctgccttctgcattatagcttatgtgaaataagcaagaaggagcaggagcaagccttggccgcggcgcttgctggcatcctgtgggctgcaggagcagctcagaaggccaccatctgtcttgtcactgaggacatttacgttgcgtcgactccggactactctgtggacaatttcactgagcga

SEQ ID NO: 178145 - DNA, 693 bp, Homo sapiens
  Payload ID: 14964
  Gene Symbol:
  Gene Name: RP11-166N6.3
  ENST ID: ENST00000562308
  CDS Start-End: 1-148
gttaaccatggtggggacagccttcttcatgtacaatgcttttggaaaaccttttgaaactctgcatggtcccctagggctgtaccttttgagcttcatttcagaagctgcggcagatcctgtttggaaacacagtccatgtctttagctataactggaaaaaggcctatttcaggttccatgatccttcttctgaactagctttcactctggaagtgggaaagggaggggcccgaagcattcagatggctgtgcaaggatccatcatcaaatacttgttgtttaccaggaaaggaaaagactgtaaccttggcaacttatgtgaaataagcaagaaggagcaggagcaagccttggccgcggcgcttgctggcatcctgtgggctgcaggagcagctcagaaggccaccatctgtcttgtcactgaggacatttacgttgcgtcgactccggactactctgtggacaatttcactgagcgactccagctgtttgaatttttagagaaagaagccgctgagaaattcatctacgatcacttactatgtttcagaggggaaggaagccatggtgtcatcctgtttctgtacagcctgatcttctctagaacatttgaaaggcttcaaatggacctagatgtcaccaccactcagctgctacaaccaaatgctggaggctttctgtgcaggcagg

SEQ ID NO: 178146 - DNA, 1189 bp, Homo sapiens
  Payload ID: 14964
  Gene Symbol:
  Gene Name: RP11-166N6.3
  ENST ID: ENST00000569170
  CDS Start-End: 1-218
aagcaatcccagtgagcatccacgtcaatgtcattctcttctctgccatccttattgtgttaaccatggtggggacagccttcttcatgtacaatgcttttggaaaaccttttgaaactctgcatggtcccctagggctgtaccttttgagcttcatttcaggaagagcaggaaccacatctggttcaccttggaacctccaagtccctggtgtgtagggaagagtcaaaatacatttactgaactcaacaggatggtttattgcccgacctctctctcccatcataagaacttcccgttttcagttcctcccattatccaaatggatatggaggtcttgggccaggaacaaagctccgaacagctggatttagaggagatctcaaggaaaatttcattccttgacaaatggagggaaatctttagttatcacaggttgggaaccaataattcaactcctcagaatcatgaaggcaaccatacatctgctgatgaaaatgaagatggaacaggactatctcagcccaaaggacaaggacatttgccatcaagtggcctttgttctattcccaacccctctatcatctcttcaaaattgggtggctttcctatctccctagcaatggccacgaagctgcggcagatcctgtttggaaacacagtccatgtctttagctataactggaaaaaggcctatttcaggttccatgatccttcttctgaactagctttcactctggaagtgggaaagcttatgtgaaataagcaagaaggagcaggagcaagccttggccgcggcgcttgctggcatcctgtgggctgcaggagcagctcagaaggccaccatctgtcttgtcactgaggacatttacgttgcgtcgactccggactactctgtggacaatttcactgagcgactccagctgtttgaatttttagagaaagaagccgctgagaaattcatctacgatcacttactatgtttcagaggggaaggaagccatggtgtcatcctgtttctgtacagcctgatcttctctagaacatttgaaaggcttcaaatggacctagatgtcaccaccactcagctgctacaaccaaatgctggaggctttctgtgcaggcaggcagttctgaacatgattttaactggaagagcaagtcccaatgtcttcaatggctgtgagga

SEQ ID NO: 178147 - DNA, 3860 bp, Homo sapiens
  Payload ID: 14965
  Gene Symbol:
  Gene Name: RP11-176H8.1
  ENST ID: ENST00000549185
  CDS Start-End: 49-252
agcgacacatggcctagtaactgtccggccgcggcgctggcttaagccatggctgagggtagccggattcctcaggcccgggcgctcctacagcagtgcctgcacgcccggctgcaaattcgcccagccgatggggacgtcgcggcccagtgggtggaggtccaaagaggactggtgatctacgtgtgctttttcaagggagctgataaagaacttcttcccaaaatggatctacgactctggctccactgattaccttaaccatattacatggatttttattgttaggtatattgaccaaagtttaacgagaagaactgtgatcagctgggaggattgctgcaaggaatggaattagctcatagcttactgctgaatgaagaagcatacaatcaactaggtgaagttcagaaggcagagtttatttttgagtggttgagatacttggagaagctcttgttggcaaccagcaggaatgatgtaagggagaaacagaagactcttgttgaacagctcctgtctttgttgaacagctccccagggcctcctacccgcaaactgcttgctaagaatctagccatactttatagtattggagacacattctccgttcatgaagcaatcgataaatgtaatgatcttattcgtagcaaagatgattctccaagttatcttcccactaagcttgctgctgtggtatgtttgggttccttgtacaagaagttgggtagaatactgggtaacacctttactgatacagtggggaatattcttaaagctatgaagagtgcagagtctcaaggccgatatgagattatgctaagtctgcaaaatatattgaatggactaggagctgccgctgcaccttgtcacagggatgtttataaagctgctagatcctgcttgacagatagatccatggctgttcgttgtgctgctgcaaagtgtctccttgaacttcagaatgaagccatctttatgtggagtacggacctggacagtgtggccacactgtgttttaagtcctttgaaggttccaattatgatgtgcggatttctgtttcaaagttactaggcataatattagctaaagctgtaatttctaaacatccaggaacagcagcctcacgtcaaagcattcgcagagtatctttggaggaagttctggaattactaggaacagggtttctacgtgggagttcaggattccttcgagccagtggagatatgctgaaaggaaccagttcagtcagtagggatgttcgagttggagttactcaggcttatgtggtatttgtttcaacactaggaggagcttggctagagaaaaattttgctgcctttttttctcatatcctaagccttgcgtcaccgtcacaccctaaagccacccaaactcagatcgatgccgtctgctgtcgccgttgtgtttcatttattcttcgaactactataggtggtcttcttggagaaaaggctcagcttgctgctgtaaaggatatttgccaggccatctggaagctaaagaaagttatggatgccgtaatgagtgatggtaatttggaaacccggcttggttccacagatgtagccgctagccaacatatgctggtttgtgctttacaagaacttggaaatctcatacacaatcttggcaccacagcggcacctttgctacaggattcaagtacaggtctccttgacagtatcttgtcagttattcttcatcctagcatttctgttcgactagcagcagcttggtgtttacactgcattgccgtggcattaccctcctacctaacaccactcttggatcgttgccttgaacggcttactggacataagtcttcacctgaagcagtgactggcttcagttttgctgtagcagctttgttgggagcagtaaaacattgtcctttaggaattcctcatggaaaaggcaagattattatgacattagcagaggatttgctgtgttctgctgctcaaaacagtcgcctttcagctcagcgcacacaagctggatggttgctgatttctgctctgatgacattaggtcctgcagttgttagccatcaccttgctcgagttctgctgttgtggaagtgtgtctttccagcatctcctaaagatctagaaacagaaaagagccgaggagattcgtttacatggcaggtgaccctggaaggacgagctggtgcactgtgtgctatcaagagctttgtttcccactgtggtgatcttcttactgaggaagtaactcagcgtcttcttccaccacttccttgtgctgtggatttgctaactcagctttcttcaatactaaaaatgtatggaagtcctttgaaaacaccgtcagtggtttatagacaaagactttatgaactgttgattttattacctcctgagacctatgaaggaaacctctgtgctatcctcagagagctggctgctgacttgactgcccctgatattcaggtggcagcatctacatttttacttccacccctctgtcatcaggatgatcttttgatactaagtcctttcctacaagagactgaccatagatttattgaagaacagctcctgcttggtaatggtgttgcttgcggaagtcttgaatatgacccttattcgatttatgagaaagatgtagagggagattcagtgcctaagcccttacctccagcactatcagttattagttctgcatccaagctctttggggttgtatgcgctcatgtgggagaaactcaaaggcttcttatattggaacagcttttggacagtataaagcacacaaaaggagctcgtcagcaagtggttcagttacatgttgtttcttcagtttctagtttcttgaagtacgtggctggctccaagggatgtttaggtccagaagaaatgaaaagatttgccttaacattagttatgggagccctagaaagccccaaccccttgctgagatgtgcagctgcagagtcatgggctagattagcccaagtggtagatgatggagcttttactgctggattagctcaagttagctttgacaaattgaaatcagcaagggatgtggttaccagaacaggacactcattggccttggggtccctacataggtatttaggaggaataagttcttctcaacacctaaattcttgtattggaatcctttatactttggcgcaggacagcacttctcctgatgtgcagacctgggcattacattctctatcattgatcattgattctgctggcccactctattatgtgcatgtggaacctaccctttctcttattataatgttgttgttaaatgtgcctcctactcatgctgaagttcaccaaagccttggtcgctgtttgaatgcccttattaccacgttaggtccagagctacaaggtaacagtacttcaatttctaccttaaggacttcctgtctactgggttgtgcagtaatgcaagataacccagactgccttgttcaagctcaggccatctcttgccttcagcagcttcatatgtttgctccacgacatgtcaacttgtctagcctggttagctgcctctgtgtgaatctttgtagcccctacttgttactgagaagagcagtactggcttgcttacgtcagcttgtacaaagagaagcagctgaagtttcagaacatgctgttatgcttgctaaggatagcagagaagagttgactccagtgttcacagcatcttcaccaggagtagattccatctgcagaaaccatctagaatgataatcctttccagaaggttttcagttactttgcctggatccatccgtctgtggcagctgtagccttataaaatgtattttttaaataag

SEQ ID NO: 178148 - DNA, 474 bp, Homo sapiens
  Payload ID: 14965
  Gene Symbol:
  Gene Name: RP11-176H8.1
  ENST ID: ENST00000547378
  CDS Start-End: 15-218
cgctggcttaagccatggctgagggtagccggattcctcaggcccgggcgctcctacagcagtgcctgcacgcccggctgcaaattcgcccagccgatggggacgtcgcggcccagtgggtggaggtccaaagaggactggtgatctacgtgtgctttttcaagggagctgataaagaacttcttcccaaaatggatctacgactctggctccactgattaccttaaccatattacatggaatgatgtaagggagaaacagaagactcttgttgaacagctcctgtctttgttgaacagctccccagggcctcctacccgcaaactgcttgctaagaatctagccatactttatagtattggagacacattctccgttcatgaagcaatcgataaatgtaatgatcttattcgtagcaaagatgattctccaagttatcttcccactaagctgtaagtgaaacattaaaacaga

SEQ ID NO: 178149 - DNA, 749 bp, Homo sapiens
  Payload ID: 14965
  Gene Symbol:
  Gene Name: RP11-176H8.1
  ENST ID: ENST00000547760
  CDS Start-End: 1-190
gattcctcaggcccgggcgctcctacagcagtgcctgcacgcccggctgcaaattcgcccagccgatggggacgtcgcggcccagtgggtggaggtaacgtcagcccggcagctctcgttatcctccggcgtgcggggcggttttttccgcgttgtctcggtgactcgtccgctctgtgtctccctctgagaccggcggtccggccgcggggataccgggtcagcttgaagctggccgcggtggcctgcctggctgcgcttgtcttttcggtccagcatcaccgttccccagcgccagttgtagcacccgagaggaagagcgtgtctcccttcttggggggaccacaggtccaaagaggactggtgatctacgtgtgctttttcaagggagctgataaagaacttcttcccaaaatggatctacgactctggctccactgattaccttaaccatattacatggagtctcgttctgtcacccaggctggagtgcagtggcgtgatctcggctcactgcaacctctgcctcccagcttcaagcaattctcctgcctcagcctcccgagtagctgggactataagtgcacaccaccatgccctgctaatttttgtatttttagtagagacggggtttcaccatgttggccaggctggtcttgaactcctgagctcgtgatccacccacctcggcctcccaaagtgttgggattacaggcatgagccaccacgcccggccgacaaataatctt

SEQ ID NO: 178150 - DNA, 481 bp, Homo sapiens
  Payload ID: 14966
  Gene Symbol:
  Gene Name: RP11-178C3.1
  ENST ID: ENST00000591035
  CDS Start-End: 1-165
tcaactctcagtgaaagtgccaatcaggtctttctgggttttacatatgtggctccatctgtacttgaaagtgtgaaagaaaagttttcctttgaaccaaaaatccgatcacctcgaagatttattggcagcccacgaacacctgtcagatttctggttcagtaagggtgagagccaggctccagactatagtgaattttccgaggagatatgtgtgggtcctgaataccatcccaagtgtccttataagagagaggcaaaagaggcaatagagacacagaaaagaaagccatgtgaagatggagcagagagatatatggccacaagccaaggaatgctgacagctgccagaagctggaagaaggcaaggaatggactctcccctacagcctccagaggcaatgcagccctgccaacactttgattttagacttctggcctatagaactgagaaagaataaatttctgttcttttcagcta

SEQ ID NO: 178151 - DNA, 953 bp, Homo sapiens
  Payload ID: 14967
  Gene Symbol:
  Gene Name: RP11-178L8.4
  ENST ID: ENST00000568879
  CDS Start-End: 1-713
tccccgctgggcagcagacagtggagatcgacctgaggcatcggatccagctgcccgacctcgagaaccagcgcaacttcaatgagctctcccgcatcgtcctggaggtgcgcgagagggtgcgccaggagcagcaggaaggcgggcacgaggcgggcgagggtcgtggccggcagggcccccgggagtcccagccaagccctgcccagcccagggcagaggcgcccagcaagggcccagatgggacacctggtgaggatggtggcgagcctggggatgccgtagctgcggccgagcagcctgcccagtgtgggcaggggcagccgttcgtgctgcccgtgggcgtgagctccaggaatgaggactacccccgaacctgcaggatgtggaatagcacatttcaaacctacaagaaagaagtgtgcctcccccgtcattcgatgcaccctggcccctgggccatctgctgtgaatgccagaccagattcgggggccgcctgcctgtgtccagggtggaagcagcactgccttactgggtccctctgtccctgagaccccgaaagcagcacccctgctggatgcatgctgctggcacaactgctggcggatctgcggtgatgagtgcctgttgtccaagttccagcagctccaggccccctaccaggaccagctaccggctcctgcagcgcgtctgctgcccctcggcctcctgaccctcctccaggccatcccgagggtcatcatggccattcgccagtgttttggggtttgaagttggaatcttcagctactgtcaagaacagccacaaaaatgtgtcacgatcaagatctttgagagtccaccaatcaggaggcgtctgtgacagtcgctgtcttctcagaacagaatccacacccaggattcaacccaaatgatttctcatcaggtgattcttggttgtagcaaagttcat

SEQ ID NO: 178152 - DNA, 408 bp, Homo sapiens
  Payload ID: 14968
  Gene Symbol:
  Gene Name: RP11-190A12.7
  ENST ID: ENST00000544342
  CDS Start-End: 1-135
ctcaaagaggaggcccagaaacgccgtgagcgcatcgatgagatcaagaggaaaaagcttgaagagctgagcactgctgtctgctgtgcggatcaacggggatggacaggaggtcctgtacctggcagaaggtgataatgtgaggctgggctgcccctacgtcctggaccctgaggactatggtcccaatgggctggacatcgagtggatgcaggtcaactcagaccccgcccaccaccgagagaacgtgttccttagttaccaggacaagaggatcaaccatggcagccttccccatctgcagcagagggtccgctttgcagcctcagacccaagccagtacgatgcctccatcaacctcatgaacctgcagcacgacctgcagtgcccatgtgctggacagagggc

SEQ ID NO: 178153 - DNA, 558 bp, Homo sapiens
  Payload ID: 14968
  Gene Symbol:
  Gene Name: RP11-190A12.7
  ENST ID: ENST00000536764
  CDS Start-End: 1-174
gtgcagaaccggattgccacctttgaggagggccggcgcctcaaagaggaggcccagaaacgccgtgagcgcatcgatgagatcaagaggaaaaagcttgaagagctgagcactgctgtctgctgtgcggatcaacggggatggacaggaggtcctgtacctggcagaaggtgataatgtgaggctgggctgcccctacgtcctggaccctgaggactatggtcccaatgggctggacatcgagtggatgcaggtcaactcagaccccgcccaccaccgagagaacgtgttccttagttaccaggacaagaggatcaaccatggcagccttccccatctgcagcagagggtccgctttgcagcctcagacccaagccagtacgatgcctccatcaacctcatgaacctgcaggtatctgatacagccacttatgagtgccgggtgaagaagaccaccatggccacccggaaggtcattgtcactgtccaagcacgacctgcagtgcccatgtgctggacagagggccacatgacatatggcaacgatgtggtgctgaa

SEQ ID NO: 178154 - DNA, 308 bp, Homo sapiens
  Payload ID: 14968
  Gene Symbol:
  Gene Name: RP11-190A12.7
  ENST ID: ENST00000536779
  CDS Start-End: 1-186
ctcaaagaggaggcccagaaacgccgtgagcgcatcgatgagatcaagaggaaaaagcttgaagagctgagttccttagttaccaggacaagaggatcaaccatggcagccttccccatctgcagcagagggtccgctttgcagcctcagacccaagccagtacgatgcctccatcaacctcatgaacctgcaggtatctgatacagccacttatgagtgccgggtgaagaagaccaccatggccacccggaaggtcattgtcactgtccaagcacgacctgcagtgcccatgtgctggacagagggc

SEQ ID NO: 178155 - DNA, 1033 bp, Homo sapiens
  Payload ID: 14969
  Gene Symbol:
  Gene Name: RP11-192H23.4
  ENST ID: ENST00000531839
  CDS Start-End: 25-1033
agagagaggaggcagaggctgggaatgggagcagtaagctgtcggcaggggcagcacacccagcagggggaacacacccgggtggctgtccctcacaagcagggtggcaacatccggggtccctgggcccgaggctggaagagcctctggacaggtttgggaaccatcaggtcagatctggaagaactctgggaactacgggggcaccactatctgcaccaggaatccctaaagccagccccagtactggtagagaagcctctgccagagtggccagtgcctcagttcatcaacctctttctaccagagtttcccattaggcccattagggggcagcagcagctgaagattttaggcctcgtggctaaaggctcctttggaactgtcctcaaggtgctagattgcacccagaaagctgtatttgcagtgaaggtggtgcccaaggtaaaggtcctacagagggataccgtgaggcagtgcaaagaggaggttagcatccaggtatgcacagagtcctggaaaggattgtgggaagagctaggccacagatggcaaaaggaagagatggcactaaaacacatgcaggcagaactgcagcagcaacaagctgtcctggccaaagaggtgcgggacctgaaagagaccttggagtttgcagaccaggagaatcaggttgctcacctggagctgggtcaggttgagtgtcaattgaaaaccacactggaagtgctccgggagcgcagcttgcagtgtgagaacctcaaggacactgtagagaacctaacggctaaactggccagcaccatagcagataaccaggagcaagatctggagaaaacacggcagtactctcaaaagctagggctgctgactgagcaactacagagcctgactctctttctacagacaaaactaaaggagaagactgaacaagagacccttctgctgagtacagcctgtcctcccacccaggaacaccctctgcctaatgacaggaccttcctgggaagcatcttgacagcagtggcagatg

SEQ ID NO: 178156 - DNA, 2091 bp, Homo sapiens
  Payload ID: 14969
  Gene Symbol:
  Gene Name: RP11-192H23.4
  ENST ID: ENST00000481916
  CDS Start-End: 23-538
agagaggaggcagaggctgggaatgggagcagtaagctgtcggcaggggcagcacacccagcagggggaacacacccgggtggctgtccctcacaagcagggtggcaacatccggggtccctgggcccgaggctggaagagcctctggacaggtttgggaaccatcaggtcagatctggaagaactctgggaactacgggggcaccactatctgcaccaggaatccctaaagccagccccagtactggtagagaagcctctgccagagtggccagtgcctcagttcatcaacctctttctaccagagtttcccattaggcccattagggggcagcagcagctgaagattttaggcctcgtggctaaaggctcctttggaactgtcctcaaggtgctagattgcacccagaaagctgtatttgcagtgaaggtggtgcccaaggtaaaggtcctacagagggataccgtgaggcagtgcaaagaggaggttagcatccaggttatctccatgacttgggcatcatgcatcgagatgtgaagatggagaatattcttctagatgaacgagctggactgtgctgctgccatctcggctcactgcaacctccctgcctgattctcctgactcagcctgtcgagtgcctgcgattgcaggcgcgcggcgccatgcctgactggttttcgtatttttttggtggagacggggtttcgctgtgttggccggactggtctccagctcctaactgcgagtgatccgccagcctcggcctcccgaggtgccgggattgcagacggagtctcgttaactcagtgctcagtggtgcccaggctggagtgcagtggcgtgatctcggctcgctacaacctccacctcccagccgcctgccttggccccccaaagtgccgagattgcagcctctgcccggacgccaccccgtctgggaagtgaggagcgtctctgcctggccgcccatcgtctgggatgtgaggagcccctctgcctggctgcccagtctggaaggtgaggagcgtctctgcccggccgccatcccacctaggaagtgaggagcacctcttcccggccaccatcccatctaggaagtgaggagcgtctctgcccggctgcccatcgtctgagatgtggggagcgcctctgccccgccgccccgtctgggatgtgaggagcgccttggcccggccgtgaccccgtctgggaggtgaggagcgtctctgcccggccaccccgtctgagaagtgaggagaccctccgcccggcaactgccccgtctgagaagtgaggagcccctccgcccggcagccgccccgtctgagaagtgaggagcccctccgcccggctgccaccccgtctgggaagtgaggagcgtctccgcccagcagccaccccgtccgggagggaggtgggggtcagcccccgccaggccagctgccccatccgggagggaggtggggtgtcagccccctgcccggccagccgccccgtccgggaggtgaggggcgcctctgcccggctgcccctactgggaagtgaggagcccctctgcccggccagccgccccgtccgggagggaggtgggggagtcagccccccgcccggccagccgccccttccaggagggaggtggggggttcagcccaccgcccggccagccgccccgtccgggagggaggtgggggggtcagccccccgcccggccagccgccccgtctgggagggaggtggggggtcagccccccgcccggccagccgccccgtccgggagggaggtgggggggggggtcagcccccctgcccggccagccgccccgtccgggaggtgaggggcgcctctgcccggccgcccctactgggaagtgaggagcccctctgcccggccaccaccccgtctgggaggtgtgcctaacagctcattgagaacgggccaggatgacaatggcggctttgtggaatggaaaggcgggaaaggtggggaaaagattgagaaatcggatggttgccgtgtctgtgtagaaagaagtagacatgggagacttttcattttgttctgcactaagaaaaattcctctgccttg

SEQ ID NO: 178157 - DNA, 511 bp, Homo sapiens
  Payload ID: 14969
  Gene Symbol:
  Gene Name: RP11-192H23.4
  ENST ID: ENST00000577790
  CDS Start-End: 21-389
agaggaggcagaggctgggaatgggagcagtaagctgtcggcaggggcagcacacccagcagggggaacacacccgggtggctgtccctcacaagggtggcaacatccggggtccctgggcccgaggctggaagagcctctggacaggtttgggaaccatcaggtcagatctggaagaactctgggaactacgggggcaccactatctgcaccaggaatccctaaagccagccccagtactggtagagaagcctctgccagagtggccagtgcctcagttcatcaacctctttctaccagagtttcccattaggcccattagggggcagcagcagctgaagctggactgtgctgctgccatctcggctcactgcaacctccctgcctgattctcctgactcagcctgtcgagtgcctgcgattgcaggcgcgcggcgccatgcctgactggttttcgtatttttttggtggagacggggtttcgctgtgttggccggactggtctccagct

SEQ ID NO: 178158 - DNA, 2103 bp, Homo sapiens
  Payload ID: 14969
  Gene Symbol:
  Gene Name: RP11-192H23.4
  ENST ID: ENST00000584196
  CDS Start-End: 37-552
agcagatttagcagagagaggaggcagaggctgggaatgggagcagtaagctgtcggcaggggcagcacacccagcagggggaacacacccgggtggctgtccctcacaagcagggtggcaacatccggggtccctgggcccgaggctggaagagcctctggacaggtttgggaaccatcaggtcagatctggaagaactctgggaactacgggggcaccactatctgcaccaggaatccctaaagccagccccagtactggtagagaagcctctgccagagtggccagtgcctcagttcatcaacctctttctaccagagtttcccattaggcccattagggggcagcagcagctgaagattttaggcctcgtggctaaaggctcctttggaactgtcctcaaggtgctagattgcacccagaaagctgtatttgcagtgaaggtggtgcccaaggtaaaggtcctacagagggataccgtgaggcagtgcaaagaggaggttagcatccaggttatctccatgacttgggcatcatgcatcgagatgtgaagatggagaatattcttctagatgaacgagctggactgtgctgctgccatctcggctcactgcaacctccctgcctgattctcctgactcagcctgtcgagtgcctgcgattgcaggcgcgcggcgccatgcctgactggttttcgtatttttttggtggagacggggtttcgctgtgttggccggactggtctccagctcctaactgcgagtgatccgccagcctcggcctcccgaggtgccgggattgcagacggagtctcgttaactcagtgctcagtggtgcccaggctggagtgcagtggcgtgatctcggctcgctacaacctccacctcccagccgcctgccttggccccccaaagtgccgagattgcagcctctgcccggacgccaccccgtctgggaagtgaggagcgtctctgcctggccgcccatcgtctgggatgtgaggagcccctctgcctggctgcccagtctggaaggtgaggagcgtctctgcccggccgccatcccacctaggaagtgaggagcacctcttcccggccaccatcccatctaggaagtgaggagcgtctctgcccggctgcccatcgtctgagatgtggggagcgcctctgccccgccgccccgtctgggatgtgaggagcgccttggcccggccgtgaccccgtctgggaggtgaggagcgtctctgcccggccaccccgtctgagaagtgaggagaccctccgcccggcaactgccccgtctgagaagtgaggagcccctccgcccggcagccgccccgtctgagaagtgaggagcccctccgcccggctgccaccccgtctgggaagtgaggagcgtctccgcccagcagccaccccgtccgggagggaggtgggggtcagcccccgccaggccagctgccccatccgggagggaggtggggtgtcagccccctgcccggccagccgccccgtccgggaggtgaggggcgcctctgcccggctgcccctgctgggaagtgaggagcccctctgctgggccaccaccccgtctgggaggtgtacccagcagctcattgagaacgggccatgatgacaatggcggttttgtggaatagaaaggggggaaaggtggggaaaagattgagaaatcggatggttgctgtgtctgtgtagagggaggtagacatgggagacttttcattttgttctgtactaagaaaaattcttctgccttgggatcctgttgatctatgaccttacccccaaccctgtgctctctaaaacatgtgctgtgtccactcagggttaaatggattaagggcggtgcaagatgtgctttgttaaacagatgcttgaaggcagcatgcttgttaagagtcatcaccactccctaatcgcaagtacccagggacacaaacactctgcctaggaaaaccagagacctttgttcacttgtttatctgctgaccttccttccactattgtcctatgaccctgccaaatccccctctgcgagaaacacccaagaatgatcaataaaaaataaaataaaattaaatt

SEQ ID NO: 178159 - DNA, 902 bp, Homo sapiens
  Payload ID: 14970
  Gene Symbol:
  Gene Name: RP11-195F19.29
  ENST ID: ENST00000556278
  CDS Start-End: 61-902
gagaaagtgaaaggtgaggcacggccctgcagattttccagcggatcccccggtggcctcatgtcgcgcagtggaaccgatcctcagcaacgccagcaggcgtcagaggcggacgccgcagcagcaaccttccgggcaaacgaccatcagcatatccgctacaacccgctgcaggatgagtgggtgctggtgtcagctcaccgcatgaagcggccctggcagggtcaagtggagccccagcttctgaagacagtgccccgccatgaccctctcaaccctctgtgtcctggggccatccgagccaacggagagatctttgaaaacaaaggtgccatgatgggctgttctaacccccacccccactgccaggtatgggccagcagtttcctgccagatattgcccagcgtgaggagcgatctcagcaggcctataagagtcagcatggagagcccctgctaatggagtacagccgccaggagctactcaggaagatgagcagcagctgctcagggctgagcagggtcctggtggccgtggctacagccctggtgtctgcctcctccccctgcccccaggcctggggccccccaggggtccagtatgggcagccaggcaggtccgtgaagctgtgttgtcctggagtgactgccggggacccagtgtcctggtttcgggatggggagccaaagctgctccagggacctgactctgggctagggcatgaactggtcctggcccaggcagacagcactgatgagggcacctacatctgccagaccctggatggtgcacttgggggcacagtgaccctgcagctgggctaccctccagcccgccctgttgtctcctgccaagcagccgactatgagaacttctcttgcacttggagtcccagccagat

SEQ ID NO: 178160 - DNA, 338 bp, Homo sapiens
  Payload ID: 14971
  Gene Symbol:
  Gene Name: RP11-195F19.5
  ENST ID: ENST00000544078
  CDS Start-End: 73-336
agggagggcgggagtttaggctgcgctgacccctctcagccccccctccaggagacgttcggagcccaggacatgtcgggaatgaggagatacgaggtggcgctggaggcggaggaggagatctactggggctgtttctactttttcccctggcttcgcatgtggcggagggagcggagctcggcgcaccccggggagcagaagctggagcctctgcgaggcctgatgagctgtctgtccagcggcctgggtcctactccccagcgctcgggtcgtggcttcccccgccgcagccccaccgccgctgcccagccagccagtgcattaaagatttaaac

SEQ ID NO: 178161 - DNA, 465 bp, Homo sapiens
  Payload ID: 14971
  Gene Symbol:
  Gene Name: RP11-195F19.5
  ENST ID: ENST00000416454
  CDS Start-End: 73-183
agggagggcgggagtttaggctgcgctgacccctctcagccccccctccaggagacgttcggagcccaggacatgtcgggaatgaggagatacgaggtggcgctggaggcggaggaggagatctactggggctgtttctactttttcccctggcttcgcatgtggcggagggagcggaggtgaggaggctgcgataccgcggacccgccccgggcatggacgggactcagtctctgaggacccatcggggggaatccggtagctcccgccccgcctcatgccagtgtcgggtcgccccacagctcggcgcaccccggggagcagaagctggagcctctgcgaggcctgatgagctgtctgtccagcggcctgggtcctactccccagcgctcgggtcgtggcttcccccgccgcagccccaccgccgctgcccagccagccagtgcattaaagatttaaaccgaa

SEQ ID NO: 178162 - DNA, 477 bp, Homo sapiens
  Payload ID: 14971
  Gene Symbol:
  Gene Name: RP11-195F19.5
  ENST ID: ENST00000423809
  CDS Start-End: 85-195
caccccttccgggggacaggcaaacctagtgcgcaacggcatccctgtgacgtaatagtaacggagacgttcggagcccaggacatgtcgggaatgaggagatacgaggtggcgctggaggcggaggaggagatctactggggctgtttctactttttcccctggcttcgcatgtggcggagggagcggaggtgaggaggctgcgataccgcggacccgccccgggcatggacgggactcagtctctgaggacccatcggggggaatccggtagctcccgccccgcctcatgccagtgtcgggtcgccccacagctcggcgcaccccggggagcagaagctggagcctctgcgaggcctgatgagctgtctgtccagcggcctgggtcctactccccagcgctcgggtcgtggcttcccccgccgcagccccaccgccgctgcccagccagccagtgcattaaagatttaaaccgaa

SEQ ID NO: 178163 - DNA, 1525 bp, Homo sapiens
  Payload ID: 14971
  Gene Symbol:
  Gene Name: RP11-195F19.5
  ENST ID: ENST00000421828
  CDS Start-End: 391-654
gtccgtttccggggtggagccagggagggcgggagtttaggctgcgctgacccctctcagccccccctccaggtgaccccagcccctgaaaatcctcacccagggccccaaatctcccagccccatgaccgccaaacctctcgccctggccccctaaatgccccaggccccggagatgaccggcctcctcaccccttaacttccagtgcctcccaaatctccaagcccaccctgtcccgtggtggcaactgaggcttctcgggggcatcagcctcagattacctgagaactgggcagcctcgtcctgagaatgacggagaaggggacctggggctagggaatccctgattcaatcatgccgctccccaggagacgttcggagcccaggacatgtcgggaatgaggagatacgaggtggcgctggaggcggaggaggagatctactggggctgtttctactttttcccctggcttcgcatgtggcggagggagcggagctcggcgcaccccggggagcagaagctggagcctctgcgaggcctgatgagctgtctgtccagcggcctgggtcctactccccagcgctcgggtcgtggcttcccccgccgcagccccaccgccgctgcccagccagccagtgcattaaagatttaaaccgaagcccaccgtactgacctcctgactctgccgccgctgtcgccattcgagccgagcgcccctccccacacgggctctgttccgtactgacagggcgtccctccctggaagggtgcccttccacgtcaaagcccctcatcagtgtcaggcctcctgttactatcaatggctgtctcccccaatcccaacccccaaaaacccatactgtgagtcgcctatatgaagagaactaaataatcctgcctgttactcccttcctcggagcgaggactttgccagctgtctgaagaatcttctctgctgggagtatatctaaaacattttaagcagaggtgtaggatgcaggctgtaaatggtaagagggggagattcctagaagctgcctgccacagaggagcgacttgggttggcgacctttcctacagttcataccccaacttttggctcctccagtctgatcccaagtttagagatccttggcatcagcctacctagaagttcttgctccctccctaggagagtccaagggccactgctctttgccgcccccttctgtcacccaatcagcctgggacccactaactcctcaagtggtgagaatcagggactgctatgtgggcctgccttcagttagggactggacccagcaccagaaagggcaccacaagattaagttaaagaaagagatggcccagtttctggctggggccaaagctacagcagattgtggctggggagaagacttggtcttaaaggggagagatgggtgcacacccaaaagcatttgttttctgccttccgaagacttctggaccgacaagcccagggaagaccagaaagtatgtagcgcacagccaagtgatgaaga

SEQ ID NO: 178164 - DNA, 725 bp, Homo sapiens
  Payload ID: 14972
  Gene Symbol:
  Gene Name: RP11-196G11.1
  ENST ID: ENST00000529564
  CDS Start-End: 228-725
gcgattccgcacgtcccttacccgcttcactagtcccggcattcttcgctgttttcctaactcgcccgcttgactagcgccctggaacagccatttgggtcgtggagtgcgagcacggccggccaatcgccgagtcagagggccaggaggggcgcggccattcgccgcccggcccctgctccgtggctggttttctccgcgggcgcctcgggcggaacctggagataatgggcagcacctgggggagccctggctgggtgcggctcgctctttgcctgacgggcttagtgctctcgctctacgcgctgcacgtgaaggcggcgcgcgcccgggaccgggattaccgcgcgctctgcgacgtgggcaccgccatcagctgttcgcgcgtcttctcctccaggtggggcaggggtttcgggctggtggagcatgtgctgggacaggacagcatcctcaatcaatccaacagcatattcggttgcatcttctacacactacagctattgttaggtcttcaagccgctcagcgtgcctgtggacagcgtggccccggcccccccaagcctcaggagggcaacacagtccctggcgagtggccctggcaggccagtgtgaggaggcaaggagcccacatctgcagcggctccctggtggcagacacctgggtcctcactgctgcccactgctttgaaaaggcagcagcaacagaactgaattcctggtca

SEQ ID NO: 178165 - DNA, 2362 bp, Homo sapiens
  Payload ID: 14972
  Gene Symbol:
  Gene Name: RP11-196G11.1
  ENST ID: ENST00000533518
  CDS Start-End: 1-365
gcgacgtgggcaccgccatcagctgttcgcgcgtcttctcctccaggtggggcaggggtttcgggctggtggagcatgtgctgggacaggacagcatcctcaatcaatccaacagcatattcggttgcatcttctacacactacagctattgttaggttgcctgcggacacgctgggcctctgtcctgatgctgctgagctccctggtgtctctcgctggttctgtctacctggcctggatcctgttcttcgtgctctatgatttctgcattgtttgtatcaccacctatgctatcaacgtgagcctgatgtggctcagtttccggaaggtccaagaaccccagggcaaggctaagaggcactgagccctcaacccaagccaggctgacctcatctgctttgctttggtcttcaagccgctcagcgtgcctgtggacagcgtggccccggcccccccaagcctcaggagggcaacacagtccctggcgagtggccctggcaggccagtgtgaggaggcaaggagcccacatctgcagcggctccctggtggcagacacctgggtcctcactgctgcccactgctttgaaaaggcagcagcaacagaactgaattcctggtcagtggtcctgggttctctgcagcgtgagggactcagccctggggccgaagaggtgggggtggctgccctgcagttgcccagggcctataaccactacagccagggctcagacctggccctgctgcagctcgcccaccccacgacccacacacccctctgcctgccccagcccgcccatcgcttcccctttggagcctcctgctgggccactggctgggatcaggacaccagtgatgctcctgggaccctacgcaatctgcgcctgcgtctcatcagtcgccccacatgtaactgtatctacaaccagctgcaccagcgacacctgtccaacccggcccggcctgggatgctatgtgggggcccccagcctggggtgcagggcccctgtcagggagattccgggggccctgtgctgtgcctcgagcctgacggacactgggttcaggctggcatcatcagctttgcatcaagctgtgcccaggaggacgctcctgtgctgctgaccaacacagctgctcacagttcctggctgcaggctcgagttcagggggcagctttcctggcccagagcccagagaccccggagatgagtgatgaggacagctgtgtagcctgtggatccttgaggacagcaggtccccaggcaggagcaccctccccatggccctgggaggccaggctgatgcaccagggacagctggcctgtggcggagccctggtgtcagaggaggcggtgctaactgctgcccactgcttcattgggcgccaggccccagaggaatggagcgtagggctggggaccagaccggaggagtggggcctgaagcagctcatcctgcatggagcctacacccaccctgaggggggctacgacatggccctcctgctgctggcccagcctgtgacactgggagccagcctgcggcccctctgcctgccctatcctgaccaccacctgcctgatggggagcgtggctgggttctgggacgggcccgcccaggagcaggcatcagctccctccagacagtgcccgtgaccctcctggggcctagggcctgcagccggctgcatgcagctcctgggggtgatggcagccctattctgccggggatggtgtgtaccagtgctgtgggtgagctgcccagctgtgagggcctgtctggggcaccactggtgcatgaggtgaggggcacatggttcctggccgggctgcacagcttcggagatgcttgccaaggccccgccaggccggcggtcttcaccgcgctccctgcctatgaggactgggtcagcagtttggactggcaggtctacttcgccgaggaaccagagcccgaggctgagcctggaagctgcctggccaacataagccaaccaaccagctgctgacaggggacctggccattctcaggacaagagaatgcaggcaggcaaatggcattactgcccctgtcctccccaccctgtcatgtgtgattccaggcaccagggcaggcccagaagcccagcagctgtgggaaggaacctgcctggggccacaggtgcccactccccaccctgcaggacaggggtgtctgtggacactcccacacccaactctgctaccaagcaggcgtctcagctttcctcctcctttaccctttcagatacaatcacgccagccacgttgttttgaaaatttctttttttggggggcagcagttttcctttttttaaacttaaataaattgttacaaaata

SEQ ID NO: 178166 - DNA, 499 bp, Homo sapiens
  Payload ID: 14972
  Gene Symbol:
  Gene Name: RP11-196G11.1
  ENST ID: ENST00000532364
  CDS Start-End: 188-499
attcttcgctgttttcctaactcgcccgcttgactagcgccctggaacagccatttgggtcgtggagtgcgagcacggccggccaatcgccgagtcagagggccaggaggggcgcggccattcgccgcccggcccctgctccgtggctggttttctccgcgggcgcctcgggcggaacctggagataatgggcagcacctgggggagccctggctgggtgcggctcgctctttgcctgacgggcttagtgctctcgctctacgcgctgcacgtgaaggcggcgcgcgcccgggaccgggattaccgcgcgctctgcgacgtgggcaccgccatcagctgttcgcgcgtcttctcctccagggcagcagcaacagaactgaattcctggtcagtggtcctgggttctctgcagcgtgagggactcagccctggggccgaagaggtgggggtggctgccctgcagttgcccagggcctataaccactacagccagggctca

SEQ ID NO: 178167 - DNA, 753 bp, Homo sapiens
  Payload ID: 14973
  Gene Symbol:
  Gene Name: RP11-201K10.3
  ENST ID: ENST00000473363
  CDS Start-End: 1-85
gggcgctatgtgccccctagcagtaccgatcgtagcccctatgagaagagtggcagcagacgcaccaggtacgaggaaagcctgaggaccagggcggtggccgaggatgccccctcgacgcattatttcctccctgtcgcaagagggcgctgcgtccaggcactgagaggaagaaagaggagaacgcgaggagtagcaagtccgcgtggtgggtacgggcacctcgctggcgctctcctccctcctgtccctgctgctctttgctgggatgcagatgtacagccgtcagctggcctccaccgagtggctcaccatccagggcggcctgcttggttcgggtctcttcgtgttctcgctcactgtatcctccctgcagttggagggggcgggccacgtaggcatgtgcccttccccttccccacacagctctgtccccgttgcacaccctactccttaactccctcaaccaggccttcaataatctggagaatcttgtctttggcaaaggattccaagcaaagatcttccctgagattctcctgtgcctcctgttggctctctttgcatctggcctcatccaccgagtctgtgtcaccacctgcttcatcttctccatggttggtctgtactacatcaacaagatctcctccaccctgtaccaggcagcagctccagtcctcacaccagccaaggtcacaggcaagagcaagaagagaaactgaccctgaatgttcaataaagttgattctttgt

SEQ ID NO: 178168 - DNA, 1944 bp, Homo sapiens
  Payload ID: 14974
  Gene Symbol:
  Gene Name: RP11-20I23.1
  ENST ID: ENST00000564543
  CDS Start-End: 118-1248
agggtgtgagatggcagacaggtttgcaggaaaccctcagaaagggggctggaggatttagccactctgtcctccccttccggcagtccagggcctcctcccgagcacagcggcgctatggactctccaggatacaactgcttcgtggacaaagacaagatggacgctgccatccaggacctggggcccaaggagctgagctgcactgaactgcaggaactgaagcagctggcgcgccagggctactgggcccaaagccacgccctgcggggaaaggtgtaccagcgcctgatccgggacattccctgccgcacggtcacgcctgacgccagcgtgtacagcgacatcgtgggcaagatcgtgggcaagcacagcagcagctgcctgccgctgcccgagttcgtggacaacacgcaggtgcccagctactgcctgaatgcacgcggcgagggggccgtgcgcaagatcctcctgtgcctggccaaccagttccccgacatctccttctgccccgccctgccggccgtggtggccctgctgctgcactacagcatcgacgaggccgagtgcttcgagaaggcctgccgcatcctggcctgcaatgaccccggcaggaggctgatcgaccagagcttcctggcctttgagtcgtcctgcatgacgtttggggacctggtgaacaagtactgccaggcggcccacaagctgatggtggccgtgtcggaggatgtcctgcaggtctatgcggactggcagcgctggctgtttggggagctgcccctctgctacttcgcccgggtctttgacgtcttcctggtggagggctacaaggtgctgtaccgcgtggcgctggccatcctcaagttcttccacaaggtgagggccgggcagccgctggagtcggacagcgtgaagcaggacatccgcacgttcgtcagagacatcgcgaagacggtgtcccctgagaagctgctggagaaagcgttcgccatccgcctcttctcccgcaaggagatccagctcctgcagatggccaatgagaaagccctgaagcagaagggcatcaccgtgaagcagaagagccctgggcgctgcctatggcacagccaagagcggtaccggcattgcggccatgtctgtcatgcggccggagcagatcatgaagtccatcatcccagtggtcatggctggcatcatcgccatctacggcctggtggtggcagtcctcatcgccaactccctgaatgacgacatcagcctctacaagagcttcctccagctgggcgccggcctgagcgtgggcctgagcggcctggcagccggctttgccatcggcatcgtgggggacgctggcgtgcggggcaccgcccagcagccccgactattcgtgggcatgatcctgattctcatcttcgccgaggtgctcggcctctacggtctcatcgtcgccctcatcctctccacaaagtagaccctctccgagcccaccagccacagaatattatgtaaagaccacccctcctcattccagaacgaacagcctgacacatacgcacggggccgccgcccccagtagttggtcttgtacatgcgcagtgtcctagtgcccatcgtctgtttccccggccttgcccccgcccgccccgtgccgtggacatctgggcccactcatcgcccctccaggcccccggcgccccaccccctagagtgctctgtgtatgcggatgatttagaattgtcatttctctttactggatgtttatttataaagatctggcctgttcctgcgtctgcggagcggcccttgtctcccagctatctataaccttagctagagtgtcgccttgtgggttcctgttgctgagacttcctggatggagccgccctcaccgccgggcccgtggccctgcgcggagctgtgtccaataaagttcttggatgtga

SEQ ID NO: 178169 - DNA, 596 bp, Homo sapiens
  Payload ID: 14975
  Gene Symbol:
  Gene Name: RP11-20I23.3
  ENST ID: ENST00000569317
  CDS Start-End: 140-596
ggtatttagagcgcagcggctgacgggccggatcgccttcgccgccgcccgcccgcaaaccttcgtgcccggcccgtcctcgcccccgcctccgccaccgcctcggcccgcagagcttgccccctccccacccgcagacatgtccgagtccaagagcggccccgagtatgcttcgtttttcgccgtcatgggcgcctcggccgccatggtcttcagcggtggatttggtgttgacttctctcaagccacggaggacgtgggttcgggggttgccctcgtggcccggaggatcctgtcgcacggcgtcacctccttctgccccaccctggtcacttccccaccggaggtttatcacaaggttgttcctcagatccctgtgaagagtggtggtccccatggggcaggggtcctcgggctgcacctggagggccccttcatcagccgggagaagcggggcgcgcaccccgaggcccacctccgctccttcgaggccgatgccttccaggacttgctggccacctacgggcccctggacaatgtccgcatcgtgacgctggccccagagttgggccgtagccacgaagtgatccgggcgc

SEQ ID NO: 178170 - DNA, 729 bp, Homo sapiens
  Payload ID: 14976
  Gene Symbol:
  Gene Name: RP11-212D19.4
  ENST ID: ENST00000544347
  CDS Start-End: 1-446
cggcggcggaagcggatcgcactctctttgtgggcaaccttgaaacgaaagtgaccgaggagctccttttcgagcttttccaccaggctgggccagtaataaaggtgaaaattccaaaagataaggatggtaaaccaaagcagtttgcgtttgtgaatttcaaacatgaagtgtctgttccttatgcaatgaatctacttaatggaatcaaactttatggaaggcctatcaaaattcaatttagatcaggaagtagtcatgccccacaagatgtcagtttgtcatatccccaacatcatgttggaaattcaagccctacctccacatctcctagcagcaggtacgaaaggactatggataacatgacttcatcagcacagataattcagagatctttctcttctccagaaaattttcagagacaagcagtgattactctagtttgatgtcataatttctcatggagttaaaactggactcttcaaaatgatagagttgtctgaatttggctgcaatgcgaactactaatcgattcaagcttgttatcaagacacctagagatcaccagatgacaggattggacattgagaaggaccagattattgagatggcctgtctgataactgactctgatctcaacattttggctgaaggtcctaacctgattataaaacaaccagatgagttgctggacagcatgtcagattggtgtaaggagcatcacgggaa

SEQ ID NO: 178171 - DNA, 504 bp, Homo sapiens
  Payload ID: 14977
  Gene Symbol:
  Gene Name: RP11-214K3.25
  ENST ID: ENST00000618862
  CDS Start-End: 1-392
gcgcacccagcgcagaaggctgctgccgccggacgcctccattgtttgaccacaacaagggccggattctcacccagcaggatcctaaggcctttgtagtccttcagccactgtgggccctgcctctgcctgttcttctggaatgtcttgggggttttgatcctgtcactgtgatcggtgttgctggaagtcggtccaggagctttttggataatccacctcatgactggaaaacaacgaagaaacccagtagcttcttcgccgtgtggattcagaccccgggagcccaggcctgcacctgggcagctgctccctgcacgtggccggacatatggaatatggagccccgctgccttggagtcagagagctgccaagtagaatttgcatgtaatgctgctatcattttcaattgctctcccaataaaacaggccctggagccgaggtgaatgccgtagaaggcattttttccactgggtgtgggtccagaataaataatcaaaag

SEQ ID NO: 178172 - DNA, 700 bp, Homo sapiens
  Payload ID: 14978
  Gene Symbol:
  Gene Name: RP11-215A19.2
  ENST ID: ENST00000509111
  CDS Start-End: 1-296
agcccgtgctccgcggggacggcgcgcggccctcgtggctggcgtccgccctggcctgcgtcctcatcttcaccatcgtggtggacatcctgggcaacctcctggtcatcctgtcggtgtatcggaacaagaagctcaggaacgcaggctgccaacatgaagacactggatgcggaatcaggaggagatgtatacagctcagtctccaaagccaggacaagccagctccaacacactactggctgaatctcaccaatcgttatagttttgttttttgtttttttaaatgtatttaagcatttttaggtgttttaaattttatgtgtgtattctaggaatatgtactcagattctttcattaggcatgtgttattaacaacattcatcttcttaaaggctgaaccaactttgcgcgttttatcaacagatattcactgagcacctaatattgccaggctgtgctcaaggcagtgggattcatcagtgaacaatacagacaaaaatcactgacctaaatggagcttgaagtttatatctaaatcattcaaagattctgtggtggaaaagaagttagaaatctttcagctgcaaaacataagccaaaatacaactcacctttggaatcagagaacttacaggttcataaaattgcgaagcccagatgtgcacctgaggtgagacttcgtccagcttctgtctg

SEQ ID NO: 178173 - DNA, 2420 bp, Homo sapiens
  Payload ID: 14979
  Gene Symbol:
  Gene Name: RP11-216L13.16
  ENST ID: ENST00000435202
  CDS Start-End: 1-462
gctttggtctcggtgcccagggcccaggccgtgtggttgggaagactggaccctgagcagcttcttgggccctggtacgtgcttgcggtggcctcccgggaaaagggctttgccatggagaaggacatgaagaacgtcgtgggggtggtggtgaccctcactccagaaaacaacctgcggacgctgtcctctcagcacgggctgggagggtgtgaccagagtgtcatggacctgataaagcgaaactccggatgggtgtttgagaatccctcaataggcgtgctggagctctgggtgctggccaccaacttcagagactatgccatcatcttcactcagctggagttcggggacgagcccttcaacaccgtggagctgtacagtctgacggagacagccagccaggaggccatggggctcttcaccaagtggagcaggagcctgggcttcctgtcacagtagcaggcccagctgcagaaggacctcacctgtgctcacaagatccttctggctggcggctccagagaggtttaaacactggccttggcggctgagggaggagggtgaagatgaggcaggggctgctggtgctggcgctggtgctggtgctggtgctagtgctggctgcagggtcccaggtgcaggagtggtaccccagggagtcccacgccctcaactggaacaagttttcagggttctggtacattctggccactgccactgatgcccagggattcttgccggccagggacaagaggaagctgggggcgtccgtggtaaaggtgaacaaagtgggccagctccgcgtgctcctcgccttcagacgtgaaaggggtgaaggccttccacgtgctgtccactgactacagctacggcttggtctacctccgcctggggcgtgcaacccaaaactacaagaacctgctgctcttccataggcagaatgtttcgagcttccagagtctgaaggaattcatggacgcttgtgacattctggggctctccaaggccgccgtcatcctcccgaaagacgcgtcccgtacacacaccatcctgccatgagagccagcgtcctctgctcttccctttcgacgcgtggtcctcccagacccgaggagcgttgttccagatgtcaagtggagaccacggcttgttgagaggtgtttggtgactctaggtcattgacagtgtgaaaatcaagtggctcaagggatcctttatgatcacagaaagatgggggaaggaggatacaggctgaccgggtggcgagatgtcagccaggccccttccccactgtcttctggagcacactgcaggctgctgctattccctgtctgctgtgaaacagaccacaggccggcccaacgcagtcctcgccgtgtgccttgcctctgccctccacgccgccgccaccctccgcgttcctttacatcctgcactttctcaggaagccgttcgcatatccacccaacatggaggagcccccatgacgtgccaggcagcgtgctggcccctgcggctgcgttagggaacagaatcggcaaacgcagtcccagagttgatgcctgatcaggagaagccaacttcagcagtgtggtcacctggatactcgagtatagaccctagatcacctggatactcgagtatagaccctagaagtgtatctaggcgcggccagggccccacaacagcaggtctgactcattccatccagggcagcatcagggagagcttcctgggggaagtggcatttgggctgacctgggaagggtggtgggtgttaagtcagtttgggtggggctggaggagcaggggtgcatccccagaacaggatgtgacttctgaaaagacatcagagtagagaaaatggtttctcaaggagattggggacgccagtatcagaatggcggcggggagagccacagaggagcaggagggggcccaccagaccacggcacctcgaaggctgcggtgaaggcttaggtctcactcaaggggtgatgacgggaggttgtctgagatgaaccccccaactgaatgaatggaccttcttctggccaaggggatcccaaagaaaccctgaacccgagtcctcagccatgacggggtaaggggtcagcccctccttctggcccgagaagagatcagagattggttctgggcagtccatggagaatttgctcagctggaccagtacacgcttctcctttcatgaatattcatgactcctcctgaagcttattgaacatctctatttggccatctccttcagcgtaaattcctgtcccctctgtccctcccctccaagtgtctgttccaggcttctggcctgaggctacgcttcctagcctgtcagaagggctgccctgctggctgcaatctcttatgagaaataaagctctcctgtgtgcaaaaaagta

SEQ ID NO: 178174 - DNA, 735 bp, Homo sapiens
  Payload ID: 14980
  Gene Symbol:
  Gene Name: RP11-216L13.17
  ENST ID: ENST00000456614
  CDS Start-End: 1-121
cttgggtctgtcccgggtggacgacgccgtggctgccaagcacccggcaccggcatggcctttggcttgcagatgttcattcagaggaagtttccataccctttgcagtggagcctcctagtggccgtggttgcaggctctgtggtcagctacggggtgacgagagtggagtcggagaaatgcaacaacctctggctcttcctggagaccgggcagctccccaaagacaggagcacagagcagtgtcgggcactccagatccaaggggtgaaagagaatatggaccagaacaaggccacgctggccctcctgcgcagcaacatccgccgcggggcccaggactgggctttggccaagaaggtggtgcgggagaagctgcgcaagtacgtcttcgaccgcgtgaacatgcacaacctactgatccacctggtgcggcggcgcgggcagaagctggagagcatgcagctggagctggacagcctgcggagccagcccgacgccagcaaggaggagctgcggctgctgcagatcatccgccagctggagaacaacatcgagaagacaatgatcaagatcatcaccagccagaacatccacctgctgtatttggacctgctggattatctgaagacagtgagcccagcggcccgggaagggcgggggtcaggggctgggatctgggaggggcgggagcgtcctggggcggagccgccccgcacccgccagggagaggga

SEQ ID NO: 178175 - DNA, 2306 bp, Homo sapiens
  Payload ID: 14981
  Gene Symbol:
  Gene Name: RP11-219A15.1
  ENST ID: ENST00000456009
  CDS Start-End: 86-2263
ctggcttggcggtcctcctttcgcagattggaaaccgcgggctatcctgctgggaggttgtggccgaggcagtagctcgctactgatggcctcctggggtggagaaaagcggggaggggctgaggggtctccgaagccggcagtctacgccacgaggaagacccctagcgtcgggagccagggggaccagtggtacttgggctacccgggggaccagtggtcctcgggcttcccctacagctggtggaaaaacagcgtcggcagcgagagcaagcacggtgagggcgccttagaccagccccagcacgacgtccgcctggaagatcttggcgagctccacagagctgcccggtcgggcgacgtccctggggtggagcacatcttagctcctggagacactggcgtggacaagagggataggaagaagagcattcagcaactagttcctgaatataaggaaaaacagacacctgaaagtcttcctcaaaataacaatccagattggcatcctactaatttgacccttagtgatgagacttgtcagagatccaagaatctgaaagttgatgataaatgtccatctgtatcaccatcaatgcctgaaaatcagtcagcaaccaaagaactgggacagatgaacttaacagaacgagaaaagatggacactggagttgtacttctctcagggaatgatactctccatgacctgtgccaatcacagctaccagaaaacaaagagagcaaagaagcagaacaagactcggagctgacatcagaggaagagcaagaaagacttaaaggatgcgaaaataagcagccacagaaaacgtctcaagaaccagaaatggctaaggattgcgatagagaggatatacctatatatccagtacttcctcatgtgcaaaaatctgaggaaatgtggattgaacaaggcaaattagagtggaaaaaccaattaaaactcgtcataaatgagttaaagcagaggtttggtgaaatttatgaaaaatacaaaattccggcttgtcctgaggaagagccactacttgataactctacaagaggaacagatgtaaaggatattccctttaatttgacaaataacatacctggttgtgaggaagaagatgcatctgaaatatctgtctcagtggtattcgagacatttcctgaacaaaaagaacccagtctcaaaaatatcatccatccatactatcatccatactctgggtcccaggaacatgtttgccagtcatcttctaagtttcatttacatgaaaataaattagactgcgacaatgataacaaaccaggcattggacatatttttagtacagataagaactttcataatgatgcaagcactaagaaagcaaggaacccagaagtggttatggttgaaatgaaagaagaccaagagtttgatttgcaaatgacaaaaaatatgaaccaaaatagtgacagtggcagtacaaacaactataaaagcctgaaacctaaattagaaaatctgagttctttaccaccagattctgacagaacatcagaagtatatctacatgaagaattacagcaagacatgcaaaagtttaagaatgaggtcaacacattagaagaagagttcctggctttgaagaaagaagatgttcaacttcataaagaggttgaagaagaaatggagaagcacagaagtaatagcacagaattatcaggaaccctaactgatggtactactgttggcaatgatgatgatggactaaatcagcagattcctaggaaggaaaatggagagcatgacaggcctgcagataaaacatctaatgaaaagaacgaggtcaaaaaccaaatatatcctgaggctgactttgctgactcaatggagccatctgaaatagcctcagaggattgtgaattgtctcactctgtttatgagaattttatgttgctgattgaacaacttagaatggagtataaagattctgctagcctaccaagaatccaagacacattttgtttgtgtgaacacttactgaaacttaagaataatcactgtgaccaacttacagtaaaacttaaacaaatggaaaatatggtcagtgtactacaaaatgagctatctgaaacaaaaaagacaaaattacagttagaacttcaaaaaattgaatgggagaaagagctgtacgatttgagacttgccttaaaacaagaaaataggagaaaagaaatgccgatatgttgtataataaagatagtgaacagttaagaataaaagaagaggagtgtgggaaagtggttgaaacaaagca

SEQ ID NO: 178176 - DNA, 8802 bp, Homo sapiens
  Payload ID: 14981
  Gene Symbol:
  Gene Name: RP11-219A15.1
  ENST ID: ENST00000448331
  CDS Start-End: 141-4418
ggcttggcggtggtcgcttggcttggcgtggcagtgatcgcttggcttggcatttctggcttggcggtcctcctttcgcagattggaaaccgcgggctatcctgctgggaggttgtggccgaggcagtagctcgctactgatggcctcctggggtggagaaaagcggggaggggctgaggggtctccgaagccggcagtctacgccacgaggaagacccctagcgtcgggagccagggggaccagtggtacttgggctacccgggggaccagtggtcctcgggcttcccctacagctggtggaaaaacagcgtcggcagcgagagcaagcacggtgagggcgccttagaccagccccagcacgacgtccgcctggaagatcttggcgagctccacagagctgcccggtcgggcgacgtccctggggtggagcacatcttagctcctggagacactggcgtggacaagagggataggaagaagagcattcagcaactagttcctgaatataaggaaaaacagacacctgaaagtcttcctcaaaataacaatccagattggcatcctactaatttgacccttagtgatgagacttgtcagagatccaagaatctgaaagttgatgataaatgtccatctgtatcaccatcaatgcctgaaaatcagtcagcaaccaaagaactgggacagatgaacttaacagaacgagaaaagatggacactggagttgtacttctctcagggaatgatactctccatgacctgtgccaatcacagctaccagaaaacaaagagagcaaagaagcagaacaagactcggagctgacatcagaggaagagcaagaaagacttaaaggatgcgaaaataagcagccacagaaaacgtctcaagaaccagaaatggctaaggattgcgatagagaggatatacctatatatccagtacttcctcatgtgcaaaaatctgaggaaatgtggattgaacaaggcaaattagagtggaaaaaccaattaaaactcgtcataaatgagttaaagcagaggtttggtgaaatttatgaaaaatacaaaattccggcttgtcctgaggaagagccactacttgataactctacaagaggaacagatgtaaaggatattccctttaatttgacaaataacatacctggttgtgaggaagaagatgcatctgaaatatctgtctcagtggtattcgagacatttcctgaacaaaaagaacccagtctcaaaaatatcatccatccatactatcatccatactctgggtcccaggaacatgtttgccagtcatcttctaagtttcatttacatgaaaataaattagactgcgacaatgataacaaaccaggcattggacatatttttagtacagataagaactttcataatgatgcaagcactaagaaagcaaggaacccagaagtggttatggttgaaatgaaagaagaccaagagtttgatttgcaaatgacaaaaaatatgaaccaaaatagtgacagtggcagtacaaacaactataaaagcctgaaacctaaattagaaaatctgagttctttaccaccagattctgacagaacatcagaagtatatctacatgaagaattacagcaagacatgcaaaagtttaagaatgaggtcaacacattagaagaagagttcctggctttgaagaaagaagatgttcaacttcataaagatgttgaagaagaaatggagaagcacagaagtaatagcacagaattatcaggaaccctaactgatggtactactgttggcaatgatgatgatggactaaatcagcagattcctaggaaggaaaatggagagcatgacaggcctgcagataaaacatctaatgaaaagaacgaggtcaaaaaccaaatatatcctgaggctgactttgctgactcaatggagccatctgaaatagcctcagaggattgtgaattgtctcactctgtttatgagaattttatgttgctgattgaacaacttagaatggagtataaagattctgctagcctaccaagaatccaagacacattttgtttgtgtgaacacttactgaaacttaagaataatcactgtgaccaacttacagtaaaacttaaacaaatggaaaatatggtcagtgtactacaaaatgagctatctgaaacaaaaaagacaaaattacagttagaacttcaaaaaattgaatgggagaaagagctgtacgatttgagacttgccttaaaacaagaaaatgaggagaaaagaaatgccgatatgttgtataataaagatagtgaacagttaagaataaaagaagaggagtgtgggaaagtggttgaaacaaagcaacaacttaaatggaatctgagaagacttgttaaggaattgaggacagtaagaaataacttggatctggttgtgcaggagagaaacgatgcccagaagcaactttctgaagaacaggatgccagaatattacaagatcagattctgacgagtaaacaaaaggaactagaaatggctcgaaagaaaatgaattctgagatttctcataggcatcagaaagaaaaggatctctttcatgaagattgcatgttgcaggaagaaattgccttgctgagactggaaatagatacaataaaaaatcagaacaagcaaaaggaaaagaaatattttgaggacattgaggctgtgaaagaaaagaatgataaccttcaaaaaattataaaactaaatgaggaaacattaacagaaacaatactccagtacagtggacagctgaacaatctgacagctgagaacaaaatactcaattctgaactggagaatgggaaacagaaccaagaaagactagaaatagaaatggaatcataccgttgtagactagctgctgctgtacgtgactgtgatcaaagtcagacagcaagagacctaaaacttgatttccagagaacaagacaagagtgggttcgtttacatgacaaaatgaaggttgatatgtctggcctacaagctaagaatgagattctttctgaaaaactttctaatgctgaaagtaaaattaacagcctacaaattcagctccataacacaagagatgctcttggaagagagagtttgattttggaacgtgtgcaaagagacctcagccaaacacagtgtcagaagaaagaaactgaacaaatgtaccaaattgaacaaagcaaactgaagaaatacattgccaagcaggaatctgtagaggagagattatctcaactacaaagtgaaaatatgttgcttcgacagcaactggatgatgctcacaagaaagctaacagtcaagaaaagacaagcagtactatccaagaccagtttcattctgctgccaaaaatcttcaagctgagagtgaaaagcagattctttcactacaagagaagaacaaggagctgatggatgaatataatcatttaaaagaaagaatggatcaatgtgagaaagagaaagcaggaagaaaaattgaccttacagaagcacaggaaactgtaccttcacgatgtctacatctggatgcagagaatgaagttcttcaacttcaacagacattattctctatgaaagcaatacaaaagcaatgtgaaacactacagaagaataagaagcagctgaaacaagaagtagtaaacctcaaaagttatatggaaagaaatatgttagaacgtggtaaagctgaatggcataaactgttgattgaagaaagagcaaggaaggagatagaagaaaaattaaacgaagccattctcaccttgcagaaacaagcagcagtatctcatgaacagttagtacagttaagggaggataatactacttcaataaaaactcagatggaactcacaatcaaagatctggaatctgaaatctccagaataaaaacttcgcaagccgactttaataaaaccgaattggaaagatataaggaactctacctagaagaagtgaaagttagagaatccttgtcaaatgaactcagtagaactaatgagatgatagcagaggtcagtacgcaacttactgtggagaaagagcagaccagatccagatctctattcactgcttatgctacaaggccagtcctagagtcaccttgcgttggaaatcttaatgatagtgaaggtctcaacagaaaacatattccaagaaaaaagaggtctgctcttaaggacatggagagctacttgttgaagatgcagcagaagttgcaaaatgatctaactgcagaagtagcagctgctactaaatatgaacctggatcctatatagcttctcctctaggatttacacacaaggaaaatctgaatcaagatccagttttggaagtaacaaaagaatatgcacagattttaagaagaaaatacatactctgaaagataaggcaattttatttgggctattcacatgatattttgtttcccattaaatatatgatgtgaacatttttactaaagggaaatattctatattatacatgtctgatgaaaatttatatagtattttaaataatgtttcttggcctcttcagctaacttttaagtggattttgcaaatgaaaaccagtattactgagttttacatactcgaactgcccaaatgtttgctgtttaaacagccaaataatcaagttgccattagtaatttagtggagccaattgatggcttgtttgtattttataattttatctttatacatagtgatagatttaagtttagatagacatcattttggtatactggtactgtggtcattgtcaatgtttggatgtattacgattgttatagtgcaatcaaacttagataattttaattttaagcactgatttatttagatctttccttgtggaaaaataaggtttgcctaaggctttttgcttttttatttattgtttcatttctttattagattaacttttgggaaacagtcttaaaattggagaaaatttccacattttaggaaaaacagctttccccctgtgggccatttgagagtaaattgctgacattatgccatcacatctgctggaggtatcatcagtgaagtctgtgaaacagcaaagatggctgcctgccacttcctctggaagctccagcccagcagcgtactgacttattgctggctcgaaagtgcatgtaaatataaatgtaggtgcataatatagactttttctgaatggtttataagttgcagtgctgggattacaagcgtgagctaccacacccagcgaggaagccaagtttaacgtgtgtgctccactcctccaacctggccaaagggcagtcatcatcactggccactactgaccacagcctttagaaactccccttgaacgtgctgggctgaccttcctctgatcacaggcaaggcaaaggaaaacgacaggcccttgccttcccggtcctcaagggtcagctgtaagatgatgtcataaagccggatcaggtcctggggccggggggaagcacttgctgtcatcctctggctgctgctgcagcagagccctctgcagacctttggccatgctctcattacacttgattgccattgacagcttgatgtaagtcaggttgtagatgagcatgagagtgtggagcagagtcggcgagcgcaagtcgagcccatcaacctggacagctgtctccgtgctttcaccggtgaggaagagctaggggaagatgagatgtactactgttccaagtgtaagacccactgcttagcaacaaagaagctggatctctggaggcttccacccttcctgattattcaccttaagtgatttcagtttgtaaatgatcagtggataaaatcacagaaaattgtcaaatttcctcgggaaagttttgacctgagtgcttttttggtaccacgagacccggctctctgccagcatcaaccactcacaccccagggggatgagctctccaagcccaggattctggcaagagaggtgaagaaagtggatgtgcagagtttggctggggaataggacatgctcctgagcaaaagcccatcctcactcagcgctaacatcagcagcagcccaaaaggttctccttcttcatcaagaaaaagtggaaccagctgtccctccagcaaaaacagcagccctaatagcagcccacggactttggggaggagcaaagggaggctctggctgccccagattggcagcaaaaataaactgtcaagtagtaagaagaacttggatgccagcaaagagaatggggctgggcagatctgtgagctggctgacgccttgagccgagggcatatgcggggggtgggcagccaaccagagctggtcactcctcaggaccatgaggtagctttggccaatggattcctttatgagcatgaagcatatggcaatggctatagcaatggtcagcttggaaaccacagtgaagaagacagcactgatgaccaaagagaagacactcatattaagcctatttatatgcaatttcatgccattcaggaattctgagtgggggccattacgtcacttatgccaaaaacccaaactgcaagtggtactgctacaatggcagcatctgtgaggaacgtcaccctgatgaaattgacaccaactctgcctacattcttttctatgagcagcagaggatagactacgcacaatttctgccaaagattgatggcaaaaagatggcagacacaagcagtatggatgaagactttgagtctgattacaaaaagtactgtgtgttacagcaaagctaccactctggctgctagacagcttggtggggagggagatgactccttgtagctgatacttggcaaagatgtcactgagaggcaagctaaatgtagttattttatcctgttagaatacaaattctaattaaaatagttaactttaagagtagtagtaattttattttgaagtctcatgcaagttgtctgatagagaactttcaggcagatcccaccattagcctgtaaacaaaaggtttggcaccagccacctgggaccaaataagaattcaattgtgcttgtccagatatgaacaaatatgtagtgagtatagagtttatcaataatcataacaaatattaaagatttccttggagtcaaagtaaaaaacaaaaaattataatgttgtctagggatgacatgatatgctacctcctttttcctgaagttttattccattctgttgacaagatggagaaagcaagatcatgaaggtgtgcaaatgattcttacggcatgggcgaggatttttcaatttattttttaaagtttccataccctttctttgtctttcttgctttttgtttttgcctttgtgtttatgtttgagatacaaccagtcattggtggcaggggcatagagtggtcagtctgaaagggaggctctcttaagagctatgtgccttccacccagagggagacccagtagaaagaaaaacatcctgggaaatccagctaccatggccctcccagtggaggcatcttacatttaggatacttcaagtatcctcagaaatgtattctgcacccccggccccgcccatgctgagggaaggggagcagttgccaatatttgcaccatcttcacatgcacatgttgcaacaagagcttctgggaaggtaagcagcatcggagctagatcacgtttcacaattagtggttgttcttttccgtgtttattttgcactttaaaaaagagagaacgcatgcaaatgaacttgcttgtgtgtatttgatggctctaagggctataaattacaaacaaaacacatcccagacattaggagttcataagtatatttaatgaaattggtggttttaggaagtcaactttagttttgctttgtttgcatgtccactaatttttttattttgatattagtcttttttaaaaaattttacagtagtcattgaaagttatgtttctttgtttacttcattttttcctctaattattcaagactggcacaaaagtataaatattatttatttcaggtagaatttttttcgtgtagttttttaatatatacttgaaggaaatgtttcaccttatttttggtctttgtttattcatttagaccctgcaagttgattctcattaattgtcagattccactacactttcttcctcataggtagtaattaccagtgtaactaagcatttgtgttctgatatctgaggccagtaactattaatgtctagttctcagagcatttggaaaggttatcttaaatggctacctaaattgaaatccttttcagaaaaaatataattgcaaataggtaggagtggcctaaattatctaatgtaataaagtcagacaaaatgcatactttatagtttcaagattttcagtacataaaatctgtcctttcctacctggacatgtcccattaaaaagtgggagattttaaataatttctttacagatgttttatttaagcaggtagcacaatctactaatgttgtttgatctgtgtttgttatactggttgtaattaatttttttaattcatgaactagcggaaaatttattaaattaactattaaccacattcaccttgtaaatgactgtataaaacttgttgacaatgcactgactttagaaagatgttaatgtgcataaatagagtgtaaataaaatagtgttgatgtactgaaatatgaactgtataaaaagtattggtaattgtatatggggtgtacctatttatctgtaactattatccaaacaaattaaatactgtggatgcctc

SEQ ID NO: 178177 - DNA, 765 bp, Homo sapiens
  Payload ID: 14982
  Gene Symbol:
  Gene Name: RP11-229P13.27
  ENST ID: ENST00000622933
  CDS Start-End: 1-327
accaacggcaacagatgctgtgcctggagcggcataaagagccacccaaggagctggacacggcctcctcggatgaggagaatgaggacggagacttcacggtgtacgagtgcccgggcctggccccgcctggaaagcccctctgctgcaggctggaggaagggaccctgggcccagcctatagtcagcggtgtctatgggcatggatctggacggggaaaaggacaaagcagcctccatccacagttcattccgggaccaggcccttgcaggggcacctctggcggctgccgtgatttgagaatctcgggtctcttggctgactgatcctgggagactgtggatgaataatgctgggcacggccccacccggaggctgcgaggcttgggggtcctggccggggtggctctgctcgctgccctctggctcctgtggctgctggggtcagcccctcggggtaccccggcaccccagcccacgatcaccatccttgtctggcactggcccttcactgaccagcccccagagctgcccagcgacacctgcacccgctacggcatcgcccgctgccacctgagtgccaaccgaagcctgctggccagcgccgacgccgtggtcttccaccaccgcgagctgcagacccggcggtcccacctgcccctggcccagcggccgcgagggcagccctgggtgtgggcctccatggagtctcctagccacacccacggcctcagccacctccgaggcatcttcaactgggtgct

SEQ ID NO: 178178 - DNA, 746 bp, Homo sapiens
  Payload ID: 14982
  Gene Symbol:
  Gene Name: RP11-229P13.27
  ENST ID: ENST00000625047
  CDS Start-End: 1-232
cctggggaccagcggctggcacagagcgcggagatgtaccactaccagcaccaacggcaacagatgctgtgcctggagcggcataaagagccacccaaggagctggacacggcctcctcggatgaggagaatgaggacggagacttcacggtgtacgagtgcccgggcctggccccggggcacctctggcggctgccgtgatttgagaatctcgggtctcttggctgactgatcctgggagactgtggatgaataatgctgggcacggccccacccggaggctgcgaggcttgggggtcctggccggggtggctctgctcgctgccctctggctcctgtggctgctggggtcagcccctcggggtaccccggcaccccagcccacgatcaccatccttgtctggcactggcccttcactgaccagcccccagagctgcccagcgacacctgcacccgctacggcatcgcccgctgccacctgagtgccaaccgaagcctgctggccagcgccgacgccgtggtcttccaccaccgcgagctgcagacccggcggtcccacctgcccctggcccagcggccgcgagggcagccctgggtgtgggcctccatggagtctcctagccacacccacggcctcagccacctccgaggcatcttcaactgggtgctgagctaccggcgcgactcggacatctttgtgccctatggccgcctggagccccactgggggccctcgccaccgctg

SEQ ID NO: 178179 - DNA, 1342 bp, Homo sapiens
  Payload ID: 14983
  Gene Symbol:
  Gene Name: RP11-231C14.4
  ENST ID: ENST00000458643
  CDS Start-End: 33-1295
aaacattccctcctttggccctacaggtcagaatggcggcagcggagcatcgtcattcttcaggattgccctactggccctacctcacagctgaaactttaaaaaacaggatgggccaccagccacctcctccaactcaacaacattctataactgataactccctgagcctcaagacacctcccgagtgtgtgctcactccccttccaccctcagcggatgataatctcaagacacctcccgagtgtgtgctcactccccttccaccctcagcggatgataatctcaagacacctcctgagtgtctgctcactccccttccaccctcagcggatgataatctcaagacacctcccgagtgtctgctcactccccttccaccctcagcggatgataatctcaagacacctcccgagtgtctgctcactccccttccaccctcagctccaccctcagctccaccctcagcggatgataatctcaagacacgtgccgagtgtctgctccatccccttccaccctcagcggatgataatctcaagacaccttccgagcgtcagctcactccccttccaccctcagctccaccctcagcagatgataatatcaagacacctgccgagcgtctgcgggggccgcttccaccctcagcggatgataatctcaagacaccttccgagcgtcagctcactccccttccaccctcagctccaccctcagcagatgataatatcaagacacctgccgagcgtctgcgggggccgcttccaccctcagcggatgataatctcaagacaccttctgagcgtcagctcactccccttccaccctcagctccaccctcagcagatgataatatcaagacacctgccgagcgtctgcgggggccgcttccaccctcagccgatgataatctcaagacacctcccttagctactcaggaggctgaggcagaaaaaccacgcaaacccaagaggcagagggcggctgagatggaaccacctcccgaacccaagaggcggagggtcggtgacgtggaaccgtcacgcaaacccaagaggcggagggccgctgacgtggaaccatcatcacccgaacccaagaggcggagggtcggtgatgtggaaccgtcacgcaaacccaagaggcggagggccgctgacgtggaaccatcatcacccgaacccaagaggcggagggtcggtgacgtggaaccgtcacgcaaacccaagaggcggagggccgctgacgtggaaccatcattacccgaacccaagaggcggaggttgagctgagaagaggccagtgcactcaagcctgagcaataagaataaaaccgagt

SEQ ID NO: 178180 - DNA, 1861 bp, Homo sapiens
  Payload ID: 14983
  Gene Symbol:
  Gene Name: RP11-231C14.4
  ENST ID: ENST00000550665
  CDS Start-End: 76-1861
tcctgtttcacacagaagaaaactgaggttaaaaggggttggcactcatcatgagcccctgttctcattctgcaaatggtgaagctctctattgtcctgaccccacagttcctgtcccatgaccagggccagctcaccaaggagctgcagcagcatgtaaagtcagtgacatgcccatgcgagtacctgaggaaggttatcaatactctggctgaccatcatcatcgtgggactgactttggtggaagtccttggttacatgtcattattgcgtttccgacaagttataaagttgtcattaccctctggatagtttacctttgggtgtctctcctgaagactatcttctggtctcgaaatggacatgatggatccacggatgtacagcagagagcctggaggtccaaccgccgtagacaggaagggctgaggtccatttgtatgcacacaaagaaaagagtttcttcctttcgaggaaataaaattggcctgaaagacgtcattactctacggagacatgtggaaacaaaagttagagctaaaatccgtaagaggaaggtgacaacgaaaatcaaccatcatgacaaaatcaatggaaagaggaagaccgccagaaaacagaaaatgtttcaacgtgcgcaagagttgcggcggcgggcagaggactaccacaaatgcaaaatccccccttctgcaagaaaggctctttgcaactgggtcagaatggcggcagcggagcatcgtcattcttcaggattgccctactggccctacctcacagctgaaactttaaaaaacaggatgggccaccagccacctcctccaactcaacaacattctataactgataactccctgagcctcaagacacctcccgagtgtgtgctcactccccttccaccctcagcggatgataatctcaagacacctcccgagtgtgtgctcactccccttccaccctcagcggatgataatctcaagacacctcctgagtgtctgctcactccccttccaccctcagcggatgataatctcaagacacctcccgagtgtctgctcactccccttccaccctcagcggatgataatctcaagacacctcccgagtgtctgctcactccccttccaccctcagctccaccctcagctccaccctcagcggatgataatctcaagacacgtgccgagtgtctgctccatccccttccaccctcagcggatgataatctcaagacaccttccgagcgtcagctcactccccttccaccctcagctccaccctcagcagatgataatatcaagacacctgccgagcgtctgcgggggccgcttccaccctcagcggatgataatctcaagacaccttccgagcgtcagctcactccccttccaccctcagctccaccctcagcagatgataatatcaagacacctgccttccaccctcagcggatgataatctcaagacaccttccgagcgtcagctcactccccttccaccctcagctccactctcagcagatgataatatcaagatacctgctgagcgtctgcggattccgcttccaccatcagccgatgataatctcaagacaccttccgagcgtcagctcactccccttccaccctcagctccaccctcagcagatgataatatcaagacacctgccgagcgtctgcgggggccgcttccaccctcagcggatgataatctcaagacaccttccgagcgtcagctcactccccttccaccctcagctccaccctcagcagatgataatatcaagacacctgccgagcgtctgcgggggccgcttccaccctcagcggatgataatctcaagacaccttccgagcgtca

SEQ ID NO: 178181 - DNA, 710 bp, Homo sapiens
  Payload ID: 14983
  Gene Symbol:
  Gene Name: RP11-231C14.4
  ENST ID: ENST00000547235
  CDS Start-End: 1-74
agcatgtaaagtcagtgacatgcccatgcgagtacctgaggaaggttgatggacggatggctacatggatgtgatggagatggtttactatcgggaccttccgcaccctgctgatgttttgttgcttaggatatgaatggctgagcggaggctgtaaaacctggcactctgcttgggtatgaggttcttcctgccatcctgccatcatttgttttttatgttttgtcgccataagtgaccttgaggaaccctgggagctcaggaaggaaggagcgcccagaagcagggacagggagctggttggggaggaccagaaatcaggttatcaatactctggctgaccatcatcatcgtgggactgactttggtggaagtccttggttacatgtcattattgcgtttccgacaagttataaagttgtcattaccctctggatagtttacctttgggtgtctctcctgaagactatcttctggtctcgaaatggacatgatggatccacggatgtacagcagagagcctggaggtccaaccgccgtagacaggaagggctgaggtccatttgtatgcacacaaagaaaagagtttcttcctttcgaggaaataaaattggcctgaaagacgtcattactctacggagacatgtggaaacaaaagttagagctaaaatccgtaagaggaaggtgacaacgaaaatcaaccatcatga

SEQ ID NO: 178182 - DNA, 675 bp, Homo sapiens
  Payload ID: 14983
  Gene Symbol:
  Gene Name: RP11-231C14.4
  ENST ID: ENST00000550690
  CDS Start-End: 245-394
tttagacttaacattttctttttttgtaggtttcaggcacagaactgtatatccaataatagtgaaatggatcccactaattatgacagaaatgatgatacatttaaatgacttggatgttttataggtatgatctcgtgaaaccttgagagaaactgaatgacgaatgaaactattgttcctgtttcacacagaagaaaactgaggttggcactcatcatgagcccctgttctcattctgcaaatggtgaagctctctattgtcctgaccccacagttcctgtcccatgaccagggccagctcaccaaggagctgcagcagcatgtaaagtcagtgacatgcccatgcgagtacctgaggaaggttgatggacggatggctacatggatgtgatggagatggtttactatcgggaccttccgcaccctgctgatgttttgttgcttaggatatgaatggctgagcggaggctgtaaaacctggcactctgcttgggttatcaatactctggctgaccatcatcatcgtgggactgactttggtggaagtccttggttacatgtcattattgcgtttccgacaagttataaagttgtcattaccctctggatagtttacctttgggtgtctctcctgaagactatcttctggtctcgaaatggacatgatggatc

SEQ ID NO: 178183 - DNA, 910 bp, Homo sapiens
  Payload ID: 14983
  Gene Symbol:
  Gene Name: RP11-231C14.4
  ENST ID: ENST00000551448
  CDS Start-End: 62-184
gtttcacacagaagaaaactgaggttggcactcatcatgagcccctgttctcattctgcaaatggtgaagctctctattgtcctgaccccacagttcctgtcccatgaccagggccagctcaccaaggagctgcagcagcatgtaaagtcagtgacatgcccatgcgagtacctgaggaagtgaccttgaggaaccctgggagctcaggaaggaaggagcgcccagaagcagggacagggagctggttggggaggaccagaaatcaggttatcaatactctggctgaccatcatcatcgtgggactgactttggtggaagtccttggttacatgtcattattgcgtttccgacaagttataaagttgtcattaccctctggatagtttacctttgggtgtctctcctgaagactatcttctggtctcgaaatggacatgatggatccacggatgtacagcagagagcctggaggtccaaccgccgtagacaggaagggctgaggtccatttgtatgcacacaaagaaaagagtttcttcctttcgaggaaataaaattggcctgaaagacgtcattactctacggagacatgtggaaacaaaagttagagctaaaatccgtaagaggaaggtgacaacgaaaatcaaccatcatgacaaaatcaatggaaagaggaagaccgccagaaaacagaaaatgtttcaacgtgcgcaagagttgcggcggcgggcagaggactaccacaaatgcaaaatccccccttctgcaagaaaggctctttgcaactgggtcagaatggcggcagcggagcatcgtcattcttcaggattgccctactggccctacctcacagctgaaactttaaaaaacaggatgggccaccagccacctcctccaactcaacaacatt

SEQ ID NO: 178184 - DNA, 464 bp, Homo sapiens
  Payload ID: 14983
  Gene Symbol:
  Gene Name: RP11-231C14.4
  ENST ID: ENST00000552123
  CDS Start-End: 1-236
ggctgaggtccatttgtatgcacacaaagaaaagagtttcttcctttcgaggaaataaaattggcctgaaagacgtcattactctacggagacatgtggaaacaaaagttagagctaaaatccgtaagaggaaggtgacaacgaaaatcaaccatcatgacaaaatcaatggaaagaggaagaccgccagaaaacagatcaaccacatccttcaaaaggactatgcctgtttataagcccagctgtttctgccctgtgaaacacggaaaatgtttcaacgtgcgcaagagttgcggcggcgggcagaggactaccacaaatgcaaaatccccccttctgcaagaaaggctctttgcaactgggtcagaatggcggcagcggagcatcgtcattcttcaggattgccctactggccctacctcacagctgaaactttaaaaaacaggatgggccaccagccacct

SEQ ID NO: 178185 - DNA, 797 bp, Homo sapiens; identical to SEQ ID NO: 172532
  Payload ID: 14983
  Gene Symbol:
  Gene Name: RP11-231C14.4
  ENST ID: ENST00000549733
  CDS Start-End: 1-207

SEQ ID NO: 178186 - DNA, 1216 bp, Homo sapiens
  Payload ID: 14983
  Gene Symbol:
  Gene Name: RP11-231C14.4
  ENST ID: ENST00000617311
  CDS Start-End: 55-807
agccacctccacctctgtcctggccgcctcagggcgccctgaaaggaccaggacatgcgggtgcggtggatgctcttttggctcctctttgggctcctactggaatttatcagccatcagtgcatctctgttatcaatactctggctgaccatcatcatcgtgggactgactttggtggaagtccttggttacatgtcattattgcgtttccgacaagttataaagttgtcattaccctctggatagtttacctttgggtgtctctcctgaagactatcttctggtctcgaaatggacatgatggatccacggatgtacagcagagagcctggaggtccaaccgccgtagacaggaaggaaataaaattggcctgaaagacgtcattactctacggagacatgtggaaacaaaagttagagctaaaatccgtaagaggaaggtgacaacgaaaatcaaccatcatgacaaaatcaatggaaagaggaagaccgccagaaaacagaaaatgtttcaacgtgcgcaagagttgcggcggcgggcagaggactaccacaaatgcaaaatccccccttctgcaagaaaggctctttgcaactgggtaagtttgcttgttttccttgcttttggacatagtctgccaggtcaggacatggatacatttttctccctacagctctgtgctcaagccctgcagagggagatggcagagagaaaggctgcctacaagcatcacagtcccatccctgttggtaaccgtgttgtgcaaaaacaccttcatccccacccagtggggcccctgatctaatattctaagtgtcagaggttccgtatttgtaatagcagatgggccctgactgtaaactagtgaagagtgaatgtaacttattacccacagggacaattccaaatgaaggccttaaatgatgctcagctaagctggttcttgtgtggcctctgtaccttcaaaagctgccgagtcctatgattacacgtgatgggacttgtacacttgaagtgaaacacagttttaaaacttgctttgtttagaattcccacctcatttttccatggacaaaagtattctttatgtcctagtgcacttacaatttggtattacctgggagtgaaaagaaatattacagccatgcctaagtgacttcttgaggtgagattgttctgtcagaaaaccctctcccagttcccctgcagctctt

SEQ ID NO: 178187 - DNA, 2550 bp, Homo sapiens
  Payload ID: 14984
  Gene Symbol:
  Gene Name: RP11-231C18.3
  ENST ID: ENST00000507166
  CDS Start-End: 1-2550
atgtcggccggcgaggtcgagcgcctagtgtcggagctgagcggcgggaccggaggggatgaggaggaagagtggctctatggcggcccatgggacgtgcatgtgcacagtgatttggcaaaggacctagatgaaaatgaagttgaaaggccagaagaagaaaatgccagtgctaatcctccatctggaattgaagatgaaactgctgaaaatggtgtaccaaaaccgaaagtgactgagaccgaagatgatagtgatagtgacagcgatgatgatgaagatgatgttcatgtcactataggagacattaaaacgggagcaccacagtatgggagttatggtacagcacctgtaaatcttaacatcaagacagggggaagagtttatggaactacagggacaaaagtcaaaggagtagaccttgatgcacctggaagcattaatggagttccactcttagaggtagatttggattcttttgaagataaaccatggcgtaaacctggtgctgatctttctgattattttaattatgggtttaatgaagatacctggaaagcttactgtgaaaaacaaaagaggatacgaatgggacttgaagttataccagtaacctctactacaaataaaattacggccgaagactgtactatggaagttacaccaggtgcagagatccaagatggcagattcaatctttttaaggtacagcagggaagaactggaaactcagagaaagaaactgcccttccatctacaaaagctgagtttacttctcctccttctttgttcaagactgggcttccaccgagcagaaacagcacttcttctcagtctcagacaagtactgcctccagaaaagccaattcaagcgttgggaagtggcaggatcgatatgggagggccgaatcacctgatctaaggagattacctggggcaattgatgttatcggtcagactataactatcagccgagtagaaggcaggcgacgggcaaatgagaacagcaacatacagctgccttatgactcaagatgggagtttccaagagatggactagtgcttggtcgggtcttggggtctggagcgtttgggaaggtggttgaaggaacagcctatggattaagccggtcccaacctgtcatgaaagttgcagtgaagatgctaaaacccacggccagatccagtgaaaaacaagctctcatgtctgaactgaagataatgactcacctggggccacatttgaacattgtaaacttgctgggagcctgcaccaagtcaggccccatttacatcatcacagagtattgcttctatggagatttggtcaactatttgcataagaatagggatagcttcctgagccaccacccagagaagccaaagaaagagctggatatctttggattgaaccctgctgatgaaagcacacggagctatgttattttatcttttgaaaacaatggtgactacatggacatgaagcaggctgatactacacagtatgtccccatgctagaaaggaaagaggtttctaaatattccgacatccagagatcactctatgatcgtccagcctcatataagaagaaatctatgttagactcagaagtcaaaaacctcctttcagatgataactcagaaggccttactttattggatttgttgagcttcacctatcaagttgcccgaggaatggagtttttggcttcaaaaaattgtgtccaccgtgatctggctgctcgcaacgtcctcctggcacaaggaaaaattgtgaagatctgtgactttggcctggccagagacatcatgcatgattcgaactatgtgtcgaaaggcagtacctttctgcccgtgaagtggatggctcctgagagcatctttgacaacctctacaccacactgagtgatgtctggtcttatggcattctgctctgggagatcttttcccttggtggcaccccttaccccggcatgatggtggattctactttctacaataagatcaagagtgggtaccggatggccaagcctgaccacgctaccagtgaagtctacgagatcatggtgaaatgctggaacagtgagccggagaagagaccctccttttaccacctgagtgagattgtggagaatctgctgcctggacaatataaaaagagttatgaaaaaattcacctggacttcctgaagagtgaccatcctgctgtggcacgcatgcgtgtggactcagacaatgcatacattggtgtcacctacaaaaacgaggaagacaagctgaaggactgggagggtggtctggatgagcagagactgagcgctgacagtggctacatcattcctctgcctgacattgaccctgtccctgaggaggaggacctgggcaagaggaacagacacagctcgcagacctctgaagagagtgccattgagacgggttccagcagttccaccttcatcaagagagaggacgagaccattgaagacatcgacatgatggatgacatcggcatagactcttcagacctggtggaagacagcttcctgtaa

SEQ ID NO: 178188 - DNA, 770 bp, Homo sapiens
  Payload ID: 14985
  Gene Symbol:
  Gene Name: RP11-234B24.6
  ENST ID: ENST00000544741
  CDS Start-End: 1-252
gtcgtagatgtatccaaaggaattgttaatgcagttaaggatcctgatgccaatgggaaatcctttgctttcgttggtcccagtcggtacctccttttccacctggtgaagtacatctttgctgtggctcacagattgttcctcccattccccttgccgctttttgcctatcgatgggtagcaagagtctttgaaataagcccatttgagccctggataacaagggataaagtggagcggaagaaagtatgaaattagctctgaggcaacaagaaaatgtgaacagcacactgaagagggcgaaagatgaagtacgccctcttctaaaggcaatggaaaccaaggtgaatgagacaaagaagcacaaaacccaaatgaaactcttcccacactcacagcttttcaggcaatggggcgaggatctttctgaggcccagcagaaggcggcccaggacctcttccggaagtttggttacaacgcgtacctcagcaaccagctgcctctcaatcgcaccatccccgacacgcgagactacagatgtcttcggaagacatatccttcccaactcccatccctcagtgtcattctcatattcgtgaatgaagctctgtccattatacaacgggccatcaccagtatcatcaaccggacgccctctcgattgttgaaggaaatcatcttggtggatgatttcagctcaaatggagaactaaaggtacacttggatgagaagattaagctttacaaccagaagtatccaggactactg

SEQ ID NO: 178189 - DNA, 4753 bp, Homo sapiens
  Payload ID: 14986
  Gene Symbol:
  Gene Name: RP11-235E17.2
  ENST ID: ENST00000572919
  CDS Start-End: 31-1467
cagactggagctgcgcgggtcagggagataatggctgcgcggccgatcaccctcggcattgacctgggcaccacatctgtgaaggcagctctgctgagggccgcgcccgacgacccatccgggttcgcagtgctggcgagctgtgcccgtgctgcgcgggcagaggcggcggtcgagagcgcggtggccgggccccaggggcgggagcaggatgtgagtagaatcctccaagccctacacgagtgccttgctgcccttccccgaccccagctccggagcgtcgtgggcatcggggtgtcgggccagatgcatggagtcgtgttttggaaaacaggccaaggctgtgaatggacagagggagggattaccccggtgttcgagccccgagctgttagccacctggtcacgtggcaggatggccgatgtagcagcgaattcctggcctctctgccccagccgaagtctcatctcagtgtggccacgggcttcggctgtgcaaccatcttctggcttttgaaatatcgcccagagttcctgaagtcctacgacgcagccggtaccatccacgactatgtggttgccatgctgtgtggcttgccaagacctctgatgtccgaccagaatgctgccagctggggctatttcaacacgcagagccaaagctggaacgtagagacactgaggagctcgggttttcctgtccacctgctcccagacatcgccgagcctggcagtgtggcgggcagaacttcccacatgtggtttgaaatcccaaaggggacgcaggtgggagtggccttgggtgatttacaggcctctgtctattcctgcatggcccagaggacagatgcagttctcaacatcagcacctcggttcagctggcagcctccatgccttcaggattccagcctgcacagactccagaccctacggccccagtcgcctacttcccatacttcaacaggacctacctgggggtggccgcgtcactcaacgggggcaatgtgctggccacgttcgtccacatgctggttcagtggatggcagatctaggcctggaggttgaagaatccactgtgtattcacgcatgattcaggcagctgtgcagcagagagatacccacctgaccatcaccccgacagtgctgggggagaggcacctgccggaccagctggcctcagtgaccagaatctcctcctccgacctctccctggggcacgtgacccgggctctgtgccgaggcattgttcagaacctgcactccatgcttccgattcagcagctccaggagtggggcgtggagagggtgatgggcagtgggagtgcgctgtccaggaatgacgtgctgaagcaggaggtgcagagggctttccctttgcccatgtcctttgggcaggatgtggatgcagctgtcggggcagctctggtcatgctccggagacacctcaaccagaaggaatcttagacagcaaactctttcgccaaacgactgctgtgaattttacctgattaacattcctgacaccatctgtgggtcatcctttccctggaccgttcagtggacagctttcaagcagtgcttgttgtgaggtcccatctcggccaagaacttaccttcagaacatactctaataatgcagccaggagccgtcagccagatcccaaatgagtgccttccgaaattgacccacctgggagctatttacaaatgtccatgtgggagagagagagcatgagagcacagtagcccagcctgctggtcagcaggctcatctgtggttcacctgtagacagagagcagatcaatgtgtacttcagacaccagaaagtctggtggctttggtcccaagtgggaaaagagaactgccccatgcccagcttgtgattatcgtttttggagacctgaagcccacactcgggtcgtatggacttctggaaaagttcttgtctcctggactgaaccatgtgaccggaggcccctttcctagtctcatcctcccctggctgcagatgcttagctgggccagggattgacccaagcgcgatgcagcaggcaggctcagaagacgatgcggggctgtgtgccggccttcttgctgcatgtactcagcctcaggagagcttgctgcacccaggccgcccaggtcttcacagcacaactgcctggaaggcaggttgcgagaaggagaggcggatggcatgagcagcaagggggaccgatgctgtgcagctcacaccactccagaacctgacaaggcaccagcaggaccccttgccaggagcatgtctgtgcagcagtgtttttgcccctgcacattccagaagccctcatgggaagggatgcagccaggcagactcctgccagatggggcaggtagtttattcaaagagaactctgtatcccataggcccaggctctcctttcgcttggcgtgggctttgctggcccagtgtgtgctcctggctcagcagaaacatccatttgagttggcatccctgtagggatcccagagcgttgtaagccttcttgtgattggtagggatggctgtggggtggcttccaggagggggccaccattgccgcatctacttctagactcccaaaggagcccaggctcaggcaggcctggcccagagtcacgctggcaaccacgagtttgggaagcagtcgtattctctctctctctctctctctctctctcagtatccatgacaggttgcacactgggccacagaggatccagcaaggatgaagaaatggagcagcacagacttgggggcagctgcggacccactccaaaaggacacctgcccagaccccctggatggagaccctaactccaggccacctccagccaagccccagctctccacggccaagagccgcacccggctctttgggaagggtgactcggaggaggctttcccggtggattgccctcacgaggaaggtgagctggactcctgcccgaccatcacagtcagccctgttatcaccatccagaggccaggagacggccccaccggtgccaggctgctgtcccaggactctgtcgccgccagcaccgagaagaccctcaggctctatgatcgcaggagtatctttgaagccgttgctcagaataactgccaggatctggagagcctgctgctcttcctgcagaagagcaagaagcacctcacagacaacgagttcaaagaccctgagacagggaagacctgtctgctgaaagccatgctcaacctgcacgacggacagaacaccaccatccccctgctcctggagatcgcgcggcaaacggacagcctgaaggagcttgtcaacgccagctacacggacagctactacaagggccagacagcactgcacatcgccatcgagagacgcaacatggccctggtgaccctcctggtggagaacggagcagacgtccaggctgcggcccatggggacttctttaagaaaaccaaagggcggcctggattctacttcggtgaactgcccctgtccctggccgcgtgcaccaaccagctgggcatcgtgaagttcctgctgcagaactcctggcagacggccgacatcagcgccagggactcggtgggcaacacggtgctgcacgccctggtggaggtggccgacaacacggccgacaacacgaagtttgtgacgagcatgtacaatgagattctgatgctgggggccaaactgcacccgacgctgaagctggaggagctcaccaacaagaagggaatgacgccgctggctctggcagctgggaccgggaagatcggggtcttggcctatattctccagcgggagatccaggagcccgagtgcaggcacctgtccaggaagttcaccgagtgggcctacgggcccgtgcactcctcgctgtacgacctgtcctgcatcgacacctgcgagaagaactcggtgctggaggtgatcgcctacagcagcagcgagacccctaatcgccacgacatgctcttggtggagccgctgaaccgactcctgcaggacaagtgggacagattcgtcaagcgcatcttctacttcaacttcctggtctactgcctgtacatgatcatcttcaccatggctgcctactacaggcccgtggatggcttggtgcggccagaggctcaggcctcgtgggcgagggtgtgggtggtggggaaggggtgtggacatttcgggagacctccccgaccccaggcccaggctctgccctggactccttcccagcttgcgggagcgatggatggagaacgtggagaacctcgtatccctgcgcccatctcccctgcctcaggctgtacaggagacccgcccccttcccgcttctcagttcctctcctttaaccttgaggtcctgtggggctgagtgtgtggtgactcaggtccctgattgtagacggggtgtactcggttagaaagcatgcaggggccgggcatggtggctcatgcctgtaatcccagcactttgggaggctgaggtgggcagatcacctgaggtctggagtttgagaccagcctgaccaacatggtgaaaccccgtctctactaaaaacaccaaattaactgggtgtggtggagcctgcctgtaatcccagctactcagggaggctgagacaggagaatcgcttaaaccttggaggcagaggttgtgatgagctgagatggcaccactgcactccaggctggtcaacaagagtgaaactctgtctcaaaaaaaaaaaaagaaaaa

SEQ ID NO: 178190 - DNA, 2413 bp, Homo sapiens
  Payload ID: 14987
  Gene Symbol:
  Gene Name: RP11-240B13.2
  ENST ID: ENST00000262283
  CDS Start-End: 101-2170
ctgactctcttttcggactcagcccgcctgcacccaggtgaaataaacagctttattgctcacacaaagcctgtttggtggtctcttcacacggacgcgcatgaaatttggtgccgtcactcggatcgggggacctcccttgggaaatcaatccccgtcctcctgttctttgctccatgagaaagatccacctacgacctcaggtcctcagacagaccagcccaagaaacatctcaccaatttcaaatccgctaccaggagggtggccagaactcagtggttgacagctgacagacagacgtgggcttccatatcgtccgtgccctgggctcagaccatcagtgagaaaaaacctggagggtctctctgggaaactcgttcttccccaccgactactgcagggaccgaggaagccatgaacactacaagccttttggcgcctgctgctgagataatggccacacctggcagcccatcccaggccagccctaccttgggagcattcacccatggcacacagactccgagtccaaccaaggcaacagcccccagatatccacaaacaggtgatctctctgcagagtggccattcactgctggtgaagagccagtcctggtcccaagaccccatcaagtttcaagagtccgttccagttgctgcctaagccccatcctttgttctcctgctatgattgcgtttctcctcaccagtgtgctgatgatcccccatgccggaggccatcctctggacactccacatcttccacaggagctgcctccaggactcccaaacaatatcaatatcactttcttcagtgggatgtttaaaaatgtggaaagtgtggctgaaatttttgattgcctgggcccccacttcacctggctgcaggctgtcttcaccaatttccctgtgctgatccagtttgtcaatggtatgaagtgtgtggctggtctctgcccccgagactttgaagactatggttgcacctgcaggtttgagatggaagggttgcctgtggatgaatctgacagctgctgcttccagcaccgcaggtgctatgaggaggccgctgagatggactgtctccaagaccccgccaaacttagcacagaggtcaattgtgtcagcaagaagatcatatgtgagtccaaggacaactgtgagcacctgctgtgtacctgtgataaggctgccatagagtgcttggctcgatccagcctcaactcttccctgaaccttctggacacctccttctgcctggctcagactccagagacaaccatcaaggaagacttgacaacacttctgcccagagtggttcctgtggagcccacagacaccagcctgacagccctttcaggagaagtggctgcagagactgaggctgacagactgatcactctctccaagaaaaaagcaggccacgatcaggaaggagtgggagctgctagggctacgtcccctccaggatctgcagagatagttgcaacaagggttacagctaaaattgtaacccttgtccctgctggcattaaatctctggggctggcagtgtcatctgttgaaaatgatcctgaggagaccactgaaaaagcctgtgacagattcaccttcctgcacctgggaagtggggacaacatgcaggtgatgccacagcttggagagatgctcttttgtctgacatcccggtgcccggaggaatttgagtcttatggctgttactgtggacaagaaggaagaggcgagccaagggatgacctagacaggtgctgcttgtcccatcactgctgcctagagcaagtgagaaggctgggctgcctgcttgagaggcttccttggtcaccggtggtgtgtgtggatcatacgcccaagtgtgggggccaaagcctgtgtgagaagttgctctgtgcctgtgaccagacggcagctgagtgcatgacctctgcctcctttaaccaaagcctcaagtccccaagcagactcgggtgccctgggcagccagcagcctgtgaagacagcctgcaccctgtgcccgcagcccccaccctgggctccagctctgaggaggacagcgaggaggaccctccacaggaggacctcggcagagccaagaggtttctgcggaagtcactgggtcccttggggatcgggcctcttcatggaagatagatgcccagagaaaatggctaacaccttcagtagcgtggctcctgctccaccttcagctctttatctctcagcctcctctgtcccttggagccttcttcccttcctttaactcagaggcggggagggaacagaggccgtgagccctgcccatgcctcatcagctgtggtcacctcacaagccaatgtacacttggagaaggcacaccatggtacctccatgctcctttagtgcactgtggaagc

SEQ ID NO: 178191 - DNA, 3099 bp, Homo sapiens
  Payload ID: 14988
  Gene Symbol:
  Gene Name: RP11-244H3.4
  ENST ID: ENST00000487874
  CDS Start-End: 186-2357
ggggcggtgccaggtgggctacgcggctggggcggctgcggatatcgccttagggacgcgttgacattcactggctagtccaccgctctcagtcggagaccacattgcctcgtgtccaactatccattaccaagaagaaatctattcgtttgagcctgagacactctttgaggtaaaaaattagaatgaaagaacctttggatggtgaatgtggcaaagcagtggtaccacagcaggagcttctggacaaaattaaagaagaaccagacaatgctcaagagtatggatgtgtccaacagccaaaaactcaagaaagtaaattgaaaattggtggtgtgtcttcagttaatgagagacctattgcccagcagttgaacccaggctttcagctttcttttgcatcatctggcccaagtgtgttgcttccttcagttccagctgttgctattaaggttttttgttctggttgtaaaaaaatgctttataagggccaaactgcatatcataagacaggatctactcagctcttctgctccacacgatgcatcaccagacattcttcacctgcctgcctgccacctcctcccaagaaaacctgcacaaactgctcgaaagacattttaaatcctaaggatgtgatcacaactcgctttgagaattcctatcctagcaaagatttctgcagccaatcatgcttgtcatcttatgagctaaagaaaaaacctgttgttaccatatataccaaaagcatttcaactaagtgcagtatgtgtcagaagaatgctgatactcgatttgaagttaaatatcaaaatgtggtacatggtctttgtagtgatgcctgtttttcaaaatttcactctacaaacaacctcaccatgaactgttgtgagaactgtgggagctattgctatagtagctctggtccttgccaatcccagaaggtttttagttcaacaagtgtcacggcatacaagcagaattctgcccaaattcctccatatgccctggggaagtcattgaggccctcagctgaaatgattgagactacaaatgattcaggaaaaacagagcttttctgctctattaattgcttatctgcttacagagttaagactgttacttcttcaggtgtccaggtttcatgtcatagttgtaaaacctcagcaatccctcagtatcacctagccatgtcaaatggaactatatacagcttctgcagctccagttgtgtggttgctttccagaatgtatttagcaagccaaaaggaacaaactcttcggcggtgcccctgtctcagggccaagtggttgtaagcccgccctcctccaggtcagcagtgtcaataggaggaggtaacacctctgccgtttcccccagctccatccgtggctctgctgcagccagcctccaacctcttgctgaacaatcccagcaagttgctttaacccatacagttgttaaactcaagtgtcagcactgtaaccatctatttgccacaaaaccagaacttcttttttacaagggtaaaatgtttctgttttgtggcaagaattgctctgatgaatacaagaagaaaaataaagttgtggcaatgtgtgactactgtaaactgcagaaaattataaaggagactgtgcgattctcaggggttgataagccattctgtagtgaagtttgcaaattcctctctgcccgtgactttggagaacgatggggaaactactgtaagatgtgcagctactgttcacagacatccccaaatttggtagaaaatcgattggagggcaagttagaagagttttgttgtgaagattgtatgtccaaatttacagttctgttttatcagatggccaagtgtgatggttgtaaacgacagggtaaactaagcgagtccataaagtggcgaggcaacattaaacatttctgtaacctattttgtgtcttggagttttgtcatcagcaaattatgaatgactgtcttccacaaaataaagtaaatatttctaaagcaaaaactgctgtgacggagctcccttctgcaaggacagatacaacaccagttataaccagtgtgatgtcattggcaaaaatacctgctaccttatctacagggaacactaacagtgttttaaaaggtgcagttactaaagaggcagcaaagatcattcaagatgaaagtacacaggaagatgctatgaaatttccatcttcccaatcttcccagccttccaggcttttaaagaacaaaggcatatcatgcaaacccgtcacacagaccaaggccacttcttgcaaaccacatacacagcacaaagaatgtcagacagaatgccctgttcgtgcagtttgctgaggtgttcccgctgaaggtatttggctaccagccagatcccctgaactaccaaatagctgtgggctttctggaactgctggctgggttgctgctggtcatgggcccaccgatgctgcaagagatcagtaacttgttcttgattctgctcatgatgggggctatcttcaccttggcagctctgaaagagtcactaagcacctgtatcccagccattgtctgcctggggttcctgctgctgctgaatgtcggccagctcttagcccagactaagaaggtggtcagacccactaggaagaagactctaagtacattcaaggaatcctggaagtagagcatctctgtctctttatgccatgcagctgtcacagcaggaacatggtagaacacagagtctatcatcttgttaccagtataatatccagggtcagccagtgttgaaagagacattttgtctacctggcactgctttctctttttagctttactactcttttgtgaggagtacatgttatgcatattaacattcctcatgtcatatgaaaatacaaaataagcagaaaagaaatttaaatcaaccaaaattctgatgccccaaataaccacttttaatgccttggtgtaagtatacctctgaacttttttctgtgcctttaaacagatatatattttttttaaatgaaaataaaaccatatatcctattttatttcctccttttaaaaccttataaactataacactgtt

SEQ ID NO: 178192 - DNA, 492 bp, Homo sapiens
  Payload ID: 14989
  Gene Symbol:
  Gene Name: RP11-248J23.7
  ENST ID: ENST00000491114
  CDS Start-End: 1-200
tgatgaaaaagttctgtgctcagccttgggaggagataaaaacatcttacgctggagtaaaggagaagtacctgagtgaatactgcttttctggtacctacattctctccctccttctgcaaggctatcatttcacagctgattcctgggagcacatccatttcattggcaagaaagttgaaataaaaggaccatcatgaaaaaatctcaaagagaagatatttttaaaaaggttgcttccaaatcttggctcttgtgaacagtgctgcaacaaacatgggagtgcagatgtcagaagagatggataatattacagctgaagaaattatagacaagcatctccaaaaagatttagatgcagaagaaaatcaaaatgtagcaaagacattgagaggcaaagtgagagaaaagctaaaaatttctaagattaataaaggtgaaaaatcttcaactgagcagctcattgatagcgaaatacatcaaaggtccaag

SEQ ID NO: 178193 - DNA, 242 bp, Homo sapiens
  Payload ID: 14990
  Gene Symbol:
  Gene Name: RP11-249C24.12
  ENST ID: ENST00000379816
  CDS Start-End: 59-199
cctgccccactgcttcttctcctctcccttaggaactctagcttcacctcgcttcgtaatggaccccaattgctcctgctccactactcctgcaaatgcagagagtgcaaatgcacctcctgcaagacgagctgctgctcctgctgccccgtgggctgtgccaagtgtgcccagggatgtgtttgcaaagggacactgacaagtgcagctgctgctcctgatgtagggaaagctgtgttccc

SEQ ID NO: 178194 - DNA, 1636 bp, Homo sapiens
  Payload ID: 14991
  Gene Symbol:
  Gene Name: RP11-257K9.8
  ENST ID: ENST00000423730
  CDS Start-End: 437-952
acttccgctcgagcgcgcctcgcgcggccgcggcgcgagccgggacccctggaagggtcgggtgcgcggcccaggaggtaccgctgtctcctcacaatcggccaggcctgcagccgctgccgccgctgccgccgccgccgccgccgccgccgccgccctactcagggagtggcccaggcctgcggcgcgccaccctcacctccttcattcctaccgtcaaagcccagccttggctacctgacccccctgtggtctcgaactcggttagtccggtgaagggacagagaagcctgggttcccggcggcatcactgagatgctcagtcctgaattctgccctccattaggattatctgctttgtgggataatttcctcattggttgagtcagtgagttgcgtgtctgcaagagagcatcctatctggtcggagcagagcatggacatgggaacgagtgctctcagcaagaagccgtggtggaccctgcctcaaaactttcatgcaccaatggtgtttcacatggaagaggaccaggaggagctcatcttcgggcatggtgacacataccttcgctgcattgaggtgcacagccacacccttattcagctggagagttggttcacagctacaggccagactcgtgtgactgtagtcggaccacacagggcaaggcagtggctgctgcacatgttttgttgtgtggggagccaggactcctatcatcatgctcgaggtgggagcacagcatggccgtgggaacgagtgctctcagcaaggagccgtggtggaccctgcccgaaaactttcattctccaatggtgttccacatggaagaggaccaggaggagctcatcttcggacttgatgacacgtaccttcgctgcattgagctgcacagccacacccttattcagctggagaggtgtttcacagctacaggccagacacgtgtgactgtagtcggaccaccaatggcaaagcagtggctgctgctcatgttccattgcgtggggagccaggactccaagtgtcacgctcgaggtctgaagatgctagagcgtgtccgaagccagcccctgaccaatgatgacctggtcacctccgttagcctgccaccgtacaccggagactgatctcccctgggaagaggggatgagaggagaagtcttggcttcgcttttgatggagtcttactctgtcgcccaggctggagtacaatggtgcgaactcagccacctgctacctctgccttctgggttcaagcaattctctgcctcagcctcctgagtaactggaattgcaggtcagagcagagcatggccatgggaacaagtgccctcagcaagaagccgtggtagaccctgcctgaaaactttcatgatccaatggtgtttcacatggaagaggaccaggaggagctcatctttggtgagtggcctttgcccacatcccctccttcatccttgtcttctccattttcaatttttcccttctttcctaccttcatcagtcacacatcggttcccccaaggctacctccccactccccaagggctggtgcttgatagaccctcctctcgcctcttatgctcacagggcatggtgacacataccttcactgcattgaggtgcacagcc

SEQ ID NO: 178195 - DNA, 1527 bp, Homo sapiens
  Payload ID: 14992
  Gene Symbol:
  Gene Name: RP11-26J3.4
  ENST ID: ENST00000522938
  CDS Start-End: 323-1159
gcccttctttgttgactgaggaaagctcgctccctgcccaggtttttcattgttgatcgaaattaacaccaggtggtgaatagagcccctcctaaggttgctcaggataaatcatttattaaataggtctgcttatcaggaggggcgtgaaggctcccaaaaggaaatgctggcacctgggcccagaagccagggcctctaactcctggggttgatttcttcagtgaagttgcaccctacaaagggaatatggccaaagcggcactcaactgaaggctgatatcaggcgattagacagccatgcattctgcgtttgtctggaatggattgtagagagatggacttatatgaggactaccagtccccgtttgattttgatgcaggagtgaacaaaagctatctctacttgtctcctagtggaaattcatctccacccggatcacctactcttcagaaatttggtctgctgagaacagacccagtccctgaggaaggagaagatgttgctgccacgatcagtgccacagagaccctctcggaagaggagcaggaagagctaagaagagaacttgcaaaggtagaagaagaaatccagactctgtctcaagtgttagcagcaaaagagaagcatctagcagagatcaagcggaaacttggaatcaattctctacaggaactaaaacagaacattgccaaagggtggcaagacgtgacagcaacatctgcttacaagaagacatctgaaaccttatcccaggctggacagaaggcctcagctgctttttcgtctgttggctcagtcatcaccaaaaagctggaagatgtaaaaaactccccaacttttaaatcatttgaagaaaaggtcgaaaacttaaagggttctccaaaaaatgtggaatcctttgcatctatgctgagacattctcctcttacacagatgggacctgcaaaggataaactggtcattggacggatctttcatattgtggagaatgatctgtacatagattttggtggaaagtttcattgtgtatgtagaagaccagaagtggatggagagagtcccatttcgtggtatgctgtttggaggagattttcacaagtgatgataacctgtttttcttccaactctgactttggaaaacatcgtaaaagataaagaagttgtaatacaacatggatgaaccctgaaaacattatgccaaatgaaagaagccattcacaaaagatcatatattgaaataccagaaaggaaccagggtccggttgcggctattagatcttgaacttacgtctaggttcctgggagcaacaacagatacaactgtactagaggctaatgcagttctcttgggaatccaggagagtaaagactcaagatcgaaagaagaacatcatgaaaaataaatgaactttgcttagtggattgactcctttgctgaagtcagttattcatcaagaatgcaattagactaattgtgaataaatgattgaatgaagatataataaataaaagctataattata

SEQ ID NO: 178196 - DNA, 998 bp, Homo sapiens
  Payload ID: 14993
  Gene Symbol:
  Gene Name: RP11-277P12.6
  ENST ID: ENST00000539033
  CDS Start-End: 16-738
cacacagctgcagagatgaataaacaaagaggaaccttctcagaagtgagtctggcccaggacccaaagcggcagcaaaggaaacctaaaggcaataaaagctccatttcaggaaccgaacaggaaatattccaagtagaattaaatcttcaaaatccttccctgaatcatcaagggattgataaaatatatgactgccaaggtttactgccacctccagagaagctcactgccgaggtcctaggaatcatttgcattgtcctgatggccactgtgttaaaaacaatagttcttattcctttcctggagcagaacaatttttccccgaatacaagaacgcagaaagcacgtcattgtggccattgtcctgaggagtggattacatattccaacagttgttattacattggtaaggaaagaagaacttgggaagagagtttgcaggcctgtgcttcaaagaactcttctagtctgctttgtatagataatgaagaagaaatgaaatttctggccagcattttaccttcctcatggattggtgtgtttcgtaacagcagtcatcatccatgggtgacaataaatggtttggctttcaaacatgagataaaagactcagatcatgctgaacgtaactgtgcaatgctacatgtacgtggacttatatcagaccagtgtggatcttcaagaatcattagacggggtttcatcatgttgaccaggctggtcttgaactcctgagctcaagaaatcaacacatcttggcctcccaagttgctgggattactgacacaagccaccgcccctgagtgctcatgtaccatttagcttgtgttttaaaaatctactttttctgccctccctatttttaactagatgatgttttaaaaattacttttccctctctatatagtttgatttaagcattagtcatttacaacaaatattaatattaaaatgcagaccgttatgattggaaaataaatcaatgaacaatataa

SEQ ID NO: 178197 - DNA, 883 bp, Homo sapiens
  Payload ID: 14994
  Gene Symbol:
  Gene Name: RP11-286N22.8
  ENST ID: ENST00000543044
  CDS Start-End: 34-498
gcggtgtctacagtgttctcgacttcgtcgctgatgcttgctctgtcaaggcacagcctattgtctcctttgctcagtgtgacatcattcagacgcttctacagaggtgacagcccaacagattcccaaaaggacatgattgaaatccctttgcctccatggcaggagagaactgatgaatccatagaaaccaaaagagcccgcctgctctatgagagcagaaagaggggaatgttggaaaactgcattcttcttagtctttttgctaaagaacatctgcagcacatgacagaaaagcagctgaacctctatgaccgcctgattaacgagcctagtaatgactgggatatttactactgggccacagaagctaaaccagccccagaaatatttgaaaatgaagtcatggccctgctgagagactttgctaaaaacaaaaacaaagagcagagactgcgtgccccagatcttgagtacctctttgaaaagccacgttgagctgtgctccacggcctggcatgggggttcagtctgtggatggtaactacttatgatggacgttagccttgcttccggcttcttagatgcccagctgccctaccccagaccactggtcctgcctcaagtgatggacataaccctctcctaggacatacatgccccctggggccctgccccacagcatcatgatggggaaactccccctgggggtcgtctccccttatgtgaagatgagttcggggggctacacggaccccctgaaattctacgccaccagctactgcaccgcctacggtcgggaggatttcaagccccgtgtgggcagtcacgtaggcaccggctacaaatcaaatttccagcccgtggtctcatgccaagccag

SEQ ID NO: 178198 - DNA, 569 bp, Homo sapiens
  Payload ID: 14994
  Gene Symbol:
  Gene Name: RP11-286N22.8
  ENST ID: ENST00000538594
  CDS Start-End: 23-424
gtttccggtgcaggtggggaaaatggcggtgtctacagtgttctcgacttcgtcgctgatgcttgctctgtcaaggcacagcctattgtctcctttgctcagtgtgacatcattcagacgcttctacagaggtgacagcccaacagattcccaaaaggacatgattgaaatccctttgcctccatggcaggagagaactgatgaatccatagaaaccaaaagagcccgcctgctctatgagagcagaaagaggggaatgttggaaaactgcattcttcttagtctttttgctaaagaacatctgcagcacatgacagaaaagcagctgaacctctatgaccgcctgattaacgagcctagtaatgactgggatatttactactgggccacaggccccctggggccctgccccacagcatcatgatggggaaactccccctgggggtcgtctccccttatgtgaagatgagttcggggggctacacggaccccctgaaattctacgccaccagctactgcaccgcctacggtccggaaggtccatttcgacacccaggagcacgggcctc

SEQ ID NO: 178199 - DNA, 875 bp, Homo sapiens
  Payload ID: 14994
  Gene Symbol:
  Gene Name: RP11-286N22.8
  ENST ID: ENST00000544801
  CDS Start-End: 22-423
tttccggtgcaggtggggaaaatggcggtgtctacagtgttctcgacttcgtcgctgatgcttgctctgtcaaggcacagcctattgtctcctttgctcagtgtgacatcattcagacgcttctacagaggtgacagcccaacagattcccaaaaggacatgattgaaatccctttgcctccatggcaggagagaactgatgaatccatagaaaccaaaagagcccgcctgctctatgagagcagaaagaggggaatgttggaaaactgcattcttcttagtctttttgctaaagaacatctgcagcacatgacagaaaagcagctgaacctctatgaccgcctgattaacgagcctagtaatgactgggatatttactactgggccacaggccccctggggccctgccccacagcatcatgatggggaaactccccctgggggtcgtctccccttatgtgaagatgagttcggggggctacacggaccccctgaaattctacgccaccagctactgcaccgcctacggtcgggaggatttcaagccccgtgtgggcagtcacgtaggcaccggctacaaatcaaatttccagcccgtggtctcatgccaagccagtctggaggccttagacaacccggccaggggggaacaagcccaggaccatttccagtctgtggccagccagagctaccgccccctggaggtgcctgacggcaagcatcccctgccctggagcatgcgccagaccagctcaggctatgggcgggagaagcccagtgcgggtccccccaccaaggaggtccggaaggtccatttcgacacccaggagcacgggcctcaggccatcacggggctggagcccagggaagtgcct

SEQ ID NO: 178200 - DNA, 580 bp, Homo sapiens
  Payload ID: 14994
  Gene Symbol:
  Gene Name: RP11-286N22.8
  ENST ID: ENST00000541135
  CDS Start-End: 92-580
agctcctccgtggctgccgtggtcggctggccgggcggctaggagttcccggaagtgcccgcgcagccggtttccggtgcaggtggggaaaatggcggtgtctacagtgttctcgacttcgtcgctgatgcttgctctgtcaaggcacagcctattgtctcctttgctcagtgtgacatcattcagacgcttctacagaggtgacagcccaacagattcccaaaaggacatgattgaaatccctttgcctccatggcaggagagaactgatgaatccatagaaaccaaaagagcccgcctgctctatgagagcagaaagaggggaatgttggaaaactgcattcttcttagtctttttgctaaagaacatctgcagcacatgacagaaaagcagctgaacctctatgaccgcctgattaacgagcctagtaatgactgggatatttactactgggccacaggtactggggagaaggttttatacaagaaaatggcacattctgaagtggagctcaacaggccccctggggccctgccccacagcatcatgatggggaaactccccctgggggtcgtctcc

SEQ ID NO: 178201 - DNA, 5059 bp, Homo sapiens
  Payload ID: 14995
  Gene Symbol:
  Gene Name: RP11-287D1.3
  ENST ID: ENST00000451608
  CDS Start-End: 1-576
aaggactcaccactgctgcttcagcagatctctgccatgaggctgcacatctcccagctccagcatgagaacagcatcctcaagggagcccagatgaaggcatccttggcatccctgccccctctgcatgttgcaaagctatcccatgagggccctggcagtgagttaccagctggagcgctgtatcgtaagaccagccagctgctggagacattgaatcaattgagcacacacacgcacgtagtagacatcactcgcaccagccctgctgccaagagcccgtcggcccaacttatggagcaagtggctcagcttaagtccctgagtgacaccgtcgagaagctcaaggatgaggtcctcaaggagacagtatctcagcgccctggagccacagtacccactgactttgccaccttcccttcatcagccttcctcagggccaaggaggagcagcaggatgacacagtctacatgggcaaagtgaccttctcatgtgcggctggttttggacagcgacaccggctggtgctgacccaggagcagctgcaccagcttcacagtcgcctcatctcctaagcactcctttcccctgctgtccccttcgaccctcagccctctggtgccgctctgcccgatgcacagccacctcagccagcccccagtgcttcctgtgtggtgttgagagtgggacttgggccattaagctcacagcaggagtggaggagaagcgatgctgaggaagctttggctgtatcaaatttgaggtctcctcttcgtagtgaccagaagaatgctgtttctaaaattcatgtgcacaggcatcccaggatttggaattcagctgtgagctcatgagctgatggatgtttccaggagtaccctgaagaccacccaggtgggagtgtaagataaccttccagataaagagttgctgctaccaaaagagtgctgacaccatcacagtatgttcccttctcaaccctggacatggttcagaaacagctaaagcagacaagaatctggggcagccaatattgtaccacctgccaaagcttggcacaaacaatctggaagccaaaaattgcacatactgtggaacagagcaagtggttctggcctccctgggatttggatcctggtttccagagctaagaacacaaagtcatgaaggtgaaggaggagaaggctggggtaggaaagctggaccacactaaccacaggaggagatttccggatcagaaagaatgccctcctatccacattgggcttccagtacccacttaccctcaaagaaaaactgaccagaagggacatctttcaggcctgcaaaaagtccactggggcctgcggccagaccagccacagcaggaactgactggcccagggagtggggcaagcagccaggacagcagcatggatcttatcagcaggactcggtccccagctgctgagcagctccaggacatcctgggggaggaagatgaggctcccaaccccaccctctttacagagatggatactctgcagcatgacggagaccagatggagtggaaggagtcagccaggtggataaagtttgaagaaaaggtagaggaaggcggcgaacgctggagcaagccccacgtgtccacactatccctgcacagcctcttcgagctccgtacctgcctgcagacggggacggtgctgctggatttggacagtggctccttaccacagatcatagatgatgtcattgagaagcagattgaggatggtctcctgcggccagagctccgggagagggtcagttacgtcctcctgaggaggcaccgccaccaaaccaagaagcccatccaccgctccttagctgacattgggaagtcagtctccaccacaaatcgcagtcctgcccggagccctggtgctggcccgagtctacaccactccacggaagacctgcggatgcggcagagtgcaaattacggacgtctgtgtcatgcccagagcagaagcatgaatgacatttctctcaccccaaacacagaccagcggaaaaacaaattcatgaagaagatccccaaggactcagaagcgtccaacgtgctcgtgggcgaggtggacttcctagaccagccattcatcgcgttcgtgcgcctcatccagtcggccatgctgggaggagtgaccgaggtgcctgtccccaccagatttctgtttatactactgggaccttctgggagagcaaaatcctacaatgaaattggccgtgccattgcaaccctcatggtagatgatctcttcagtgacgtggcctacaaagcccgcaatcgggaagatctgatcgcaggaattgatgaatttctggatgaggtcatcgtccttcctcctggagaatgggacccaaatatccggattgagccccccaagaaggtgccctctgctgacaagaggaaatctgtgttctccctagcagagctgggccagatgaatggctctgtgggaggaggcggcggagctcctggaggaggcaatggaggtggtggtggtggtggcagtggcggcggggctggcagtggcggggccggcggaacaagcagcggggatgatggagagatgccagccatgcatgaaatcggggaggaacttatctggacaggaaggttcttcggtggcctgtgtctggatatcaagaggaagttgccctggttcccaagtgacttctatgatggcttccacattcagtccatctctgccatcctattcatctacctcggctgtatcaccaacgcgatcacctttggtgggcttctgggggatgccaccgacaattatcagggagtgatggagagcttcctgggcactgccatggctggctccttgttctgcctcttctcgggacagcctctcatcattctcagcagcacggggcccatcctcatctttgagaagctcctcttcgacttcagcaaaggcaatggcctggactacatggagttccgcctctggattggcctacactcagctgtccagtgccttatcctagtggccacagatgccagctttatcatcaaatatatcacccgcttcaccgaggagggcttctccacccttatcagcttcatcttcatctacgatgccatcaagaagatgatcggtgccttcaagtactaccctatcaatatggacttcaagccaaacttcatcactacctacaagtgcgagtgtgtcgcccctgacacagtgaatacaaccgtgttcaatgcttcagccccattggcaccagacaccaacgcttctctgtacaacctccttaacctcacagcgttggactggtccctgctgagcaagaaggagtgtctgagctacggcgggcgcctgcttgggaattcctgcaagtttatcccagacctggcgctcatgtccttcatccttttctttgggacatactccatgaccctgaccctgaagaagttcaaattcagccgctattttcctaccaaggtccgggccctggtggctgacttttccattgttttctccatcctgatgttctgtggaatcgatgcctgttttggcctagaaactcccaagctgcatgtgcccagtgtcatcaagccaacgcggcctgaccgaggctggttcgtggccccctttgggaagaacccgtggtgggtatacccagcaagcatcctgcccgccctgctggtgaccatcctgatcttcatggaccagcagatcactgccgtcattgtcaaccggaaggagaacaaactgaagaaggctgccggctaccatctggacctgttctgggtgggcatcctcatggctttgtgctcctttatggggctcccctggtacgtggctgccacggtcatctccatcgcccacatcgacagcctcaagatggagacagagaccagtgcccctggggagcagccccagtttctgggagtcagggaacagagagtaaccggcatcatcgtcttcatcctgacgggaatctctgtcttcctggctcccatcctaaagtgtatccccctgccggtgctgtacggagtcttcctctacatgggcgtggcctccctgaatggcatccagatggggaccggagggtcagaattcaaaatccagaagaagctgactccattctgggaacgctgcaagctcttcctgatgccagccaagcaccagccggaccatgccttcctgcggcacgtgccgctgcgccggatccacctcttcaccctggtgcagatcctctgcctggcggtgctctggatcctcaaatccacggtggctgccatcatcttcccggtcatgtctctctccaccacagatcctgggcctcatcatcgttcgaaggcttctggatttcatcttttcccagcacgacctggcctggattgacaacatcctcccagagaaggaaaaaaaggagacagacaagaagaggaagagaaaaaaaggggcccacgaggactgtgatgaggagccccagttccctcctccctcggttataaagattcccatggaaagtgtccaatcagatccccaaaacggtatccactgcattgccagaaaaagatcttccagttggagttactcactctgattcttccttcagtgacacagaacttgaccgaaggtaagcaggcatggattagagacataagctatacgtcacttacaaaaacatctccagcaaactatctaaacttctttaaactccagagaactatcaaaagaataacgccagctggcagaagaacgaggacggaggttaatggctgctcctggctagatcacaggaccctgcatgatactggaatgctccctggtgaggtactgcagagttacaggatcgtgaactctatttattcccacatcaatgactgctgctccttccttgatcatatctgctgtgatcagatttggaatacctggaaatggagaaaggaaagatcaacttagtactgaaaacagtctacctgtcagattcttgtctaacttcaatttcaagagaccctgaagaactaatcaacatgttttattaaaacctgttaaaaatattaactaa

SEQ ID NO: 178202 - DNA, 2785 bp, Homo sapiens
  Payload ID: 14996
  Gene Symbol:
  Gene Name: RP11-290H9.2
  ENST ID: ENST00000560629
  CDS Start-End: 1-2362
gactgtgctggcgctgggggcgctggcgggcgttggcgtaggagggcccaacatctgtaccacgcgaggtgtgagctcctgccagcagtgcctggctgtgagccccatgtgtgcctggtgctctgatgaggccctgcctctgggctcacctcgctgtgacctgaaggagaatctgctgaaggataactgtgccccagaatccatcgagttcccagtgagtgaggcccgagtactagaggacaggcccctcagcgacaagggctctggagacagctcccaggtcactcaagtcagtccccagaggattgcactccggctccggccagatgattcgaagaatttctccatccaagtgcggcaggtggaggattaccctgtggacatctactacttgatggacctgtcttactccatgaaggatgatctgtggagcatccagaacctgggtaccaagctggccacccagatgcgaaagctcaccagtaacctgcggattggcttcggggcatttgtggacaagcctgtgtcaccatacatgtatatctccccaccagaggccctcgaaaacccctgctatgatatgaagaccacctgcttgcccatgtttggctacaaacacgtgctgacgctaactgaccaggtgacccgcttcaatgaggaagtgaagaagcagagtgtgtcacggaaccgagatgccccagagggtggctttgatgccatcatgcaggctacagtctgtgatgaaaagattggctggaggaatgatgcatcccacttgctggtgtttaccactgatgccaagactcatatagcattggacggaaggctggcaggcattgtccagcctaatgacgggcagtgtcatgttggtagtgacaatcattactctgcctccactaccatggattatccctctttggggctgatgactgagaagctatcccagaaaaacatcaatttgatctttgcagtgactgaaaatgtagtcaatctctatcagaactatagtgagctcatcccagggaccacagttggggttctgtccatggattccagcaatgtcctccagctcattgttgatgcttatgggaaaatccgttctaaagtagagctggaagtgcgtgacctccctgaagagttgtctctatccttcaatgccacctgcctcaacaatgaggtcatccctggcctcaagtcttgtatgggactcaagattggagacacggtgagcttcagcattgaggccaaggtgcgaggctgtccccaggagaaggagaagtcctttaccataaagcccgtgggcttcaaggacagcctgatcgtccaggtcacctttgattgtgactgtgcctgccaggcccaagctgaacctaatagccatcgctgcaacaatggcaatgggacctttgagtgtggggtatgccgttgtgggcctggctggctgggatcccagtgtgagtgctcagaggaggactatcgcccttcccagcaggacgaatgcagcccccgggagggtcagcccgtctgcagccagcggggcgagtgcctctgtggtcaatgtgtctgccacagcagtgactttggcaagatcacgggcaagtactgcgagtgtgacgacttctcctgtgtccgctacaagggggagatgtgctcaggccatggccagtgcagctgtggggactgcctgtgtgactccgactggaccggctactactgcaactgtaccacgcgtactgacacctgcatgtccagcaatgggctgctgtgcagcggccgcggcaagtgtgaatgtggcagctgtgtctgtatccagccgggctcctatggggacacctgtgagaagtgccccacctgcccagatgcctgcacctttaagaaagaatgtgtggagtgtaagaagtttgaccggggagccctacatgacgaaaatacctgcaaccgttactgccgtgacgagattgagtcagtgaaagagcttaaggacactggcaaggatgcagtgaattgtacctataagaatgaggatgactgtgtcgtcagattccagtactatgaagattctagtggaaagtccatcctgtatgtggtagaagagccagagtgtcccaagggccctgacatcctggtggtcctgctctcagtgatgggggccattctgctcattggccttgccgccctgctcatctggaaactcctcatcaccatccacgaccgaaaagaattcgctaaatttgaggaagaacgcgccagagcaaaatgggacacagaaatccttttgtactattgctcattcatacttgttcatcaaagcctggagtccttaaggacagaatttacctctaaacagaaagatggaaactaaagtacatttattctgccaggcagaggaaaatattgacttattagatgatggctctaattcttttgcaactgacttgtcatcaggaactattaaccacaagaaatacatcaagttttctaaaacaatagagaaggaaatttcaccggaaattaggagtttgagcccagaatataaaaaaatatttgaaacatcaataatcttttgtggagaagaaaagtcctctgatttttcaggagaaaaaaaagttgggagaaagagtttacaagtacaacagcacagtaaaagaactgagattatccctccttttctgaagctgtcaaaggagaaggtgacaaggaaagaaaactctttatgcaagttgccgaatcagtacagcgttcacaagacttcatcacctctttgtacatcttctgcaattactcg

SEQ ID NO: 178203 - DNA, 771 bp, Homo sapiens
  Payload ID: 14997
  Gene Symbol:
  Gene Name: RP11-293I14.2
  ENST ID: ENST00000548802
  CDS Start-End: 1-255
tttcctttggatcctaaaagaagaaaagaatgggttcgcctggttaggcgcaaaaattttgtgccaggaaaacacacttttctttgttcaaagcactttgaagcctcctgttttgacctaacaggacaaactcgacgacttaaaatggatgctgttccaaccatttttgatttttgtacccatataaagtctatggtaacttacgacctatttctccgtggcgttggctgttttctgttgttgttcctgttctgatcgtctctaatggccttaaaaagaaaagtctagatcacagtggggctctaggagggctagtcgttggatttatcctaaccattgcaaatttcagcttttttacctctttgctgatgtttttcttgtcttcttcgaaactcactaaatggaagggagaagtgaagaagcgtctagattcagaatataaggaaggtgggcaaaggaattgggttcaggtgttctgtaatggagctgtacccacagaactggccctgctgtacatgatagaaaatggccccggggaaatcccagtcgatttttccaagcagtactccgcttcctggatgtgtttgtctctcttggctgcactggcctgctctgctggagacacatgggcttcagaagttggcccagttctgagtaaaagttctccaagactgataacaacctgggagaaagttccagttggtaccaatggaggagttacagtggtgggccttgtctccagtctccttggtggtacctttgtgggcattg

SEQ ID NO: 178204 - DNA, 1084 bp, Homo sapiens; identical to SEQ ID NO: 103633
  Payload ID: 14998
  Gene Symbol:
  Gene Name: RP11-294C11.1
  ENST ID: ENST00000612201
  CDS Start-End: 99-1040

SEQ ID NO: 178205 - DNA, 353 bp, Homo sapiens
  Payload ID: 14999
  Gene Symbol:
  Gene Name: RP11-294C11.2
  ENST ID: ENST00000622410
  CDS Start-End: 1-353
atgaaacacctgtggttctttctcctcctggtggcagctcccagatgggtcctgtcccaggtgcagctgcaggagtcgggcccaggactggtgaagccttcggagaccctgtccctcacctgcgttgtctctggtggctccatcagcagtagtaactggtggagctgggtccgccagcccccagggaaggggctggagtggattggggaaatctatcatagtgggagccccaactacaacccgtccctcaagagtcgagtcaccatatcagtagacaagtccaagaaccagttctccctgaagctgagctctgtgaccgccgcggacacggccgtgtattactgtgcgagaga

SEQ ID NO: 178206 - DNA, 1125 bp, Homo sapiens
  Payload ID: 15000
  Gene Symbol:
  Gene Name: RP11-294C11.3
  ENST ID: ENST00000623441
  CDS Start-End: 92-1042
tgtggcataccttgtgtttagttcaagaactataatctagatgtaacacctgaaaataaactcttttattgatattctacaggcagaagaaatgaagatagcaaacaacacagtagtgacagaatttatcctccttggtctgactcagtctcaagatattcagctcttggtctttgtgctgatcttaattttctaccttatcatcctccctggaaattttctcattattttcaccataaggtcagaccctgggctcacagcccccctctatttatttctgggcaacttggccttcctggatgcatcctactccttcattgtggctcccaggatgttggtggacttcctctctgagaagaaggtaatctcctacagaggctgcatcactcagctctttttcttgcacttccttggaggaggggagggattactccttgttgtgatggcctttgaccgctacatcgccatctgccggcctctgcactgttcaactgtcatgaaccctagagcctgctatgcaatgatgttggctctgtggcttgggggttttgtccactccattatccaggtggtcctcatcctccgcttgcctttttgtggcccaaaccagctggacaacttcttctgtgatgtccgacaggtcatcaagctggcttgcaccgacatgtttgtggtggagcttctgatggtcttcaacagtggcctgatgacactcctgtgctttctggggcttctggcttcctatgcagtcatcctctgccatgttcgtagggcagcttctgaagggaagaacaaggccatgtccacatgcaccactcgtgtcattattatacttcttatgtttggacctgctatcttcatctacatatgccctttcagggccttaccagctgacaagatggtttctctctttcacacagtgatctttccattgatgaatcctatgatttatacccttcgcaaccaggaagtgaaaacttccatgaagaggttattgagtcgacatgtagtctgtcaagtggattttataataagaaactgagaaggaggaattctggctggaattcatatcattcatttaacaagtcctgtttttcactggtacctcccatttgccaggtacca

SEQ ID NO: 178207 - DNA, 788 bp, Homo sapiens
  Payload ID: 15000
  Gene Symbol:
  Gene Name: RP11-294C11.3
  ENST ID: ENST00000629333
  CDS Start-End: 1-634
cctccttggtctgactcagtctcaagatattcagctcttggtctttgtgctgatcttaattttctaccttatcatcctccctggaaattttctcattattttcaccataaggtcagaccctgggctcacagcccccctctatttatttctgggcaacttggccttcctggatgcatcctactccttcattgtggctcccaggatgttggtggacttcctctctgagaagaaggtcatcaagctggcttgcaccgacatgtttgtggtggagcttctgatggtcttcaacagtggcctgatgacactcctgtgctttctggggcttctggcttcctatgcagtcatcctctgccatgttcgtagggcagcttctgaagggaagaacaaggccatgtccacatgcaccactcgtgtcattattatacttcttatgtttggacctgctatcttcatctacatatgccctttcagggccttaccagctgacaagatggtttctctctttcacacagtgatctttccattgatgaatcctatgatttatacccttcgcaaccaggaagtgaaaacttccatgaagaggttattgagtcgacatgtagtctgtcaagtggattttataataagaaactgagaaggaggaattctggctggaattcatatcattcatttaacaagtcctgtttttcactggtacctcccatttgccaggtaccattgtaggcaatggaggagagttatgcataatgagagaataaacttattatatttaaagaatataaaggaaa

SEQ ID NO: 178208 - DNA, 353 bp, Homo sapiens; identical to SEQ ID NO: 142128
  Payload ID: 15001
  Gene Symbol:
  Gene Name: RP11-294C11.4
  ENST ID: ENST00000630556
  CDS Start-End: 1-353

SEQ ID NO: 178209 - DNA, 997 bp, Homo sapiens
  Payload ID: 15002
  Gene Symbol:
  Gene Name: RP11-295K3.1
  ENST ID: ENST00000427721
  CDS Start-End: 213-997
cctacgtgaagaatggtacctcgtttgacatccactatggctcgggcagcctctccgggtacctgagccaggacactgtgtcggtgccctgccagtcagcgtcgtcagcctctgccctgggcggtgtcaaagtggagaggcaggtctttggggaggccaccaagcagccaggcatcaccttcatcgcagccaagttcgatggcatcctgggcatggcctacccccgcatctccgtcaacaacgtgctgcccgtcttcgacaacctgatgcagcagaagctggtggaccagaacatcttctccttctacctgagcagggacccagatgcgcagcctgggggtgagctgatgctgggtggcacagactccaagtattacaagggttctctgtcctacctgaatgtcacccgcaaggcctactggcaggtccacctggaccaggtggaggtggccagcgggctgaccctgtgcaaggagggctgtgaggccattgtggacacaggcacttccctcatggtgggcccggtggatgaggtgcgcgagctgcagaaggccatcggggccgtgccgctgattcagggcgagtacatgatcccctgtgagaaggtgtccaccctgcccgcgatcacactgaagctgggaggcaaaggctacaagctgtccccagaggactacacgctcaaggcccagggccccggccagtgcccagccccgctgggagacccggccagcaccacggacggcgcccaggaagcccgagtccccctggacggggccttctggattccgaggcccccggcaggttcgcccaagggctgcttcgcttgcgtgtccaagccccctgccctgcaggctccggcggcccctgcccctgagccctcggcctctcccccgatggcgcccacactgttccccatggagtccaagagcagcaagaccgacagcgtgcgggctgccggcgcgccccctgcctgcaagcacctagccgagaagaagac

SEQ ID NO: 178210 - DNA, 732 bp, Homo sapiens
  Payload ID: 15003
  Gene Symbol:
  Gene Name: RP11-295P9.13
  ENST ID: ENST00000595538
  CDS Start-End: 1-104
aaactcagcggaaatatattcagggattgaagaggttaatgaccatttgccagaaacactttcctacagacccatccaaatgtgtggagtacaatgcactgtgagatctgtgtatggtgtgttaataacaataagaaacttagggaagcaggctgtggacttctggaattaccaacaggaatgaggaaagaagaaaactggagtttccagtctctgagttctacctgatagccctaatttgtttagaactgtaatatgcacagttaaaacaacttgtcctctcaggaccttttgcagttagggttggtcgtatgacatggtcctgcgaagaagatacggatagaagtctgtgggccaccagtggattgaatgatgcccgtatgcactgagaagggccatgtgtttactcggtctaccaattcaaatgttaatctcatccaaaaacaccctcacagatacctttggaatgatgtttaaccaaatatttgggtaccgtcttccccagtgaagttgacacaaaattaaccatcacagctgccttcctgtgggcctcatgttatatgagaacagtattgggtgtacacttaaagcgttctgggaatatgaatcccttctgcaccctggaatcaccagtccagccatgcatggagctggggaaagcaggccctgaattgtctagagagacttggtggaggaggccacggcccgccttgtccctgccgggtcccggcc

SEQ ID NO: 178211 - DNA, 761 bp, Homo sapiens
  Payload ID: 15003
  Gene Symbol:
  Gene Name: RP11-295P9.13
  ENST ID: ENST00000596044
  CDS Start-End: 1-57
tgccagaaacactttcctacagacccatccaaatgtgtggagtacaatgcactttagttaatgttccatataaagaaactgtcatgtgacaccagtacctcctaaaattggtcagtgtggtagatggtttagagaaaaaaggaacctgttccacagggctgtgaccattcgagggaagcacattcaaagatgtagatcccctcagagaagttttccatttccctgaagttaaagatcttcaaatgactgcaaataacatgaggatatatagaaaaatgcccttccccaatttccaaatcgtgaaaatttggctcagcagagccctaatttgtttagaactgtaatatgcacagttaaaacaacttgtcctctcaggaccttttgcagttagggttggtcgtatgacatggtcctgcgaagaagatacggatagaagtctgtgggccaccagtggattgaatgatgcccgtatgcactgagaagggccatgtgtttactcggtctaccaattcaaatgttaatctcatccaaaaacaccctcacagatacctttggaatgatgtttaaccaaatatttgggtaccgtcttccccagtgaagttgacacaaaattaaccatcacagctgccttcctgtgggcctcatgttatatgagaacagtattgggtgtacacttaaagcgttctgggaatatgaatcccttctgcaccctggaatcaccagtccagccatgcatggagctggggaaagcaggccctgaa

SEQ ID NO: 178212 - DNA, 1204 bp, Homo sapiens
  Payload ID: 15003
  Gene Symbol:
  Gene Name: RP11-295P9.13
  ENST ID: ENST00000601460
  CDS Start-End: 1-610
gaatgatttgaaagcagccttggataagattgatcagcagtacctcaatgaaatcgtcggcggtcaggagcctggagaggaagacacacagaatgatctgaaagttcatgaggaaaacaccacaattgaagagttagaggcgcttggagagtccttagggaaaggcgatgatcataaagacatggacatcatcaccaaattcctgaagtttcttcttggcgtttgggctaaagaattgaatgccagagaagattatgtgaaacgcagtgtgcagggtaaactgaacagtgcgacccagaaacagaccgagtcctacctaagaccactttttagaaagctacggaaaaggaatcttcctgctgatattaaagaatcaataacggatattattaaattcatgttgcagagagaatacgtgaaggcaaatgatgcttatcttcagatggccattggaaatgcgccttggcccatcggtgtcactatggttggtatccatgccagaactggcagagaaaagattttttccaagcatgttgcacatgttttaaatgacgaaactcagcggaaatatattcaggatctgaacgtctatgacactctttcgagctgacacagtgaagaacatagaaggagaactcacccagtctgccagggtcacagaatgatcatactcaagatcttcctggggagtcaatggcaaatttcactgggctattttacagatgaagaaggaacataaagaaggttctgggaccccgaagtccacggaacacccaccattacctgatctttggagcttgtcatttggccagtggaccctaataaacgtccacggggatgtggggatagaatgccagagcctggctcgctagggcatccaggttcttccttcctctttgccctgctgtctccaggcaccaagaatctcctacagttccccaaagatgaaccccccattatctcaggtcactctgtttcccccgatctttaccaaattcctgactcagagttcctcccatttgcttctgactctcattttattcttacctctcattttattcttatgatgtttaccatttctcttctcctcagtgtccctctctgagtggtaagagtatgttaataagccagtgctgagaccggagcacgaggcaactgctcaatgttggtcattgtcactgttattaaatgtaacttaagggaa

SEQ ID NO: 178213 - DNA, 2326 bp, Homo sapiens
  Payload ID: 15004
  Gene Symbol:
  Gene Name: RP11-296A16.1
  ENST ID: ENST00000417761
  CDS Start-End: 1-329
agatgccctcggggttgtgtgcccacctgtttggcctctctgactgtccagtgctcagtggctctggggctgtgtaccgagtatgtgcaggaaccgccaccttccacctgctgcaggctgtgttgctggtccacctccactcccccaccagcccgcgggcacagctgcataatagcatggcattacattggcatctgtggaggctttgcattcatcctactgcagttggtgcttattacagcttttgcccattcctggaacaagaactgagcaaccccgctctggcctcctacaagcttctgtcatcagctgctatatcatgtatctgactttctctgcactgtccagccgtcctccagagagagtaatccttcaaggacagaatcacaccctgtgcctgcctggcctgagtaaaatggaaccccaaacaccagatatctctctagcaatgctgagtgctagcatcatgtatgcttgtgtgctttttgcttgcaatgaggcctcctacctggctgaggtatttggacccctgtggattgtcaaggtttacagctatgagtttcagaagccctcactgtgtttctgctgccctgaaacagtggaggcagacaaagggcaaaggggtggggctgcgaggccagctgaccaagaaacccctccagctcctccagtccaagtccagcatctttcctacaactattctgccttccacttcgtcttcttccttgcctcactctatgtcatggttacccttaccaactggttcaggtacggccggtgattgctttccaaggccaccgagggtatctgagactcccaggccctggttggtcctgcctcttctccttcatagtgtcccagtgttgtcaggagggcgctggtggtagcttggaccttgtgtgccaacgcttcctcaggtctgggcctaacagcctccactgcctgggctcactcagggagcgcctcattatttgggcagccatggattctatcccagccccatcatcagttcagggacacaacctgactgaagatgccagacatcctgagagttggcagaacacaggaggctattctgaaggagatgcagtatcacagccacagatggcactagaggaggtgtcagtgtcagatccactggcaagcaaccaaggacagtcactcccaggatcctcaagggagcacatggcacagtgggaagtgagaagccagacccatgttccaaacagagaacctgttcaggcactgccttcctctgccagccggaaacgtctggacaagaaacgttcagtgcctgtagccactgtagaactggaagaaaagaggttcagaactctgcctttagtgccaagccccctacaaggcctgaccaatcaggatttacaagagggagaagattgggagcaagaagatgaggacatggaccccagattagaacacagttcctcagttcaagaagattctgaatccccaagtcctgaagatataccagactacctcctgcaatacagggccatccacagtgcagaacagcaacatgcctatgagcaggactttgagacagattatgctgaataccgcatcctgcatgcccgtgttgggactgcaagccaaaggttcatagagctgggagcagagattaaaagagttcggcgaggaactccagaatacaaggtcctggaagacaagataatccaggaatataaaaagttcaggaagtacccaagttacagagaagaaaagcgtcgctgtgagtaccttcaccagaaattgtcccacattaaaggtctcatcctggagtttgaggaaaagaacaggggcagctgaagttatcaagggaatttttgagcctctgcttagtgaaacacaaaggaacaaagcagctataaactaaatagaatgcaactatctgcttttcttatgctgaccactggagtccatggtggcaagtagagagctgctctaggttcttgaggtttggttttcattattaatttttagggtatgggcactgtgcaaagactccatagctgtgcctaggagtctaggaaaagtgacagaggcttggcttttttacctttagttcagccaagtcattttcaagtcctgagaaatgacatcatcttcaggataaaataatgaggacattagacaaaccaaactaagtgaattttagcctggtagcctctctaaggaaacagtaataataacttctgataagagttaaaagaacttgtagcatacctggatataatgggaaagggcctgggtgttacccatgtactgaaaatgaacttttaccaacatggctaaaaaattaaaactg

SEQ ID NO: 178214 - DNA, 835 bp, Homo sapiens
  Payload ID: 15005
  Gene Symbol:
  Gene Name: RP11-298I3.5
  ENST ID: ENST00000555074
  CDS Start-End: 1-580
gttaggagagaaagccagtcgcctgctggagaagttcggccgcagaaaggatgctgacagtgaaaccgtgaaggcagcaaaggtgtggaaactcgcagaggtcctggtgggtgagcagcagcagtgccaggatgccaagagccagcagaaggagcagatgttgctgctggagaagaagagtgctgcttactcccaggtgcttctccgctgcctcactttgctgcagaggcttcttcaagaacaccggctgaagactcaatccgagctagaccgcatcaatgcccagtacctggaagtcaagtgcggtgctatgatccttaagctgaggatggaggagctaaagattttgtccgacacttacactgttgagaaagtggaagttcatcgtctgattagggaccgtttggagggagccattcacctacaggagcaggacatggagaactcaagacaggtcctgaactcctatgaggtccttggggaggagtttgacaggctggtgaaagagtacaccgtactcaagcaggcaacagagaacaagcggtgggccctccaggagttcagcaaggtctaccgttgagctctggcagggccaggagacatggcttctgcatagctgctgcctcctaatcttcctgctagtgggaccaccttcacctggggctgccttcagtacaagggagtgtggaaatgcttacgcttgaaacactgcagtcatttaggcactctcctggtttctctttattttttatgactgggcctcttctggaaaatctagcaaggagatttatataatttttatgcatagctgtgtgtcagtgtcagccctgtattg

SEQ ID NO: 178215 - DNA, 11692 bp, Homo sapiens
  Payload ID: 15006
  Gene Symbol:
  Gene Name: RP11-2C24.9
  ENST ID: ENST00000380361
  CDS Start-End: 1-9162
gtgtcggacggcatgacaggcagcaatcctgtgtcccctgcctcatccagttccccagcctctagtggggcaggcggcatctccccgcagcacatagctcaagattcctcactggatggacctccaggccccccagatggtgccacagtgcccctggaggggttcagcttatcccaggctgctgacctggctaacaagggcccgaagtgggagaagagccatgccgaaattgcagaacaggccaagcatgaggccgagatcgagactcggattgctgagctgcggaaggagggtttctggtcactgaagaggctgcctaaggtgccagagccccctcgccccaaaggtcactgggactatttgtgcgaagagatgcagtggctctctgctgactttgctcaggagcgccgttggaaacggggtgtggcccggaaggtggtgcgcatggtgatccggcaccacgaggagcagcggcagaaagaggaacgggcccggagggaggagcaggccaagctgcgtcgaattgcttccaccatggccaaggatgtcaggcagttctggagcaatgtggagaaggtggtgcaattcaagcaacagtcccggcttgaggaaaagcgcaaaaaagccctggacctgcatttggacttcattgtggggcaaactgaaaagtactcggaccttctgtctcagagcctcaaccagccattaacctccagcaaagcaggctcttccccttgcctcggctcttcctcagctgcctccagtcctccaccccctgcttctcgcctggatgatgaagatggggactttcaaccccaagaggatgaggaagaggatgatgaggaaacgattgaagttgaagaacaacaggaaggcaatgatgcagaggcccagaggcgtgagattgagctgcttcgccgtgagggagaattgccactggaagagctgctccgttcccttccccctcagctgttggaagggccttccagcccctctcaaaccccctcatctcatgatagtgacacccgagatgggcctgaagaaggtgctgaagaagagccccctcaggtgttggagataaagcccccaccctctgctgtcacacagcgcaacaaacagccttggcatccagatgaagatgatgaagagtttactgccaacgaagaggaagcggaggatgaagaggatactatagcagctgaggaacagttggaaggggaggtggatcatgccatggagctgagcgagttggctcgagaaggtgagctttccatggaggagctattgcagcagtatgcaggagcctatgccccaggctctgggagcagtgaagatgaggatgaagatgaggttgatgctaatagctctgactgtgaaccagaggggcccgtggaagcggaagagcctcctcaggaggatagtagcagtcagtcagactctgtggaggaccggagtgaggatgaggaagatgaacattcagaggaggaagaaacaagtggaagttcagcatcagaggaatctgagtctgaagagtctgaggatgcccaatcacagagccaagcagatgaagaggaggaagatgatgattttggggtggagtacttgcttgccagggatgaagagcagagtgaggcagatgcaggcagtgggcctcctactccagggcccactactctaggtccaaagaaagaaattactgacattgctgcagcagctgaaagtctccagcccaagggttacacgctggccacgacccaggtaaagacgcccattcccctgcttctgcggggccagctccgggagtaccagcacattgggctagactggctggttaccatgtatgagaagaagcttaatggcattcttgctgatgagatggggcttgggaagaccatccagaccatctctctgcttgcccacttggcttgtgagaaaggtaactggggtccccatttaatcattgttcccaccagcgtgatgttgaactgggagatggagttgaaacggtggtgccccagctttaaaatcctcacttactatggagcccagaaagagaggaagctcaagcggcagggctggaccaagcccaatgcctttcatgtgtgtatcacatcttacaagctggtgctgcaggaccaccaggccttccgtcgcaagaactggcgctatctcattctggatgaggcgcagaacatcaagaacttcaagtcacagcgctggcagtcactcctcaacttcaacagccagagacgcctgctcctgacaggaactcccttgcagaacagcctcatggagctgtggtccttgatgcactttttgatgccccatgtcttccagtctcatcgcgagttcaaggagtggttctctaatcccctaactggcatgattgagggcagccaagagtataatgaaggtctagtcaaacgcctccacaaggttttgaggccttttttactgcgccgagttaaggtggatgttgagaagcagatgcccaaaaagtacgagcatgttatccgctgcaggctctccaagcgtcaacgctgtctctatgatgacttcatggcacagaccacaactaaggagacactagccacaggccatttcatgagcgtcatcaacattttgatgcagctgagaaaagtttgcaatcatccaaatctgttcgaccctcgaccggttacctcccctttcatcaccccaggcatctgcttcagcaccgcctctctggtgctaagggccacggatgtccatcccctccagcggatagacatgggtcgatttgaccttattggcctggaaggtcgtgtctctcgatatgaggcagacacatttctgccccggcaccgcctctctcgccgggtactgttagaagtggctactgctcctgaccccccaccccggcccaagccagtcaagatgaaggtcaacaggatgctgcagccagtacctaagcaagaaggccggacagtggtggtggtgaacaacccacgggcgcccctgggccctgtcccagttcgacctcctccaggtcctgagctctcagcccagcccacccctggcccagtcccccaagtgctgccagcatcactgatggtttcagcctcacctgccgggcccccgcttattcctgcatctcggcctcctggccctgtcctcttgcctccactgcagcccaacagtggttctctcccccaggcaggcgaagtggtcagcatcgggcagttagcctcactggcacaacgtccagtggctaatgcagggggaagcaaacctctcaccttccaaatccagggcaacaagctgactttgactggtgcccaggtgcgccagcttgctgtggggcagccccgcccgctgcaaatgccaccaaccatggtgaataatacaggcgtggtgaagattgtagtgagacaagcccctcgggatggactgactcctgttcctccattggccccagcaccccggcctccgagctctgggcttccagctgtgttgaatccacgccccacgttaacccctggccggctacccacacctactctgggtactgctcgagcccccatgcccacacccactctggtgaggcctcttctcaagctggtccacagtccttcacctgaagtcagtgcttcagcccccggagctgcccccttgaccatctcttctcctctccacgtgccatcctccctccctgggccagcctcttctccaatgccaattcccaactcctctccccttgctagtcctgtgtcctctacagtctcagttccattgtcatcttcactccccatctctgtccccaccacacttcctgccccagcctcggctccactcaccatccccatctcagcccccttgactgtttctgcttcgggcccagctctgttgaccagtgtgactccaccattggcacctgttgtcccagcggctcctggacctccctccttggcaccatctggtgcttccccgtcagcatcagccttgactctaggtttggccacagctccatccctgtcttcatctcagacacctggtcaccctctgttgttggctcccacctcttcacatgttccagggttgaactcaaccgtggccccagcatgctcacctgtcctggtgccagcttcggctctggccagtccttttccgtcagcaccaaatccagctccagctcaggcttcccttctggctccagcatcttctgcatctcaggctctagccacccctctggctcctatggcggctccacagacagcaattctggctccttctccagctcctcctctggctcctcttccggtcctggcaccatcgccaggtgctgctcctgtcctggcttcatcacagactccggttccagttatggctccatcgtctactccaggaacctctttagcctcagcttcaccggtaccagctccaacccctgtgttggctccatcatcaactcaaactatgctaccagccccggttccgtcacctctcccgagcccggcttctacgcagacactggccctagccccagctttagcacccactcttggaggctcatctccatctcagacactctctttgggaacggggaacccccagggaccctttccaactcagacattgtcattaactccagcatcatccctggtaccaactccagcccagacactgtctttggcaccaggaccaccactgggtccaactcagacgctgtctctggctccagcaccccctctggctccagcttctccagtgggcccagccccagctcacacgctgactttggctccagcatcgtcatctgcttcactcctggccccagcttcagtgcagacactgaccttgagccctgccccagttcctaccctgggcccggccgcagctcagaccttggcgctggccccagcctccacacagtccccagcttcccaggcatcttcccttgtggtttcggcatctggtgccgctcccttgcctgtcaccatggtatcccggctgcctgtttccaaggatgagcctgacacactgacattgcgctctggtccccccagccctccctccactgctacctcgtttggtggcccccggcctcgacgccagccccccccaccacctcgttcccctttttatctggactccctggaggaaaagcggaagcggcagcggtctgaacgcctggaacggattttccaacttagtgaggctcatggggccctggcacctgtgtatgggactgaagtcctggatttctgtaccctgccccaacctgttgccagccccatcggccctcgttctcctggccccagccaccccaccttttggacttataccgaggctgcccaccgggctgtactgtttccccagcagcgactagaccagctgtcagaaatcattgagaggttcatctttgtcatgcctcctgtggaggcacctcccccttccctgcatgcctgccacccacctccttggctggccccacgtcaggcagccttccaggagcaattggcctctgagctctggccccgggctcgtcctttgcaccgtattgtgtgtaacatgcgcacccagttccctgacttaagactcatccagtatgattgcggaaagttgcagacgttggcagtgctgttgcggcagctcaaggcagagggccaccgagtgctcatcttcacccagatgacccgaatgctggatgtattggagcagtttctcacctaccatggccatctctacctgcgcctggatggatctactagagttgaacagagacaggccttgatggaacggttcaatgcagacaaacgcatattctgcttcatcctttcaactcggagtgggggtgtgggcgtgaacctgacaggagcagacactgttgttttttatgacagcgactggaatcccaccatggatgctcaggcccaggaccgctgtcaccgaattggccagacccgggatgtccacatatataggcttatcagtgaacggacagtggaggagaacatcctaaaaaaggcaaatcagaagagaatgttgggggacatggccattgagggaggcaacttcaccacagcctatttcaaacagcagaccatccgagagctgtttgatatgcccctggaggaaccttctagctcatccgtgccctctgcccctgaagaggaggaagagactgtggccagcaagcagactcatattctggagcaggcattgtgtcgggcagaagatgaagaggatatccgtgcagccacccaggccaaggctgaacaggtggctgagcttgcagaatttaatgagaacgatgggtttcctgctggtgagggagaggaagctggccggcctggggctgaggatgaggagatgtcccgggctgagcaggaaattgctgccctcgtagaacagctgacccccattgagcgctatgccatgaaattcctggaggcctcactggaggaggtgagccgagaggagctcaaacaggcagaagagcaagtggaagctgcccgcaaagacctggaccaagccaaggaggaggtgttccgcctaccccaagaggaggaggaggggccgggggctggggatgagagttcctgtgggactggtggaggcacccaccggcgcagtaaaaaggccaaagcccctgagaggccggggactcgtgtcagtgagcgtcttcgtggagcccgggctgagactcaaggggcaaaccacactcctgtcatatccgcccatcaaactcgcagcaccaccacaccaccccgctgcagtcctgccagggagcgagttcccaggccagcacctaggcctcgacccactccagcttcagctccggctgcaattcctgcccttgttcctgtcccagtttctgccccagtacccatttcagccccaaatccaataaccattctccctgtccatatcttgccttctcctccccctccttcacagattcctccttgttcttctcctgcctgcacccctcctcctgcctgtacccctccaccagctcatacaccgcctccagcccaaacctgtcttgtaactccttcctctcctctcttgcttggtccaccttctgtgcccatctctgcctcagtcactaatctccccttgggcttgaggcctgaggcagagctgtgtgcccaggcattggcatctccagagtccctggagctggcttctgtggccagttcagaaacctcctcactttctcttgtgccccctaaagatctgttgccagttgctgtggagatcctgcctgtgtcagagaagaacctttctctcaccccttctgcacccagcctgaccttggaggctggcagcatccccaatggtcaagagcaggaggcaccagattctgctgaggggaccacccttacagtgctgcctgaaggtgaggagttgcccctgtgtgtgagtgagagcaatggcctggagctcccaccctcagcagcatctgatgagccacttcaggagccactggaggctgacaggacctcggaagagctgacagaggccaagaccccaacctccagcccagagaagccacaggaactcgttacagctgaggttgcagctccatccacctcatcttcagccacttcctcgcctgagggtccttcacctgcccgacctcctcggcgtcgcaccagtgctgatgtggaaattaggggtcaagggactggtcggccaggacaaccaccaggccccaaagtgcttcgaaagctgccaggacggctggtaactgtggtagaggaaaaggaactggtgcggcggcggcggcagcagcggggagctgccagcaccctagtgcctggggtctctgagactagtgccagcccgggaagcccgtctgtccgcagcatgtcagggccagaatcctcccctcccattggtgggccctgtgaagctgctccttcatcctcactgcccactccaccccagcagcccttcattgctcgccgtcacattgagctgggggtgactggtggtggcagccccgagaatggagacggagcactgctcgccatcaccccacctgctgtgaaacgtcggagggggaggccccccaagaagaacaggtctccagcagatgctgggagaggtgtggatgaggcaccctcatccaccttgaagggaaaaaccaatggggctgacccagtccctgggcctgagaccctaattgttgcagatcctgtcctggaaccacagcttattcctgggccccagcctcttggaccccagccagttcacagacccaatcccctcctgtcacctgtggagaaaagaaggcgaggacgaccccctaaagcacgagatttgcccatccctgggaccatttcctctgcaggggatggcaactccgaaagtcggacacagccacccccacacccatcacccctaaccccactcccaccactgctagtttgtcccactgctactgttgccaacactgtcaccactgtcaccatttcaacgtccccacccaaacggaagaggggccgacctcccaagaatcctccatcacctcggcccagccagctccccgtcttggaccgtgacagcacttctgttctcgagagctgtggattggggaggcgacggcaaccccagggccaaggggagagtgagggtagttcctctgatgaggatggaagccgccccctcacccgcctggcccgccttcggcttgaagcagaaggaatgcgaggacggaagagtggagggtccatggtggtggctgtaattcaggatgacctggacttagcagatagcgggccaggcgggttggaattgacaccacctgtggtctcactaaccccaaaactgcgctcgacccggctgcgtccagggtctctagtccccccactagagactgagaagttgcctcgcaaacgagcaggggccccagttggtgggagtcctgggctggcaaagcggggccgcctacagcccccaagtcccctggggcctgagggttcagtagaggagtctgaggctgaagcctcaggtgaggaggaggaaggggatgggaccccacgccgacgtcctggcccccgccggcttgttgggaccaccaaccaaggggaccagcgcatcctgcgcagcagcgcccctccctccctggctggccctgctgttagtcacagaggccgcaaggccaagacgtgagtgggctgcccctccacctaggctttccaccgtggccactccctccatgaccaggcctgactctgttaaccactacttgaagtcttgagggggaaagcctccagggagacataggggccttctcccttcttcccaccaaagtagggggtaggcaactggttgtcatggaaatggggatcatcacagtccccttccccttcaccccacgtggctgggcagtgttaagggtggcaagatagtctctgtccccacccccttgtacttgattccccagctgtctttcacacagccccccacccttaggggaagggggaggggcttctctacaatgaggtttttttcttttttttttttttttaagaagaaaaaataataaacttagtttctgtatgagcatccgcgtaaggaggcttctgattttctggtctggtggagggttgggtgggaacttgggcatcgtttttctcctccctcttgttcttgcaaagatcctagcacctgatctctagcccaggactatatgttccaggcagaaatctacccaagaagagggaagattggtgaatttgatgtggtagggtgcctttccccagtcagtttgaagtcacagatatccttttcctctcatttcttttccctcggttcctagacgttcctcggagctctttgatgcctcagacctttcccttttatccctcttgctcaggtgcttcctttcacaactttttccagagggcaggcgtcctagctccagttgctccatcccttgggccctcccctgctcttcatctagccaaactggtttgagtcagccacaccccttcccagctccctgggctcttcacgtggtggctggccactcaaccccacccctgggcttggcttggagccctgagtcagctccatcaccacccaagccaaaccaaagctgaggcaggagccgaaactcagagtccttcaaggcctatagccaggtgatggaggacgaggagaaggcagtggagatcttgggcaacacggaagctgctcatcctccatcccccatccgctgctgctggctccgcctccgctgcttggcagctactagcattatctgtggctgctcttgcctgggagtcatggctctggtgtttgccatcaaggcggaagagcggcataaagcaggccggtccgaggaggcagtgcgctggggggcccgggcccggaaactcatcctggccagctttgctgtctggcttgctgtcctcattctgggtcccctgctgctgtggttgctctcctacgccatcgctcaggctgagtgaccctggatggcctctgctgagagccagccgagacctcctggatcctgcaatgcggcattgctaaggtcctgtgacagcagtggttggaaggatcctggttggaaggatggggactctctcaaggggctttggaagagctcttctagccctttataaaaggagggcagcagctgagactgatgagaggagggcagcctgctctgttctttcagggccccccacccccatctcccctaccctagcccaccctagggcctctacccagcgggaggggttgaagaccaggcctggttttattagaattcattttgtaataaaagccttttttagtggtgaaatactcctgtctaattgttctcctcctgctttcccttgggcccttggtgagagccagactggacatctgactgatagcagaagccagcatccacctcatccaggagctccaagagaaggaaacaatttttattttcttcttctggaagtttcccttcttggaaagaccccagcttctcccttgtacgtccacagagactctgaggccaagagtagtagcagctgctactatttattacttactatattccaggctgtgttctaagcactttatatttcttaacttcctccagttttcagtcactcagtagatgtctgtactatcatatccatcatatgaatatatcacatatgataggtaccaactatctgagtgaaaactggaagaaatgttctaaaatgacagtgttctcgttttatacttgaagaaacaaacagatttgcacaaggtcctcagctactaaatggtagagctgagactgaacccagacagtttggttccagagctgagagaggagtgaaagagttgggtaacagcaacaaccatcctgtacatggagatttgagtgattaaaatggattttcatatcttttatcttggacctcataatatttcaaattttttttaaaattatgaagtatatcatacatataggaaaatacccaaaacaagtatacagttcattaacacaaagcaaacgtgaataaccacattcagtaaagaaattggaacactgtcaacacttcaaagcctcctttatactcctcccaatcactgctacttcctttcttcccacaggtaaccaccattctgacttctagcagtgtcatttaattttgtctgcatttgaactttatataaatggaatcatgtattcttttcatgttaa

SEQ ID NO: 178216 - DNA, 939 bp, Homo sapiens
  Payload ID: 15007
  Gene Symbol:
  Gene Name: RP11-302B13.5
  ENST ID: ENST00000398092
  CDS Start-End: 150-782
cggaacctgcggggcagaggcggcggccgcagcggcgcagctgatagcaggaacaggatcaagtcttccataccagggaccaggccaaaaccagactgccactgcccctacttgggccccactgtccccagaaagcagctgctgtgatcatgggcaatatctttggaaaccttctcaagagcctgattgggaagaaggagatgcgcatcctgatggtgggcctggatgccgcaggaaagaccaccatcctatacaagctgaaactcggggagatcgtcaccaccatccctaccattgggttcaatgtggagacagtggagtataagaacatcagctttacagtgtgggatgtgggtggccaggacaagattcgacccctctggagacactacttccagaacacccaagggttgatatttgtggtcgacagcaatgatcgggagcgagtaaatgaggcccgggaagagctgatgagaatgctggcggaggacgagctccgggatgctgtactccttgtctttgcaaacaaacaggatgggcacgatctcggctcactgcaacctccgcctcccgggttcaagcaattctcctgtctcagcctcccctcagtgcacttttataaaccgtcctcagaacccttgggaagcccaagatcgtcaaaaagagaaccaagaagtttatccggcaccagtctgaccgatatgtcaaaattaagcgtaaccggcggaaacccagaggtattgacaacagggttcgtggaaggttcaagggttagatcttgatgcccaacattgattatgggagcaacaagaaaacaaagcacatgctgcccagtggcttccggaaattcctggtccacacgtcaaggagctggaagtgctgctgttgtgcaacaaatcttactgtgctgagatcgctcacaatgtttcctccaagaac

SEQ ID NO: 178217 - DNA, 654 bp, Homo sapiens
  Payload ID: 15008
  Gene Symbol:
  Gene Name: RP11-302M6.4
  ENST ID: ENST00000370453
  CDS Start-End: 188-346
aagcccgcgaagagaagtaggaggaaggcgccgccgtggccgcggccgcagtgctcgggcgcgacaagccatgagcagcgaccccgcgggcgacgccgccgtccctggcagccgctgagcccgacccccaggcagctcgccgctccctagcaccttctccagtcgacactctcgcgcccggagaaacatgattcccgtgacagaattccggcagttctctgagcagcagcctgccttccgagtgctgaagccatggtgggatgtgtttaccgattacctctcagtagccatgctcatgatcggcgtgtttggatgtactttacaggaagtgcacggctgtctataacgtgctgccgggtctcaggatggaggagtgaagtctcctgtcgccgtggttccagcctccggagctcgcccaagccgcgtccccagagagcgccctgagagaacagggtggccgcttggtccaggaatgtttacccttgcggaagttgcatcacttaatgacattcagccaacttaccgaatcctgaaaccatggtgggatgtgtttatggattacctagctgttgttatgttaatggtagccatctttgcaggaaccatgcaacttaccaaagatcaggtggtctgtttgccagtattgccatctcc

SEQ ID NO: 178218 - DNA, 4157 bp, Homo sapiens
  Payload ID: 15009
  Gene Symbol:
  Gene Name: RP11-307N16.6
  ENST ID: ENST00000382141
  CDS Start-End: 579-3896
gctgggcggggagccagagactgattcgctgcggtcctgggcccagcggctgggaggtcccgccctggccgaggaaatgaagagggcgcagggcatgggggcggcgcgcacccgggacagtttccagtcggcttctccgtgaccttcctcccccttccagctcggagcgggatgctgggatccctccaaggaccctctgaggacgtaggagggatgctgagacagggccagcttcaaaccttgtcaagctctgacaagggaagatgaagcctagttccagctaggggtgacctgtctatctgcattttttgagctgcagagtgatgggagtcatattcgctgcctgtgcagcaccacaggcctgatgaaaatgaaatggcaacaccgtgcagatggcaaagcgtaggcctcacaaacatcctggccgtgaagagcttgtcttcaagagtagctggtgcagaaactcgcccgtggccacccaggagcccgatgtgcaaggcaggtgtgagtgccaggacggcattcctggagatgaaggcctggagctgcggtctgcggactcggcagtgcccgtggccatgacccaggctgccgtgcggccctgggcaccctgcctggagaacatgaccactgccccaaacggcctcgggccaggccccgcagccccctgtgcaggctcggacctgaaagacgccaagatggtgacctcccttgcgtgtggaaatggagtctgtggctgcagccctggtggcgacacggacacccaggaagccaaactcagcccagccaagcttgtgcgcctcttttccaccagtcggaagaggacgggtgcccaccccgagcggccccactccatggtcctggtggggaactcctccacatggaacaccctcgcctccttccggaaaatgggatcctttaagaaactgaagtcctcagtcctgaaaggaattcagagccgagaggggtcaaatgcctgttcaaagggagaggcttcggagcatggcctgggaaagtccatcccaaatggcgctgtcccaggagcccaggcaagcaggggctcccccttagcaccgggaccagcatgtggtgccctcaggccagcagagtggggcacattggatggctccgacctcgaggacacggacgatgccttccagcggagcacacaccgctcccgcagcctccgcagagcctacggcctgggccgcatctgcctgctggatgcgccccagaaccatgcgacacccacgatagccactggccaggtgcccgccgtgtgtgagattctcgtgagggaccctgaaaacaacagcatgggctacaggaggagcaagagcacggacaatcttgcctttctgaagaagagctcctttaagcggaagtccacctccaatcttgcagacctcaggacggcccatgacgcacgggtaccacagaggaccctgagcagttcctccactgactcccaaaagcttgggtcaggaaggaccaaacgctggaggagcccgataagggccaaggactttgacagagtcttcaaacttgtgagcaatgtgactgaggctgcctggaggagggagagtcctaggagtggggccccatcccctggagaggccagcctgagacttcaggcacacagccggctgcatgacgactactcccgccgcgtctccaggagcactgagcaggacagcaggcggggcggggcggtcatgcatgggaccactgcaacctgcaccgtggcccccggtttcggctcagccacctctaaggggccccacctagacgctgacactgccgtatttcctcttgaaaccaaaagttcctgggcggtggaaagcgacagttcctgcacttgcagctctttgccaagcccgattgtccaggatgtgttgagcaaagactcctgtgacccaaacgctggcagccagttgacatttgaccctgagcagcctcccacccctctaaggcccaccacacccaagccccagagccctcagagcccccagagccccggggcaggaagtgccagctgtcacagcaatcacagtgccctgtccgcgaattcagaggaaagtgaaggaagggcagaagagcctgctcagagagagccagggcctgtgtccttgcaggatcccctggaagccacacatggtgatgagggcagcaaggaccttctggtgaacattggtgtggcagccggcccagaagaaaaggagaaggaggagccggcttccaggccgcccatgcctgctcaccaggtgccaccctacaaggctgtgtcggcccggttccggcccttcacattctcccagagcacccccattgggttggaccgtgtgggacgccggcggcagatgagagcatccaacgtttcttcagatggaggtactgagccctctgccttagtggatgacaacggtagtgaggaggacttcagctatgaagacctctgccaggccagccctcggtacctgcagcccggcggggagcagctggccatcaatgagctgatcagtgatggcaacgtggtctgcgcagaagccctgtgggaccatgtgaccatggatgaccaggaactgggcttcaaagccggggatgtcatccaggttctggaagcctccaacaaggactggtggtggggccgcagtgaagataaggaagcctggttccccgcgagcttcgtcagattgcgagtgaatcaggaagagctgtcggaaaactccagcagcacccccagtgaggagcaggacgaggaggccagccagagccgccacagacactgtgagaacaagcagcagatgcggaccaacgtcatccgggagatcatggacaccgagcgggtgtacatcaaacacctcagggacatctgtgagggctatatccgacagtgccgcaagcacacaggaatgttcaccgttgcgcagctagccactatttttggaaacattgaagatatttacaaattccaaagaaagtttctgaaagaccttgagaaacagtacaacaaagaggaacctcacttaagtgaaataggatcttgctttcttcaaaatcaagagggctttgccatctattccgagtactgcaacaaccacccgggcgcctgcctggagctcgccaacctcatgaagcagggcaagtacagacatttctttgaagcctgccgcctgctgcagcagatgattgacatcgccatcgacgggttcctgctcacaccagtgcagaagatctgcaaatacccgctgcagctggccgagctgctcaagtataccacacaggaacacggtgattacagcaacataaaggcagcatatgaggccatgaagaatgtggcctgtctgatcaacgagcgcaagcgcaagctggagagcatcgacaagatagctcgctggcaggtgtctatcgtgggctgggagggactggatatcttagaccgaagctcagaattgattcattctggggagctgaccaaaatcactaagcaaggcaaaagccagcagcggacgttcttcctgtttgaccaccagctggtgtcctgcaagaaggacctgctgcgcagggacatgctgtactacaagggccggctggacatggatgagatggagcttgtggacctgggggatgggcgcgacaaggactgcaacctcagcgtgaaaaatgccttcaagctcgtcagtaggaccacagacgaggtttatttgttttgtgccaaaaaacaagaagacaaggcgaggtggctgcaggcctgtgcagatgaaaggaggcgggtgcaagaggacaaggagatgggaatggaaatttcagaaaaccagaagaaacttgccatgttaaatgctcaaaaggcaggacatggaaagtcaaaagttcagagtctgtcatctgaaccatgaggatctggtggcttctgcttgccattgaaatctgcacagggaacataaactcacaggacacctgcaggcaagggcaccctggaatccctgggaaccccggtcacaatggtctgcctggaagagatggacgagacggagcgaagggtgacaaaggcgatgcaggagaaccaggacgtcctggcagcccggggaaggatgggacgagtggagagaagggagaacgaggagcagatggaaaagttgaagcaaaaggcatcaaag

SEQ ID NO: 178219 - DNA, 1974 bp, Homo sapiens
  Payload ID: 15010
  Gene Symbol:
  Gene Name: RP1-130H16.18
  ENST ID: ENST00000330168
  CDS Start-End: 1-732
gagctggacatgtcccctggggaccccaagtggctggacgtgattgagcgtgacctgcaccggcagttcccattccatgagatgtttgtgtcccgggggggccacggccagcaggacctattccgtgtgctgaaggcctacacgctgtaccggcccgaggagggctactgccaggcccaggcgcccattgccgctgtcttgctcatgcatatgcctgctgagcaagccttctggtgcctggtacagatctgtgagaagtacctgcccggctactacagcgagaaactggaggcgatccagctggacggggagatccttttctcgctgttgcagaaggtgtcgccggtggcccacaagcacctcagccgtcagaagatcgacccgctcctctatatgacagaatggttcatgtgcgccttctcccgaaccttgccctggagctctgtgctgcgtgtctgggacatgttcttctgtgaaggggtcaagatcatcttccgggtggggctggtgctgctgaagcacgcgctgggctcccctgagaaggtcaaagcctgccagggccagtacgagaccatcgagcgactgcggagcctcagccccaagatcatgcaggaggcctttctggtccaggaggtggtggagttgcccgtgacagagcgccagattgagcgcgaacacctcattcagctgcggcgctggcaggagacccggggtgcaagttcttcagcctgacggagacccctgaggattacacgcttatggtggacgaggagggctttaaagagctgcccccatctgagttcctgcaagtagctgaggccacatggctggtgctgaacgtgtcgtctcacagcggtgcggcagtgcaggctgctggggtcaccaagatcgcccgttcggtcatcgcgccactggccgagcaccacgtgtctgtgctgatgctgtccacttaccagacggacttcatcctggtgcgggagcaggacctgtccgtggtgatccacacgctggcccaggagttcgacatttaccgcgaggtgggcggagagcctgtgcctgtgacgagggatgattccagcaatggctttccccgcactcagcatgcagggcccagccccacggtgcatcccatccagagcccacagaaccgcttctgtgtcctcacactggaccctgagacgcttccagccatcgccaccaccctcatagatgtcctcttctactcgcacagcacccccaaggaggcagcctctagcagtcctgaacccagctccatcacgttctttgccttctccctcatcgagggttatatctccattgtcatggatgctgaaacacagaaaaagttccccagtgacctcctgctgaccagctcctcgggggagctgtggaggatggtgcgcatcggtggacagcccctgggctttgatgaatgtggcatcgtggcacagattgcaggtcccctggctgccgctgacatctctgcctactacatcagcaccttcaacttcgaccacgccctggtgcccgaggacggtatcggcagcgtcatcgaggtcctccagcggcggcaggaaggcctggcttcctgaggcccatgggcaacagagcagcctccctgctctcccctcgacccaggcttccaaagacttctctaagctatttccttaagctctggaacgagccccctgttctgctggggaccctcgttccgctctctgtatgtaagctgcgtgcaggcaccggcttttacgcggacacctgtgtacactcacaggtggagtgggcaggtgctagcctgactgcgtgtctgcccatgcaggggaacacggtgctcggggcttaagcccccaacccatcactccctgcgcagcctcggcgtttgcacagtccctgcctgaggcctgagccattccccaaaggcttcctgggccagctgccccgctgacctccgttctgcctctggtggggttg

SEQ ID NO: 178220 - DNA, 1781 bp, Homo sapiens
  Payload ID: 15010
  Gene Symbol:
  Gene Name: RP1-130H16.18
  ENST ID: ENST00000418047
  CDS Start-End: 1-702
ggcaaggtgaagttacagcagaaccctggaaagtttgacgagctggacatgtcccctggggaccccaagtggctggacgtgattgagcgtgacctgcaccggcagttcccattccatgagatgtttgtgtcccgggggggccacggccagcaggacctattccgtgtgctgaaggcctacacgctgtaccggcccgaggagggctactgccaggcccaggcgcccattgccgctgtcttgctcatgcatatgcctgctgagcaagccttctggtgcctggtacagatctgtgagaagtacctgcccggctactacagcgagaaactggaggcgatccagctggacggggagatccttttctcgctgttgcagaaggtgtcgccggtggcccacaagcacctcagccgtcagaagatcgacccgctcctctatatgacagaatggttcatgtgcgccttctcccgaaccttgccctggagctctgtgctgcgtgtctgggacatgttcttctgtgaaggggtcaagatcatcttccgggtggggctggtgctgctgaagcacgcgctgggctcccctgagaaggtcaaagcctgccagggccagtacgagaccatcgagcgactgcggagcctcagccccaagatcatgcaggaggcctttctggtccaggagagctgcccccatctgagttcctgcaagtagctgaggccacatggctggtgctgaacgtgtcgtctcacagcggtgcggcagtgcaggctgctggggtcaccaagatcgcccgttcggtcatcgcgccactggccgagcaccacgtgtctgtgctgatgctgtccacttaccagacggacttcatcctggtgcgggagcaggacctgtccgtggtgatccacacgctggcccaggagttcgacatttaccgcgaggtgggcggagagcctgtgcctgtgacgagggatgattccagcaatggctttccccgcactcagcatgggcccagccccacggtgcatcccatccagagcccacagaaccgcttctgtgtcctcacactggaccctgagacgcttccagccatcgccaccaccctcatagatgtcctcttctactcgcacaggggtggatgggggtgccctgcccatcacccatctccctccccaggttccccagtgacctcctgctgaccagctcctcgggggagctgtggaggatggtgcgcatcggtggacagcccctgggctttgatgaatgtggcatcgtggcacagattgcaggtcccctggctgccgctgacatctctgcctactacatcagcaccttcaacttcgaccacgccctggtgcccgaggacggtatcggcagcgtcatcgaggtcctccagcggcggcaggaaggcctggcttcctgaggcccatgggcaacagagcagcctccctgctctcccctcgacccaggcttccaaagacttctctaagctatttccttaagctctggaacgagccccctgttctgctggggaccctcgttccgctctctgtatgtaagctgcgtgcaggcaccggcttttacgcggacacctgtgtacactcacaggtggagtgggcaggtgctagcctgactgcgtgtctgcccatgcaggggaacacggtgctcggggcttaagcccccaacccatcactccctgcgcagcctcggcgtttgcacagtccctgcctgaggcctgagccattccccaaaggcttcctgggccagctgccccgctgacctccgttctgcctctg

SEQ ID NO: 178221 - DNA, 1818 bp, Homo sapiens
  Payload ID: 15010
  Gene Symbol:
  Gene Name: RP1-130H16.18
  ENST ID: ENST00000434291
  CDS Start-End: 1-1443
ggcaaggtgaagttacagcagaaccctggaaagtttgacgagctggacatgtcccctggggaccccaagtggctggacgtgattgagcgtgacctgcaccggcagttcccattccatgagatgtttgtgtcccgggggggccacggccagcaggacctattccgtgtgctgaaggcctacacgctgtaccggcccgaggagggctactgccaggcccaggcgcccattgccgctgtcttgctcatgcatatgcctgctgagcaagccttctggtgcctggtacagatctgtgagaagtacctgcccggctactacagcgagaaactggaggcgatccagctggacggggagatccttttctcgctgttgcagaaggtgtcgccggtggcccacaagcacctcagccgtcagaagatcgacccgctcctctatatgacagaatggttcatgtgcgccttctcccgaaccttgccctggagctctgtgctgcgtgtctgggacatgttcttctgtgaaggggtcaagatcatcttccgggtggggctggtgctgctgaagcacgcgctgggctcccctgagaaggtcaaagcctgccagggccagtacgagaccatcgagcgactgcggagcctcagccccaagatcatgcaggaggcctttctggtccaggaggtggtggagttgcccgtgacagagcgccagattgagcgcgaacacctcattcagctgcggcgctggcaggagacccgggagctgcccccatctgagttcctgcaagtagctgaggccacatggctggtgctgaacgtgtcgtctcacagcggtgcggcagtgcaggctgctggggtcaccaagatcgcccgttcggtcatcgcgccactggccgagcaccacgtgtctgtgctgatgctgtccacttaccagacggacttcatcctggtgcgggagcaggacctgtccgtggtgatccacacgctggcccaggagttcgacatttaccgcgaggtgggcggagagcctgtgcctgtgacgagggatgattccagcaatggctttccccgcactcagcatgggcccagccccacggtgcatcccatccagagcccacagaaccgcttctgtgtcctcacactggaccctgagacgcttccagccatcgccaccaccctcatagatgtcctcttctactcgcacaggttccccagtgacctcctgctgaccagctcctcgggggagctgtggaggatggtgcgcatcggtggacagcccctgggctttgatgaatgtggcatcgtggcacagattgcaggtcccctggctgccgctgacatctctgcctactacatcagcaccttcaacttcgaccacgccctggtgcccgaggacggtatcggcagcgtcatcgaggtcctccagcggcggcaggaaggcctggcttcctgaggcccatgggcaacagagcagcctccctgctctcccctcgacccaggcttccaaagacttctctaagctatttccttaagctctggaacgagccccctgttctgctggggaccctcgttccgctctctgtatgtaagctgcgtgcaggcaccggcttttacgcggacacctgtgtacactcacaggtggagtgggcaggtgctagcctgactgcgtgtctgcccatgcaggggaacacggtgctcggggcttaagcccccaacccatcactccctgcgcagcctcggcgtttgcacagtccctgcctgaggcctgagccattccccaaaggcttcctgggccagctgccccgctgacctccgttctgcctctggt

SEQ ID NO: 178222 - DNA, 1851 bp, Homo sapiens
  Payload ID: 15010
  Gene Symbol:
  Gene Name: RP1-130H16.18
  ENST ID: ENST00000447976
  CDS Start-End: 1-702
ggcaaggtgaagttacagcagaaccctggaaagtttgacgagctggacatgtcccctggggaccccaagtggctggacgtgattgagcgtgacctgcaccggcagttcccattccatgagatgtttgtgtcccgggggggccacggccagcaggacctattccgtgtgctgaaggcctacacgctgtaccggcccgaggagggctactgccaggcccaggcgcccattgccgctgtcttgctcatgcatatgcctgctgagcaagccttctggtgcctggtacagatctgtgagaagtacctgcccggctactacagcgagaaactggaggcgatccagctggacggggagatccttttctcgctgttgcagaaggtgtcgccggtggcccacaagcacctcagccgtcagaagatcgacccgctcctctatatgacagaatggttcatgtgcgccttctcccgaaccttgccctggagctctgtgctgcgtgtctgggacatgttcttctgtgaaggggtcaagatcatcttccgggtggggctggtgctgctgaagcacgcgctgggctcccctgagaaggtcaaagcctgccagggccagtacgagaccatcgagcgactgcggagcctcagccccaagatcatgcaggaggcctttctggtccaggagagctgcccccatctgagttcctgcaagtagctgaggccacatggctggtgctgaacgtgtcgtctcacagcggtgcggcagtgcaggctgctggggtcaccaagatcgcccgttcggtcatcgcgccactggccgagcaccacgtgtctgtgctgatgctgtccacttaccagacggacttcatcctggtgcgggagcaggacctgtccgtggtgatccacacgctggcccaggagttcgacatttaccgcgaggtgggcggagagcctgtgcctgtgacgagggatgattccagcaatggctttccccgcactcagcatgggcccagccccacggtgcatcccatccagagcccacagaaccgcttctgtgtcctcacactggaccctgagacgcttccagccatcgccaccaccctcatagatgtcctcttctactcgcacagcacccccaaggaggcagcctctagcagtcctgaacccagctccatcacgttctttgccttctccctcatcgagggttatatctccattgtcatggatgctgaaacacagaaaaagttccccagtgacctcctgctgaccagctcctcgggggagctgtggaggatggtgcgcatcggtggacagcccctgggctttgatgaatgtggcatcgtggcacagattgcaggtcccctggctgccgctgacatctctgcctactacatcagcaccttcaacttcgaccacgccctggtgcccgaggacggtatcggcagcgtcatcgaggtcctccagcggcggcaggaaggcctggcttcctgaggcccatgggcaacagagcagcctccctgctctcccctcgacccaggcttccaaagacttctctaagctatttccttaagctctggaacgagccccctgttctgctggggaccctcgttccgctctctgtatgtaagctgcgtgcaggcaccggcttttacgcggacacctgtgtacactcacaggtggagtgggcaggtgctagcctgactgcgtgtctgcccatgcaggggaacacggtgctcggggcttaagcccccaacccatcactccctgcgcagcctcggcgtttgcacagtccctgcctgaggcctgagccattccccaaaggcttcctgggccagctgccccgctgacctccgttctgcctctg

SEQ ID NO: 178223 - DNA, 1811 bp, Homo sapiens
  Payload ID: 15010
  Gene Symbol:
  Gene Name: RP1-130H16.18
  ENST ID: ENST00000434987
  CDS Start-End: 1-699
gtgaagttacagcagaaccctggaaagtttgacgagctggacatgtcccctggggaccccaagtggctggacgtgattgagcgtgacctgcaccggcagttcccattccatgagatgtttgtgtcccgggggggccacggccagcaggacctattccgtgtgctgaaggcctacacgctgtaccggcccgaggagggctactgccaggcccaggcgcccattgccgctgtcttgctcatgcatatgcctgctgagcaagccttctggtgcctggtacagatctgtgagaagtacctgcccggctactacagcgagaaactggaggcgatccagctggacggggagatccttttctcgctgttgcagaaggtgtcgccggtggcccacaagcacctcagccgtcagaagatcgacccgctcctctatatgacagaatggttcatgtgcgccttctcccgaaccttgccctggagctctgtgctgcgtgtctgggacatgttcttctgtgaaggggtcaagatcatcttccgggtggggctggtgctgctgaagcacgcgctgggctcccctgagaaggtcaaagcctgccagggccagtacgagaccatcgagcgactgcggagcctcagccccaagatcatgcaggaggcctttctggtccaggaggtgcaagttcttcagcctgacggagacccctgaggattacacgcttatggtggacgaggagggctttaaagagctgcccccatctgagttcctgcaagtagctgaggccacatggctggtgctgaacgtgtcgtctcacagcggtgcggcagtgcaggctgctggggtcaccaagatcgcccgttcggtcatcgcgccactggccgagcaccacgtgtctgtgctgatgctgtccacttaccagacggacttcatcctggtgcgggagcaggacctgtccgtggtgatccacacgctggcccaggagttcgacatttaccgcgaggtgggcggagagcctgtgcctgtgacgagggatgattccagcaatggctttccccgcactcagcatgggcccagccccacggtgcatcccatccagagcccacagaaccgcttctgtgtcctcacactggaccctgagacgcttccagccatcgccaccaccctcatagatgtcctcttctactcgcacaggttccccagtgacctcctgctgaccagctcctcgggggagctgtggaggatggtgcgcatcggtggacagcccctgggctttgatgaatgtggcatcgtggcacagattgcaggtcccctggctgccgctgacatctctgcctactacatcagcaccttcaacttcgaccacgccctggtgcccgaggacggtatcggcagcgtcatcgaggtcctccagcggcggcaggaaggcctggcttcctgaggcccatgggcaacagagcagcctccctgctctcccctcgacccaggcttccaaagacttctctaagctatttccttaagctctggaacgagccccctgttctgctggggaccctcgttccgctctctgtatgtaagctgcgtgcaggcaccggcttttacgcggacacctgtgtacactcacaggtggagtgggcaggtgctagcctgactgcgtgtctgcccatgcaggggaacacggtgctcggggcttaagcccccaacccatcactccctgcgcagcctcggcgtttgcacagtccctgcctgaggcctgagccattccccaaaggcttcctgggccagctgccccgctgacctccgttctgcctctggtggggttg

SEQ ID NO: 178224 - DNA, 2103 bp, Homo sapiens
  Payload ID: 15011
  Gene Symbol:
  Gene Name: RP11-310N16.1
  ENST ID: ENST00000602369
  CDS Start-End: 54-680
actcagaggccgtccaagacactggcaagccgcagaagcccagttcgccggccatgaagcagcggttctcggcgctgcagctgctgaagctgctgctgctgctgcagccgccgctgccacgagcgctgcgcgaggcgctctgccctgagccctgcaactgcgtgcccgacggcgccctgcgctgccccggccccacggccggtctcactcgactatcacttgcctacctccctgtcaaagtgatcccatctcaagctttcagaggacttaatgaggtcataaaaatactgatccagaacaccaaaaatctgagatacattgagcccggagcatttataaatcttccccgattaaaatacttgagcatctgtaacacaggcatcagaaagtttccagatgttacgaaggtcttctcctctgaatcaaatttcattctggaaatttgtgataacttacacataaccaccataccaggaaatgcttttcaagggatgaataatgaatctgtaacactcaaactatatggaaatggatttgaagaagtacaaagtcatgcattcaatgggacgacactgacttcactggagctaaaggaaaacgtacatctggagaagatgcacaatggagccttccgtggggccacagggccgaaaaccttgccctgccgagctatggcctagagtccattcagaggctaattgccacgtcatcctattctctaaaaaaattgccatcaagagaaacatttgtcaatctcctggaggccacgttgacttaccccagccactgctgtgcttttagaaacttgccaacaaaagaacagaatttttcacattccatttctgaaaacttttccaaacaatgtgaaagcacagtaaggaaagtgaataacaaaacacttagagacagggttccaccgtgttagccaggatgatgtagatctgctgacctcgtgatccgcccgcctcggcctcccaaagtgctgagattacaggccttgaaaatattcaggatatccagttactggccactatctgtcccctgataccaagaagttggacacagaactataccttctctgatacagtagttgcttgaagagaccatggattcaattgtggaacactagtttgtattactgaaggctggccaagctgttgaaatacttgctgaattggatgctgaagaatacctgctcttccagaagtctctgtcaccataattggtacattgactttataaaggtgaccttaaaaaggagaaagcaaaattgaaacaaacttcaaaaagaagcctacaagaagtacatcaaagattacataaaatcaatcaaaggccaacatgaagaacagagacctaaacagtaaaaccttttatgacagaagctgtagaacaaaccaagcacatcttactaatttcaacaactaccagttttttaccagtaaaaacatgaatccagatggcatagttgctctaccatgaggatggtgtgaccctgtatatgattttctttaaagatggtttagaaatggaaaaatgttaaccaattggcaattactttggctctatcacctgtcatcacaactgcttgctgcctatcacccacatgacacaatgacttaagataaattggactgatgtcaacttgagctcttcatttatttcgaccattatatctttggagtggaagcattgtttttaagaaaaacaggtcggctggcgtggtggctcacgcctgtaatcccagcactttgggaggccaaggctggtggatcacaaggttgggagttggagactaacctggccaatatggtgaaacaccatctctactaaaaataaaaaaattagctgggcatggtggtgcatgcctgtaatcccagctactcaggaggctgaggcaggagaatcgcttgaaccagggagtcggaggttgcagtgaaccgagatcacgccactgcactccagcctagtgacagagtaagactctgtcaaaaaaaaaaaacaaaaaacttgtcaagtaggttgtctaaaaataaaatgcacttaaactcatttgaaagaatcctttttagtttaatatatgtttatgctaaatccatccta

SEQ ID NO: 178225 - DNA, 573 bp, Homo sapiens
  Payload ID: 15012
  Gene Symbol:
  Gene Name: RP11-314N13.10
  ENST ID: ENST00000617804
  CDS Start-End: 99-449
gcgccgaggtactaggcagagccgtggaaccgccgccaggtcgctgttggtccacgccgcccgtcgcgccgcccgcccgctcagcgtccgccgccgccatgggagtgcaggtggaaaccatctccccaggagacgggcgcaccttccccaagcgcggccagacctgcgtggtgcactacaccggctgtgggcagttctggccaagttgctcacgaataagctccacctttctcttccaaatcatggaaacatggagggatccctctattgagggaaatgactttcactggaaagaggaaaagggtgttctgagaatcagccatgtcatccctgtacccatctctagaggacctaaaagtggaccaagccattcaggcccaggtcagagcctcacccaagatgccagccctgccagtccaggcaacagccatttccccaccaccaggtgagtgggctgggatgaggggctcctgggtgccaagtcctttcagggaagagatcatcagggaagcttggcaatgccaaagttttgtacccaaacttggcagaactggaaaattatatgggtctttc

SEQ ID NO: 178226 - DNA, 718 bp, Homo sapiens
  Payload ID: 15013
  Gene Symbol:
  Gene Name: RP11-315D16.2
  ENST ID: ENST00000562767
  CDS Start-End: 135-413
cgagggccgcgcgctctcgccggcccgccccgaaccgccccgcgctgggaatttgcggcggcctccgccggggcagccgagctgaaccggtctcttcctcggaaaggcagggccgaggggcctgcggggcagccatggaggcgacgcggaggcggcagcacctgggagcgacgggcggcccaggcgcgcagctgggcgcctccttcctgcaggccagacggaaatggagagctggatttctccacttttctgaccattatgcacatgcaaataaaacaagaagacccaaagaaagaaattcttctagccatgttgatggtggacaaggagaagaaaggttacgtcatggcgtccgacctgcggtcaaaactcacgagtctgggggagaagctcacccacaaggaagtggatgatctcttcagggaagcagatatcgaacccaatggcaaagtgaagtatgatgaatttatccacaagatcacccttcctggacgggactattgaaggaggagaatgggagagcctcccctgggcctgaaaacttggagcaattaattttttttaaaaagtgttcttttcacttgggagagatggcaaacacagtggcaagacaacattacccaactatagaagagaggctaactagcaacaataatagatgatttcagccatggtatgagtagatctttaataaaagatttgtattgattttattaac

SEQ ID NO: 178227 - DNA, 479 bp, Homo sapiens
  Payload ID: 15014
  Gene Symbol:
  Gene Name: RP11-318A15.7
  ENST ID: ENST00000587459
  CDS Start-End: 1-303
attggagctggagtgagccttccaggaattttggctgccaaatgtggtgcagaagtaatactgtcagacagctcagaactgcctcactgtctggaagtctgtcggcaaagctgccaaatgaataacctgccacatctgcaggtggtaggactaacatggggtcatatatcttgggatcttctggctctaccaccacaagatattatccttgcatctgatgtgttctttgaaccagaaggattgtcagtggcttcgccccgaggagagctgactgccctgggctgctgcctccggcagagctgagccaaaatgtccccggaatctaaaaagcttttcaacatcattattttaggagttgcctttatgtttatgttcactgcctttcaaacttgtggaaatgtggcggtgagttggaatctgtcctccctcctttgaagtgcccatcataatgcagtccagaaatgaaaataaacgttcat

SEQ ID NO: 178228 - DNA, 835 bp, Homo sapiens
  Payload ID: 15015
  Gene Symbol:
  Gene Name: RP11-321N4.5
  ENST ID: ENST00000503906
  CDS Start-End: 1-293
attattatgattattatggttatgattaccataactatcgtggtggatatgaagatccatactatggttatgaagattttcaagttggagctagaggaaggggtggtagaggagcaaggggtgctgctccatccagaggtcgtggggctgctcctccccgcggtagagccggttattcacagagaggaggtcctggatcagcaagaggcgttcgaggtgcgagaggaggtgcccaacaacaaagaggccgcgggggaaaaggggtcgaggccggtcctgacctgttacaatgaagactgacttgctatgtgggattacaccagaagcttgcagtggagtaatggtatattcatattttaatgatcttctggtcatttgttgctggagttgtcacattctactgctcactaggacctgattctctcttaccaaatatattcttcacaataaaatacaaacccaagcagttaggacttcaggaattatttcctcaaggtcatagctgtgctgtttgtggtaaagtgaaatgtaaacgacataggccttctttgctacttgaaaactaccagccatggctagacctgaaaatttcttccaaggttgatgcatctctctcagaggttcttgaattagtgttggaaaactttgtttatccgtggtacagggatgtgacagatgatgaatcctttgttgatgaactgagaataacattacgtttttttgcatctgtcttaataagaaggattcacaaggtggatattccatctattataaccaagaaactattaaaagcagcaatgaagcatatagaagtgatagttaaagccagacagaa

SEQ ID NO: 178229 - DNA, 455 bp, Homo sapiens
  Payload ID: 15016
  Gene Symbol:
  Gene Name: RP11-322E11.6
  ENST ID: ENST00000589258
  CDS Start-End: 67-438
ggaaaggaagttccaaggcccgcgctgggaaaaaggtggggggaccaggggaagactcggagtgcgatggcggcgcaaattccaattgtggccaccacttccactcccggaatagtccggaacagcaagaagaggccggccagcccttcccacaatggcagcagcggcgggggctatggcgccagtaagaagaaaaaagcgtccgcttccagctttgcgcaggtgcctggacttggagaaccaggaggtgaggggactgactacttgaagatcacatggaggaggagtctgatccaggcccaggcaccaaggaaaggccatgcaaggacacagggagaagggcagctgtctgtaagccagaaagagccttcactagaaaccaaatcagccagaaccttcatcttggactttccagccttcagagatgtgaaaaaataaatttctgttgattaacc

SEQ ID NO: 178230 - DNA, 395 bp, Homo sapiens
  Payload ID: 15017
  Gene Symbol:
  Gene Name: RP11-322N21.2
  ENST ID: ENST00000506599
  CDS Start-End: 8-295
tgtgcccatggggccatctcggcttgtccgtggccctcggccccagggcatgcgttccccctaccgcaggccaggtatgggctggcccaggccccgatttcccaggatgttcaagtgtagccgcagaagatatcaacagggtctccgaggtcgaactgccagcagtgcagccatcaatcctgccaccagggccatgggtatcaacaacacccacactgacaccaccatagtgtggatcttcccacctcaagttctcagacatctcaggcaacctgggatttttctgatcctctagaagtgcccagaagctagcccagaagcttggtttgccctggacctgcatctcctaggggccgtgtgggtggtgaacaacaaatacagtcattctgctcaaa

SEQ ID NO: 178231 - DNA, 3695 bp, Homo sapiens
  Payload ID: 15018
  Gene Symbol:
  Gene Name: RP11-330H6.5
  ENST ID: ENST00000494383
  CDS Start-End: 1-3559
ctgtgcggcacctgccccgctgacctcggctgagagagagctccagcagatccgcattaacgaggtgaagacagagatcagtgtggaaagcaagcaccagaccctgcagggcctcgccttccccctgcagcctgaggcccagcgggcactccagcagctcaagcagaaaatggtcaactacatccagatgaagctggacctagagcgggaaaccattgagctggtgcacacagagcccacggatgtggcccagctgccctcccgggtgccccgagatgctgcccgctaccacttcttcctctacaagcacacccatgagggcgacccccttgagtctgtagtgttcatctactccatgccggggtacaagtgcagcatcaaggagcgaatgctctactccagctgcaagagccgcctcctcgactccgtggagcaggacttccatctggagatcgccaagaaaggtttctgccgcagcgccctgcacccgctgtctctcctggtgcaggccatcatgctggccatgaccctggccctgggtaccttgcctgccttcctaccctgtgagctccagccccacggcctggtgaactgcaactggctgttcctgaagtctgtgccccacttctccatggcagcaccccgtggcaatgtcaccagcctttccttgtcctccaaccgcatccaccacctccatgattctgactttgcccacctgcccagcctgcggcatctcaacctcaagtggaactgcccgccggttggcctcagccccatgcacttcccctgccacatgaccatcgagcccagcaccttcttggctgtgcccaccctggaagagctaaacctgagctacaacaacatcatgactgtgcctgcgctgcccaaatccctcatatccctgtccctcagccataccaacatcctgatgctagactctgccagcctcgccggcctgcatgccctgcgcttcctattcatggacggcaactgttattacaagaacccctgcaggcaggcactggaggtggccccgggtgccctccttggcctgggcaacctcacccacctgtcactcaagtacaacaacctcactgtggtgccccgcaacctgccttccagcctggagtatctgctgttgtcctacaaccgcatcgtcaaactggcgcctgaggacctggccaatctgaccgccctgcgtgtgctcgatgtgggcggaaattgccgccgctgcgaccacgctcccaacccctgcatggagtgccctcgtcacttcccccagctacatcccgataccttcagccacctgagccgtcttgaaggcctggtgttgaaggacagttctctctcctggctgaatgccagttggttccgtgggctgggaaacctccgagtgctggacctgagtgagaacttcctctacaaatgcatcactaaaaccaaggccttccagggcctaacacagctgcgcaagcttaacctgtccttcaattaccaaaagagggtgtcctttgcccacctgtctctggccccttccttcgggagcctggtcgccctgaaggagctggacatgcacggcatcttcttccgctcactcgatgagaccacgctccggccactggcccgcctgcccatgctccagactctgcgtctgcagatgaacttcatcaaccaggcccagctcggcatcttcagggccttccctggcctgcgctacgtggacctgtcggacaaccgcatcagcggagcttcggagctgacagccaccatgggggaggcagatggaggggagaaggtctggctgcagcctggggaccttgctccggccccagtggacactcccagctctgaagacttcaggcccaactgcagcaccctcaacttcaccttggatctgtcacggaacaacctggtgaccgtgcagccggagatgtttgcccagctctcgcacctgcagtgcctgcgcctgagccacaactgcatctcgcaggcagtcaatggctcccagttcctgccgctgaccggtctgcaggtgctagacctgtcccacaataagctggacctctaccacgagcactcattcacggagctaccgcgactggaggccctggacctcagctacaacagccagccctttggcatgcagggcgtgggccacaacttcagcttcgtggctcacctgcgcaccctgcgccacctcagcctggcccacaacaacatccacagccaagtgtcccagcagctctgcagtacgtcgctgcgggccctggacttcagcggcaatgcactgggccatatgtgggccgagggagacctctatctgcacttcttccaaggcctgagcggtttgatctggctggacttgtcccagaaccgcctgcacaccctcctgccccaaaccctgcgcaacctccccaagagcctacaggtgctgcgtctccgtgacaattacctggccttctttaagtggtggagcctccacttcctgcccaaactggaagtcctcgacctggcaggaaaccagctgaaggccctgaccaatggcagcctgcctgctggcacccggctccggaggctggatgtcagctgcaacagcatcagcttcgtggcccccggcttcttttccaaggccaaggagctgcgagagctcaaccttagcgccaacgccctcaagacagtggaccactcctggtttgggcccctggcgagtgccctgcaaatactagatgtaagcgccaaccctctgcactgcgcctgtggggcggcctttatggacttcctgctggaggtgcaggctgccgtgcccggtctgcccagccgggtgaagtgtggcagtccgggccagctccagggcctcagcatctttgcacaggacctgcgcctctgcctggatgaggccctctcctgggactgtttcgccctctcgctgctggctgtggctctgggcctgggtgtgcccatgctgcatcacctctgtggctgggacctctggtactgcttccacctgtgcctggcctggcttccctggcgggggcggcaaagtgggcgagatgaggatgccctgccctacgatgccttcgtggtcttcgacaaaacgcagagcgcagtggcagactgggtgtacaacgagcttcgggggcagctggaggagtgccgtgggcgctgggcactccgcctgtgcctggaggaacgcgactggctgcctggcaaaaccctctttgagaacctgtgggcctcggtctatggcagccgcaagacgctgtttgtgctggcccacacggaccgggtcagtggtctcttgcgcgccagcttcctgctggcccagcagcgcctgctggaggaccgcaaggacgtcgtggtgctggtgatcctgagccctgacggccgccgctcccgctacgtgcggctgcgccagcgcctctgccgccagagtgtcctcctctggccccaccagcccagtggtcagcgcagcttctgggcccagctgggcatggccctgaccagggacaaccaccacttctataaccggaacttctgccagggacccacggccgaatagccgtgagccggaatcctgcacggtgccacctccacactcacctcacctctgcctgcctggtctgaccctcccctgctcgcctccctcaccccacacctgacacagagcaggcactcaataaatgctaccgaaggct

SEQ ID NO: 178232 - DNA, 570 bp, Homo sapiens
  Payload ID: 15018
  Gene Symbol:
  Gene Name: RP11-330H6.5
  ENST ID: ENST00000478201
  CDS Start-End: 1-167
actccatgccggggtacaagtgcagcatcaaggagcgaatgctctactccagctgcaagagccgcctcctcgactccgtggagcaggacttccatctggagatcgccaagaaaccgctgctgcccctgtgggaagggacctcgagtgtgaagcatccttccctgtagctgctgtccagtctgcccgccagaccctctggagaagcccctgccccccagcatggccatcatgctggccatgaccctggccctgggtaccttgcctgccttcctaccctgtgagctccagccccacggcctggtgaactgcaactggctgttcctgaagtctgtgccccacttctccatggcagcaccccgtggcaatgtcaccagcctttccttgtcctccaaccgcatccaccacctccatgattctgactttgcccacctgcccagcctgcggcatctcaacctcaagtggaactgcccgccggttggcctcagccccatgcacttcccctgccacatgaccatcgagcccagcaccttcttggctgtgcccaccctggaagagctaaacctgagctac

SEQ ID NO: 178233 - DNA, 2745 bp, Homo sapiens
  Payload ID: 15019
  Gene Symbol:
  Gene Name: RP11-33O4.2
  ENST ID: ENST00000318673
  CDS Start-End: 4-315
agcatgagccgatcacccctcaatcccagccaactccgatcagtgggctcccaggatgccctggcccccttgcctccacctgctccccagaatccctccacccactcttgggaccctttgtgtggatctctgccttggggcctcagctgtcttctggctctgcagcatgtcttggtcatggcttctctgctctgtgtctcccacctgctcctgctttgcagtctctccccaggaggactctcttactccccttctcagctcctggcctccagcttcttttcatgtggctgcctcttgtccaggctccatccttagagttccttatccctgctctggtgctgaccagccagaagctaccccgggccatccagacacctggaaactcctccctcatgctgcacctttgtaggggacctagctgccatggcctggggcactggaacacttctctccaggaggtgggtatctggaggtgtccggggcagtggtagtatctgggctgctgcagggcatgatggggctgctggggagtcccggccacgtgttcccccactgtgggcccctggtgctggctcccagcctggttgtggcagggctctctgcccacagggaggtagcccagttctgcttcacacactgggggttggccttgctgtacgtgagtcctgagaggcgtgggatggtgcccagtgggggtgtatggggggactaggggagggcagaactgctggtcctatcagattcagcagcgactggaatagggacatattttatatttggaatccaagacttttccttgattcatctggtctccttgaatttcacactgttttctgctgtcccccaaggtcacttcctattccttccatgggagtttccttctctgggttatcctgctcatggtggtctgttctcagcacctgggctcctgccagtttcatgtgtgcccctggaggcgagcttcaacgtcatcaactcacactcctctccctgtcttccggctcctttcggtgctgatcccagtggcctgtgtgtggattgtttctgcctttgtgggattcagtgttatcccccaggaactgtctgcccccaccaaggcaccatggatttggctgcctcacccagcttctacctggctgacatagactctgggcgaaatatcttcattgtgggcttctccatcttcatggccttgctgctgccaagatggtttcgggaagccccagtcctgttcagcacaggctggagccccttggatgtattactgcactcactgctgacacagcccatcttcctggctggactctcaggcttcctactagagaacacgattcctggcacacagcttgagcgaggcctaggtcaagggctaccatctcctttcactgcccaagaggctcgaatgcctcagaagcccagggagaaggctgctcaagtatggaagaactggagcaaggcctgttgatgcagccatgggcgtggctacagcttgcagagaactccctcttggccaaggtttttatcaccaagcagggctatgccttgttggtttcagatcttcaacaggtgtggcatgaacaggtggacactagtgtggtcagccagcgagccaaggagctgaacaagcggctcactgctcctcctgcagctttcctctgtcatttggataatctccttcgcccattgttgaaggacgctgctcaccctagcgaagctaccttctcctgtgattgtgtggcagatgcactgattctacgggtgcgaagtgagctctctggcctccccttctattggaatttccactgcatgctagctagtccttccctggtctcccaacatttgattcgtcctctgatgggcatgagtctggcattacagtgccaagtgagggagctagcaacgttacttcatatgaaagacctagagatccaagactaccaggagagtggggctacgctgattcgagatcgattgaagacagaaccatttgaagaaaattccttcttggaacaatttatgatagagaaactgccagaggcatgcagcattggtgatggaaagccctttgtcatgaatctgcaggatctgtatatggcagtcaccacacaagaggtccaagtgggacagaagcatcaaggcgctggagatcctcatacctcaaacagtgcttccctgcaaggaatcgatagccaatgtgtaaaccagccagaacaactggtctcctcagccccaaccctctcagcacctgagaaagagtccacgggtacttcaggccctctgcagagacctcagctgtcaaaggtcaagaggaagaagccaaggggtctcttcagttaatctgttgtggcctcagctgctgaggatggacttggagaacagcttccaagcttcaccttgaaagaagcttacatggcagcaatatttctaaaatagtgatacagtcagaggcctcctgtaagggcgagagaactgaagttgatgttgacaggcccacagggaattggccttccctgttcaagtggaagccagtctctgagaatcccgtgctctcctctcttttggtggaggttctgtaggttcaggtttctaccatggactttaggtatatagggcaagtcagcaagaaagcaccacacactcaggaagccttgtctacctttccctagcgtctctagccagccagccccagatactcctcagagacccacttctctcttttgcatggaataaaaagcactcacagtc

SEQ ID NO: 178234 - DNA, 1284 bp, Homo sapiens
  Payload ID: 15020
  Gene Symbol:
  Gene Name: RP11-343C2.11
  ENST ID: ENST00000570054
  CDS Start-End: 1-1284
ttgtaccgctacccctttgaaaggctgaagatgtctgctgatgatggcatccgaaatctatacttggattttggtggtcccgagggagaactgaaagccattgatctggtgacgaaagccacagaggaggacaaagccaagaactacgaggaggcgctgcggctgtaccagcatgcggtggagtacttcctccacgctatcaagtatgaggcccacagcgacaaggccaaggagagcattcgagccaagtgcgtgcagtacctagaccgggccgagaagctgaaggattatttacgaagcaaagagaaacacggcaagaagccagtcaaagagaaccagagtgagggcaagggcagtgacagtgacagtgaaggggataatccggagaaaaagaaactgcaagaacagctgatgggtgccgtcgtgatggagaagcccaacatacggtggaacgacgtggccgggctggagggggccaaggaggccctcaaagaagctgtcattttgccaatcaaattcccacacttgttcacaggcaagcgcaccccctggcgggggattctgctgttcggaccccctggcacagggaaatcctacctggccaaagccgtggcaacagaggccaacaactccaccttcttctctgtgtcctcctcagatctgatgtccaagtggctgggggagagtgaaaagctggtcaagaacctgtttgagctggccaggcagcacaagccctccatcatcttcatcgatgaggtggattccctctgcgggtcccgaaatgaaaatgagagtgaggccgcccggaggatcaaaacggagttcttggtccagatgcagggggtggggaataacaatgatgggactctggttcttggagccacaaacatcccatgggtgttggattcggccatcaggaggaggtttgaaaaacgaatttatatccccttgccggaggaagctgcccgcgcccagatgttccggttgcatctcgggagcactccccacaacctcacggatgcaaacatccacgagctggcccggaagacggaaggctactcgggcgcggacatcagcatcatcgtgcgggactctctcatgcagcccgtgaggaaggtgcagtcggccacacacttcaaaaaggtctgtggcccctctcgcaccaaccccagcatgatgattgatgacctcctgactccatgctcaccaggggacccaggagccatggagatgacttggatggatgtccctggggacaaactcttagagcctgtggtttgcatg

SEQ ID NO: 178235 - DNA, 887 bp, Homo sapiens
  Payload ID: 15021
  Gene Symbol:
  Gene Name: RP11-343C2.12
  ENST ID: ENST00000562949
  CDS Start-End: 1-495
tccttcagccgggtgggagctgatttccggggtcagttggctcctgttttccagcgggtggccatcagcactttccagaaagcaattcaggaaacagtggagaaattccaggaagaaatgaactcctacatgctcatctcggctccagccatcctgggcaccagtaacatgcctgctgctgtgccagccacccagccggggacgctgcagccacccatggtgctcctagatttcccacccctcgcctgctttctcaacaatattctggttgccttcaatgatctgcgcctctgctgccctgtggccctggcgcaggatgtgactggggccttggaagatgcccttgccaagggctggaccccaatggagaacaggtggtgtggcaggcgagcgggtgggcagcccgcatcatccagcacgagatggaccacctgcagggctgcctgtttattgacaaaatggacagcaggacgttcacaaacgtctattggatgaaggtgaatgactaaagctttgctactggggctgaggattccggataccaagacgcaaacactttcactttgagctgggcaaatcttacttggcatcaacttggatggctcgcatatgacaggaaactggattgccaaggcatggcagactgagctggaggaagatgtcagaaatgtttgccctgaaatcagttacggacaaaatgttggctacaacttgaggagaaaaatcacccccaaaggagtggacatttcctaacaattctgtatggaggaaggtggggtaattgcattcgtctgcagtagacacgagttcctcggacctgtataatctcccaaagccaaggtttggtaataatgtagtccccaaatacctgaaagctgtctttaaaa

SEQ ID NO: 178236 - DNA, 722 bp, Homo sapiens
  Payload ID: 15022
  Gene Symbol:
  Gene Name: RP11-343C2.7
  ENST ID: ENST00000564737
  CDS Start-End: 1-517
tgggctggtcgttctgaatctagtgacgtctgccaggagccagaagacagaacctctaagtggctctggggaccagccactcttccgtggagctgatcgatatgactttgccatcatgatacctccaggaggcacggaatgcttttggcaatttgcccaccagactggatacttctatttcagttacgaggttcagcggacagtggggatgtcacatgaccggcatgttgctgccacggcacataacccacagggatttctcatagacacctcccagggtgttcggggccagattaacttctctacccaagagacaggtttttatcagctttgtctaagtaatcagcataatcacttcggttctgtgcaagtgtacctcaactttggggtcttctatgaggggcctgagactgatcacaaacagaaggaaagaaaacaactgaatgatactctggatgcaattgaggaactttgtgaaggaagccgaggagatcagctccaaccgccggatgaatagcctgaccctaaaccggcacacagaaattttggaaatactggagattcctcagctcatggacacctgtgtccggaacagttattatgaagaggccctggagcttgcagcctacgtacgccgactggagaggaaatactcttccatccctgtcatccagggcatcgtgaacgaagtgcgccagtccatgcagctgatgctgagccag

SEQ ID NO: 178237 - DNA, 597 bp, Homo sapiens
  Payload ID: 15022
  Gene Symbol:
  Gene Name: RP11-343C2.7
  ENST ID: ENST00000570293
  CDS Start-End: 1-327
gggctggtcgttctgaatctagtgacgtctgccaggagccagaagacagaacctctaagtggctctggggaccagccactcttccgtggagctgatcgatatgactttgccatcatgatacctccaggaggcacggaatgcttttggcaatttgcccaccagactggatacttctatttcagttacgaggttcagcggacagtggggatgtcacatgaccggcatgttgctgccacggcacataacccacagggatttctcatagacacctcccagggtgttcggggccagattaacttctctacccaagagacaggaactttgtgaaggaagccgaggagatcagctccaaccgccggatgaatagcctgaccctaaaccggcacacagaaattttggaaatactggagattcctcagctcatggacacctgtgtccggaacagttattatgaagaggccctggagcttgcagcctacgtacgccgactggagaggaaatactcttccatccctgtcatccagggcatcgtgaacgaagtgcgccagtccatgcagctgatgctgagccagctgatccagcaactgaggaccaaca

SEQ ID NO: 178238 - DNA, 564 bp, Homo sapiens
  Payload ID: 15023
  Gene Symbol:
  Gene Name: RP11-343C2.9
  ENST ID: ENST00000563634
  CDS Start-End: 97-564
aaatttaaatccctggtaatctgtagaaccttctcctaggaaatggtgaagtctattaggagccacttgtgactccatgacctgttaaaaccagcaatgaactttgtgaaggaagccgaggagatcagctccaaccgccggatgaatagcctgaccctaaaccggcacacagaaattttggaaatactggagattcctcagctcatggacacctgtgtccggaacagttattatgaagaggccctggagcttgcagcctacgtacgccgactggagaggaaatactcttccatccctgtcatccagggcatcgtgaacgaagtgcgccagtccatgcagctgatgctgagccagctgatccagcaactgaggaccaacatccagcttcctgcctgcctccgtgtcattggctacctgcggcgcatggacgtcttcactgaggctgagttgagggtgaagtttcttcaggcccgagatgcttggctccggtccatcctgactgccattcctaatgatgatccctatttccatattacaaaaaccatcgaggcctcccgtgtccat

SEQ ID NO: 178239 - DNA, 397 bp, Homo sapiens
  Payload ID: 15024
  Gene Symbol:
  Gene Name: RP11-345J4.3
  ENST ID: ENST00000549858
  CDS Start-End: 1-397
ccctcctatcccaccggagaacggggtcctcactcccagcttcagccgagccctggccccgcaactgcctgaaggcacgccccctgcacctgcccacctcaggtcccgcctccagcccagtggccaagatcgcgggtctctacaatgacttggagccaccccggaagaccatgcgcagaggggtgctgatgaccctgctgcagcagtcggccatgaccctgcccctgtggattgggaagcctggtgacaagcccccacccctctgtggggccatccctgcctcaggagactacgtggccagacctggagacaaggtggctgcccgggtgaaggccgtggatggggatgagcagtggatcctggccgaggtggtcagttacagccatgccaccaacaa

SEQ ID NO: 178240 - DNA, 523 bp, Homo sapiens
  Payload ID: 15024
  Gene Symbol:
  Gene Name: RP11-345J4.3
  ENST ID: ENST00000551411
  CDS Start-End: 1-432
cggccgcggcggatgggaagccgtgcacgacgagcacaatctccatggggaggacaacaggaatgttcctgtgagccccgccgcgccctaccgccagcgcagcccagcatcgcgggtcccctcctatcccaccggagaacggggtcctcactcccagcttcagccgagccctggccccgcaactgcctgaaggcacgccccctgcacctgcccacctcaggtcccgcctccagcccagtggccaagatcgcgggtctctacaatgacttggagccaccccggaagaccatgcgcagaggggtgctgatgaccctgctgcagcagtcggccatgaccctgcccctgtggattgggaagcctggtgacaagagactacgtggccagacctggagacaaggtggctgcccgggtgaaggccgtggatggggatgagcagtggatcctggccgaggtggtcagttacagccatgccaccaacaagtgagtgacaccagccccggggctgctctctgcccttcctgtc

SEQ ID NO: 178241 - DNA, 1693 bp, Homo sapiens
  Payload ID: 15024
  Gene Symbol:
  Gene Name: RP11-345J4.3
  ENST ID: ENST00000549950
  CDS Start-End: 120-1439
tgaatctctgcagggcaagccctttactcactcacagtagaggccaggaccatcgtctgttattttattaactgtttcttggccattggctctatgtgggactttgttctacagcagtgatgagagctgcccccaggcagtttagtacacagagacagggtcttgctgtttcccccaggctggagtgcaatggagtgatcatagctcacttcagcctccaactcctgggctcaagcgatcctcccacctcagcctcccccgtagctgggactacaggcatatgccaccatgcccggcttctcagagctgcaattttaaattgggagccagggaagacctccctgtggaggtggcaggttatcaagactgaagatgtagagaagaaccttccagtcaaagggaaaaggcaggtcctgctgtgctcaggaatggccagaagtactatcatccatccccatcttagagatgtggacagggccgcaacagtgtcagggcgtttcctggctcctcaacagcaggatccgaagtcgtctggaggatgtgccgctctgcttggggcggacctcccctggagcgcacctcccctggagcgcgcggacgcgcagggtgcacacagccctcttggaccccgggaccggctcaggctcaggctcggcgtcagcaaagggacctgcgcggcgccctggggcggaggaggcccgacggtcagtggccagtgccgtgcggctgacggaggtcggggcgcaacgggaccgggaggagcgcccagggcgggggtgccaggccccctccaaccgcggcggggttggagtcaaggcggctccgggcgggggtcggaccccaaatccaggccacaggccgccgcccggtcttcttctttacccgaagggcggccgcggcggatgggaagccgtgcacgacgagcacaatctccatggggaggacaacaggaatgttcctgtgagccccgccgcgccctaccgccagcgcagcccagcatcgcgggtcccctcctatcccaccggagaacggggtcctcactcccagcttcagccgagccctggccccgcaactgcctgaaggcacgccccctgcacctgcccacctcaggtcccgcctccagcccagtggccaagatcgcgggtctctacaatgacttggagccaccccggaagaccatgcgcagaggggtgctgatgaccctgctgcagcagtcggccatgaccctgcccctgtggattgggaagcctggtgacaagcccccacccctctgtggggccatccctgcctcaggagactacgtggccagacctggagacaagccccaggaggactattctatcctgtttgaagacacctcctatgcagacggctactcccctcatctcagtgtggcccagaggtacctggtagcttctaaggagcccaagaaaaagtgacgctgcccggcggactcgacgtcctccaccatcttggggcaggacagcagaggatgtgctgggattaaacagacatcccccctccacacatctcctgggttttacttctccaaacccttctcccctccccagatatggtgacctggggagctgaaggctgggggagaggtgaccatatgtggccccaccgggcattcactctttcagctcagagtttctcttcctttccaatacaggctctacatgaacacaaa

SEQ ID NO: 178242 - DNA, 3103 bp, Homo sapiens
  Payload ID: 15025
  Gene Symbol:
  Gene Name: RP11-345J4.5
  ENST ID: ENST00000565417
  CDS Start-End: 1-268
ttttccagcggaagtggctcctgtaaggcagcaaggtagcgtggccggcgcccgagctggggttgtgtccctgctgggctgccgttccagctggactgccgccatggaactcagcgccgaatacctccgcgagaagctgcagcgggacctggaggcggagcatgtggaggtggaggacacgaccctcaaccgttgctcctgtagcttccgagtcctggtggtgtcggccaagttcgaggggaaaccgctgcttcagagacacaggtaaggccctgggagcaccttgcctagctcctgtaccacaaccccagccactccccctacccctgcaacctgactcccgcactccccctggcgtggctcagggaccttgaggatcccgccttcgtgacccctgcttcgagtatttcgatgtagaccctctctccaagtacgtgttcccacggcctggggactacaaccttggggacaccagtctcttgggtcaccctagcctcggggtgtgcgatcaccgctggccttttcctaaccccatctctcgccccaggctggtgaacgcgtgcctagcagaagagctcccgcacatccatgcctttgaacagaaaaccctgaccccagaccagtgggcacgtgagcgacagaaatgagggactgggatctgcacagccattaaattataaatctggaccagcttctgtgtcgatgtgtgtgtgggaggggtgctgaggccgagtctaggacctggcctctccctgccctgcctccgtccattgttttaccttggacacgtctctgtccccatctaggcctctatccctgcttgtaaaatgaaagttctaccgtaaaagtcccttccagggtctaccgagaaagccttctctctgcaactccgtttagacatctaggagtctgtactgccaccacctacccacctcctagagagctcagggttcctcctctctgctagccttcaagatgcagagatgagaaagtgatcggggtttcagggccctgaccagttgaacaaacctctccctgacattaccgcagtatcagaggcaccatatagaattccacatattccttgcaggttccccccggccttctcaggcccaagagggagtggtgcccaggtaggggctcatcaactcctggaatgctgatgttttcagacccactggagaaggttccagtggccccatagccctgggcttaatgtgtctacagctgcccccggaggaccatggaggttttaagaatagtgggtgtgggacggggataggggtgagattagagtaggaatataaggctgacctgagtcagaaaattggggcaggtgatgcccctgtatcagtcttcataacaggttagtagggttgctaggaccttgtttgttttatttgttttttgttgtttgagacagggtcttgctctgtcgcccaggctggagtgccgtggcgccatctcagctcattgcaacctctgcctcccaggttcaaaagattcttgtgcttcagcctcctgagtagctgggattacaggggtgcaccaccatgcccggctaatttttgtacttttagtagagacagggtttcaccatgttggccaggccagtctcaaactcctggcctcaagtgatctgcccgccttggtctcctaaagtgctggaattttaggcgtgagccattgtacctggcccagattgctaggactttgaacagaggtccctgagacctagggagggagcccaaataacctagttggggccagggctcgttgagagtgagaaattgcaagtttcagccatcacacactcttttcctgcgtttttttgtttgtttgtttgtttgttttgagacagagtcttggctctgttgcccaggctggagtgcagtagcatgatcttggctcactacaacttccccctcccgggttcaagcgattctcctgcctcagcctccctagtagctgggattacaggcacacgccaccatgcccagctaatttttggggtttttttattgtttgtttgtttgtctgtttttgagacagagtttcactcttgttgcccaggctggagtgcaatggcacgatctcggctcaccacaacctccgcctcctgggttcaagcgattctcttgtctcagcctcccaagtagctgggattacagagacggtatctcgccgtgttgctcaggcaggtctcaaactcctgggctcaaatgatcctgccgcctcagcctcccacagtgctgggattatagacgtgagtccccatgcccagcctccctcgttatttttatctttggacctgcagtttaaaagatgcctaccctgttctgtacagagtaatgagatgtgtgacggctgcaaaccaggtgtttttttctgaggctgtgttgacagctgctaatgagtgtgttggtgttttgctcggcagcttggatcctagcatgactatacattgtgacatggtcattacatatggattagaccaactggagaattgccagacttgtggtaccgattatatcatctcagtcttgaatttactcacgctgattgttgaacagataaatacgaaactgccatcatcatttgtagaaaaactgtttataccatcatctaaactactattcttgcgttatcataaagaaaaagaggttgttgctgtagcccatgctgtttatcaagcaatgctcagcttgaagaatattcctgttttggagactgcctataagttaatattgggagaaatgacttgtgccctaaacaacctcctgcacagtctgcaacttcctgaggcctgttctgaaataaaacatgaggcttttaagaatcatgtgttcaatgtagacaatgcaaaatttgtagttaaatttgacctcagtgccctgactacaattggaaatgccaaaaactcgagtctttaattgtaatgactttgttttatccacagttaagccttttctcattacatatttatgtatttcactgtcatgtcaacatgtctgcagaatcactgtatgtaacaaacagccatatttaagacatgcctggataaataaaattggtaggaatgttttcttgccattatatttaa

SEQ ID NO: 178243 - DNA, 1305 bp, Homo sapiens
  Payload ID: 15025
  Gene Symbol:
  Gene Name: RP11-345J4.5
  ENST ID: ENST00000568556
  CDS Start-End: 201-575
tgcttcggaacaagctctcggggactatccggaggcagcctgcaggaagccgtagcgccggtacgtgcccctctcctgtctggaggcgggtgtagaagtccgaccgcggaagccagactgctgtccagtcggcgagcgcgtaccattcagcatcggctccgcccgagtcccaccttcctcaggctctgattggctgacacatggcaagcgcgaaaagcctggaccgctggaaagcccggctgcttgagggcggaagtactgcgttgacgtacgccttagtaagggcggaagtgagttttccagcggaagtggctcctgtaaggcagcaaggtagcgtggccggcgcccgagctggggttgtgtccctgctgggctgccgttccagctggactgccgccatggaactcagcgccgaatacctccgcgagaagctgcagcgggacctggaggcggagcatgtggaggtggaggacacgaccctcaaccgttgctcctgtagcttccgagtcctggtggtgtcggccaagttcgaggggaaaccgctgcttcagagacacaggttctgtacagagtaatgagatgtgtgacggctgcaaaccaggtgtttttttctgaggctgtgttgacagctgctaatgagtgtgttggtgttttgctcggcagcttggatcctagcatgactatacattgtgacatggtcattacatatggattagaccaactggagaattgccagacttgtggtaccgattatatcatctcagtcttgaatttactcacgctgattgttgaacagataaatacgaaactgccatcatcatttgtagaaaaactgtttataccatcatctaaactactattcttgcgttatcataaagaaaaagaggttgttgctgtagcccatgctgtttatcaagcaatgctcagcttgaagaatattcctgttttggagactgcctataagttaatattgggagaaatgacttgtgccctaaacaacctcctgcacagtctgcaacttcctgaggcctgttctgaaataaaacatgaggcttttaagaatcatgtgttcaatgtagacaatgcaaaatttgtagttaaatttgacctcagtgccctgactacaattggaaatgccaaaaactcgagtctttaattgtaatgactttgttttatccacagttaagccttttctcattacatatttatgtatttcactgtcatgtcaacatgtctgcagaatcactgtatgtaacaaacagccatatttaagacatgcctggataaataaaattggtaggaatg

SEQ ID NO: 178244 - DNA, 937 bp, Homo sapiens
  Payload ID: 15025
  Gene Symbol:
  Gene Name: RP11-345J4.5
  ENST ID: ENST00000569622
  CDS Start-End: 1-748
ggaagtggctcctgtaaggcagcaaggtagcgtggccggcgcccgagctggggttgtgtccctgctgggctgccgttccagctggactgccgccatggaactcagcgccgaatacctccgcgagaagctgcagcgggacctggaggcggagcatgtggaggtggaggacacgaccctcaaccgttgctcctgtagcttccgagtcctggtggtgtcggccaagttcgaggggaaaccgctgcttcagagacacagcttggatcctagcatgactatacattgtgacatggtcattacatatggattagaccaactggagaattgccagacttgtggtaccgattatatcatctcagtcttgaatttactcacgctgattgttgaacagataaatacgaaactgccatcatcatttgtagaaaaactgtttataccatcatctaaactactattcttgcgttatcataaagaaaaagaggttgttgctgtagcccatgctgtttatcaagcaatgctcagcttgaagaatattcctgttttggagactgcctataagttaatattgggagaaatgacttgtgccctaaacaacctcctgcacagtctgcaacttcctgaggcctgttctgaaataaaacatgaggcttttaagaatcatgtgttcaatgtagacaatgcaaaatttgtagttaaatttgacctcagtgccctgactacaattggaaatgccaaaaactcgagtctttaattgtaatgactttgttttatccacagttaagccttttctcattacatatttatgtatttcactgtcatgtcaacatgtctgcagaatcactgtatgtaacaaacagccatatttaagacatgcctggataaataaaattggtaggaatgttttcttgccattatatttaacgtttcttctttttccttg

SEQ ID NO: 178245 - DNA, 502 bp, Homo sapiens
  Payload ID: 15026
  Gene Symbol:
  Gene Name: RP11-347C12.3
  ENST ID: ENST00000549390
  CDS Start-End: 1-432
cggccgcggcggatgggaagccgtgcacgacgagcacaatctccatggggaggagaacaggaatgttcctgtgagccccgccgcgccctaccgccagcgcagcccagcatcgcgggtcccctcctatcccaccggagaacggggtcctcactcccagcttcagccgagccctggccccgcaactgcctgaaggcacgccccctgcacctgcccacctcaggtcccgcctccagcccagtggccaagatcgcgggtctctacaatgacttggagccaccccggaagaccatgcgcagaggggtgctgatgaccctgctgcagcagtcggccatgaccctgcccctgtggattgggaagcctggtgacaagagactacgtggccagacctggagacaaggtggctgcccgggtgaaggccgtggatggggatgagcagtggatcctggccgaggtggtcagttacagccatgccaccaacaagtgagtgacaccagccccgggg

SEQ ID NO: 178246 - DNA, 1693 bp, Homo sapiens
  Payload ID: 15026
  Gene Symbol:
  Gene Name: RP11-347C12.3
  ENST ID: ENST00000550538
  CDS Start-End: 120-1439
tgaatctctgcagggcaagccctttactcactcacagtagaggccaggaccatcgtctgttattttattaactgtttcttggccattggctctatgtgggactttgttctacagcagtgatgagagctgcccccaggcagtttagtacacagagacagggtcttgctgtttcccccaggctggagtgcaatggagtgatcatagctcacttcagcctccaactcctgggctcaagcgatcctcccacctcagcctcccccgtagctgggactacaggcatatgccaccatgcccggcttctcagagctgcaattttaaattgggagccagggaagacctccctgtggaggtggcaggttatcaagactgaagatgtagagaagaaccttccagtcaaagggaaaaggcaggtcctgctgtgctcaggaatggccagaagtactatcatccatccccatcttagagatgtggacagggccgcaacagtgtcagggcgtttcctggctcctcaacagcaggatccgaagtcgtctggaggatgtgccgctctgcttggggcggacctcccctggagcgcacctcccctggagcgcgcggacgcgcagggtgcacacagccctcttggaccccgggaccggctcaggctcaggctcggcgtcagcaaagggacctgcgcggcgccctggggcggaggaggcccgacggtcagtggccagtgccgtgcggctgacggaggtcggggcgcaacgggaccgggaggagcgcccagggcgggggtgccaggccccctccaaccgcggcggggttggagtcaaggcggctccgggcgggggtcggaccccaaatccaggccacaggccgccgcccggtcttcttctttacccgaagggcggccgcggcggatgggaagccgtgcacgacgagcacaatctccatggggaggagaacaggaatgttcctgtgagccccgccgcgccctaccgccagcgcagcccagcatcgcgggtcccctcctatcccaccggagaacggggtcctcactcccagcttcagccgagccctggccccgcaactgcctgaaggcacgccccctgcacctgcccacctcaggtcccgcctccagcccagtggccaagatcgcgggtctctacaatgacttggagccaccccggaagaccatgcgcagaggggtgctgatgaccctgctgcagcagtcggccatgaccctgcccctgtggattgggaagcctggtgacaagcccccacccctctgtggggccatccctgcctcaggagactacgtggccagacctggagacaagccccaggaggactattctatcctgtttgaagacacctcctatgcagacggctactcccctcatctcagtgtggcccagaggtacctggtagcttctaaggagcccaagaaaaagtgacgctgcccggcggactcgacgtcctccaccatcttggggcaggacagcagaggatgtgctgggattaaacagacatcccccctccacacatctcctgggttttacttctccaaacccttctcccctccccagatatggtgacctggggagctgaaggctgggggagaggtgaccatatgtggccccaccgggcattcactctttcagctcagagtttctcttcctttccaatacaggctctacatgaacacaaa

SEQ ID NO: 178247 - DNA, 569 bp, Homo sapiens
  Payload ID: 15026
  Gene Symbol:
  Gene Name: RP11-347C12.3
  ENST ID: ENST00000568353
  CDS Start-End: 1-464
ccctcctatcccaccggagaacggggtcctcactcccagcttcagccgagccctggccccgcaactgcctgaaggcacgccccctgcacctgcccacctcaggtcccgcctccagcccagtggccaagatcgcgggtctctacaatgacttggagccaccccggaagaccatgcgcagaggggtgctgatgaccctgctgcagcagtcggccatgaccctgcccctgtggattgggaagcctggtgacaagcccccacccctctgtggggccatccctgcctcaggagactacgtggccagacctggagacaaggtggctgcccgggtgaaggccgtggatggggatgagcagtggatcctggccgaggtggtcagttacagccatgccaccaacaaacacctcctatgcagacggctactcccctcatctcagtgtggcccagaggtacctggtagcttctaaggagcccaagaaaaagtgacgctgcccggcggactcgacgtcctccaccatcttggggcaggacagcagaggatgtgctgggattaaacagacatcccccctcca

SEQ ID NO: 178248 - DNA, 460 bp, Homo sapiens
  Payload ID: 15027
  Gene Symbol:
  Gene Name: RP11-350O14.18
  ENST ID: ENST00000568665
  CDS Start-End: 1-101
ccttgggcctcacatatttgtcccttctgctcatccctgctgcaggtgcctcctcctgcccccgcactccactcccagccatggctccccttccccagtgaaacatgcccgagacaagtggacaacagaggccgagacggtgctctgcgtgtggccgggacgcctgacgctcagccccctgactgccttttccgacgccgcctttagccattgcgcgcagccgctcgccctgcgggacctggccgtggtttacacgctcgggccggcctccttcctcgtcagcctggcttcctgcctggcgctgggctctgggctcaccgcctgccgtgcgcgccgccgccgcctccgcaccgccgccctccgcccgccgagaccgccagacccgaaccccgatcccgacccccacggctgtgcctcgcccgcggacccggggagccccgccgctgccgcccaagcctga

SEQ ID NO: 178249 - DNA, 543 bp, Homo sapiens
  Payload ID: 15028
  Gene Symbol:
  Gene Name: RP11-371E8.4
  ENST ID: ENST00000554824
  CDS Start-End: 77-349
aagctccgactgcggcggcatccgggacggcgggcgggctggccaccacgggacaggaaggcacagagcatggagaatgatgaacttccgtcagcggatgggatggattggagtgggattgtatctgttagccagtgcagcagcattttactatgtttttgaaatcagtgagacttacaacaggctggccttggaacacattcaacagcaccctgaggagccccttgaaggaaccacatggacacactccttgaaagctcaattactctccttgcctttttgggtgtggacagttatttttctgaaatctgaaagtttcctagcaacctcatctttccactacatctgactgaacccgaaaggaaggctgagtattccatagcaagctgttacttaaaagataaagcagggctcagtaaagagacaagcactatatgcctgtagtacctgcaccccagagggagaagaaccagcaggaatttgtttagcttgcagttatgaatgtcatggaagtcacaaactatttgagctatacacaaaaag

SEQ ID NO: 178250 - DNA, 554 bp, Homo sapiens
  Payload ID: 15028
  Gene Symbol:
  Gene Name: RP11-371E8.4
  ENST ID: ENST00000557574
  CDS Start-End: 57-554
tccgggacggcgggcgggctggccaccacgggacaggaaggcacagagcatggagaatgatgaacttccgtcagcggatgggatggattggagtgggattgtatctgttagccagtgcagcagcattttactatgtttttgaaatcagtgagacttacaacaggctggccttggaacacattcaacagcaccctgaggagccccttgaaggaaccacatggacacactccttgaaagctcaattactctccttgcctttttggggctcagtaaagagacaagcactatatgcctgtagtacctgcaccccagagggagaagaaccagcaggaatttgtttagcttgcagttatgaatgtcatggaagtcacaaactatttgagctatacacaaaaagaaattttcgttgtgattgtggaaacagcaagtttaaaaatttggaatgcaaattacttcctgacaaagcaaaggtaaattctggcaataagtacaatgacaacttttttggattgtactgcatttgcaagagaccttatcctgatcctgaagacgag

SEQ ID NO: 178251 - DNA, 543 bp, Homo sapiens; identical to SEQ ID NO: 178249
  Payload ID: 15028
  Gene Symbol:
  Gene Name: RP11-371E8.4
  ENST ID: ENST00000627287
  CDS Start-End: 77-349

SEQ ID NO: 178252 - DNA, 554 bp, Homo sapiens; identical to SEQ ID NO: 178250
  Payload ID: 15028
  Gene Symbol:
  Gene Name: RP11-371E8.4
  ENST ID: ENST00000625267
  CDS Start-End: 57-554

SEQ ID NO: 178253 - DNA, 5514 bp, Homo sapiens
  Payload ID: 15029
  Gene Symbol:
  Gene Name: RP11-385D13.1
  ENST ID: ENST00000455584
  CDS Start-End: 45-2906
gccaagggacagaagaaagacagcctaggagcagagcctcccagatggctgagttggatctaatggctccagggccactgcccagggccactgctcagcccccagcccctctcagcccagactctgggtcacccagcccagattctgggtcagccagcccagtggaagaagaggacgtgggctcctcggagaagcttggcagggagacggaggaacaggacagcgactctgcagagcagggggatcctgctggtgaggggaaagaggtcctgtgtgacttctgccttgatgacaccagaagagtgaaggcagtgaagtcctgtctaacctgcatggtgaattactgtgaagagcacttgcagccgcatcaggtgaacatcaaactgcaaagccacctgctgaccgagccagtgaaggaccacaactggcgatactgccctgcccaccacagcccactgtctgccttctgctgccctgatcagcagtgcatctgccaggactgttgccaggagcacagtggccacaccatagtctccctggatgcagcccgcagggacaaggaggctgaactccagtgcacccagttagacttggagcggaaactcaagttgaatgaaaatgccatctccaggctccaggctaaccaaaagtctgttctggtgtcggtgtcagaggtcaaagcggtggctgaaatgcagtttggggaactccttgctgctgtgaggaaggcccaggccaatgtgatgctcttcttagaggagaaggagcaagctgcgctgagccaggccaacggtatcaaggcccacctggagtacaggagtgccgagatggagaagagcaagcaggagctggagaggatggcggccatcagcaacactgtccagttcttggaggagtactgcaagtttaagaacactgaagacatcaccttccctagtgtttacgtagggctgaaggataaactctcgggcatccgcaaagttatcacggaatccactgtacacttaatccagttgctggagaactataagaaaaagctccaggagttttccaaggaagaggagtatgacatcagaactcaagtgtctgccgttgttcagcgcaaatattggacttccaaacctgagcccagcaccagggaacagttcctccaatatgcgtatgacatcacgtttgacccggacacagcacacaagtatctccggctgcaggaggagaaccgcaaggtcaccaacaccacgccctgggagcatccctacccggacctccccagcaggttcctgcactggcggcaggtgctgtcccagcagagtctgtacctgcacagggtgctgctgcgttttcgcaggccatctttagggactggcttctgtcttgtgtccttgagtgacctactccctggtttccccccatctctgcagccactgcctccattccaggggccaccactccagccccagatgaaagatggaagaaaagggctcaatcaagacatcacagatgtgtgtttttcccctgagaaagaccacagctccaagtctgcgacctcacaagtctattggacagccaaaactcagcacacatcccttcctttgtccaaagccccagaaaatgaacacttccttggggcagcatctaaccctgaggaaccatggaggaattcactccggtgtatatccgaaatgaataggctgttttctggaaaagcagacataaccaagccagggtacgatccctgcaatctattggttgacctggatgacatcagagacctgtcttctgggttcagcaaataccgagacttcatccgttacctgcccatccacctctccaagtacattctaagaatgctggatagacacaccctgaacaagtgcgcctctgtgagccagcactgggccgccatggctcaacaggtcaagatggacttgtcagcgcacggcttcattcagaaccagattaccttcttgcaggggtcctatacaagaggaattgatcctaattatgccaataaggtttctatcccagttcctaaaatggtagatgacgggaagagcatgcgtgtgaaacatccgaagtggaagttgagaacgaagaatgagtacaacctgtggactgcataccagaacgaggaaacgcagcaggtcctgatggaggagagaaatgttttctgtgggacctacaatgttcgcattctctctgacacgtgggatcaaaaccgagtcatccactattccgggggagatctgatagctgtgtcatctaatcgaaagatccatcttctggacatcatacaagtgaaagcgatacccgttgaattccgaggccatgctgggagtgtccgggccctcttcctgtgtgaggaggaaaactttctcctaagcgggagctatgacctaagtatcagatactgggatctgaaaagtggggtttgcacacgaatcttcggtggtcaccaggggactatcacttgcatggacttgtgtaagaacaggctcgtatctggaggaagagattgccaggtaaaagtatgggatgtagacacagggaagtgcctgaagacgtttagacacaaagaccccatcttggccaccaggatcaatgatacctacattgtgagcagctgtgagcgagggctggtgaaagtgtggcacattgccatggcccagttggtaaagactctcagtggccacgagggagctgtgaaatgcctgttctttgaccagtggcatctcctctcaggaagcactgatggcctggtcatggcctggagcatggtggggaagtacgagcgctgcctgatggccttcaagcatcccaaactagaactaaataaccaaagtaaatgcttggcacactctcaaggaagcacagctctgccttgcaccagtgccagaagcctctagaacagtgacggaggcaaccagatgaagaagacgagacattcctctcccagcagcgtgagagacacctggcgactgctggcaggaatcagcatttcacacaagcaatcaacataactaaaacttaagtactgtcctctgtattctccttgggaaaatgaaacaaatgacaatgtcattgcattgattttgttctcattaaatggtattttagctataaacattttcccctttgatttgcaaaaaaaaattatagaaaatgtctatgttgcttaaaatgcaaagggtttttactgtaactatttcaaaaacagccaattatcttactattccttgtttattacatatattcaaggtcactttctccatcatttgaaacaacatagacaaaagggagctcagtaacaaacaggcaagcagcaccaagactggcactcaaagctgtattaggaccagatgcattttcaatttcttgaaacagtggagctgcagtttattcagtttatttaggtcagccctaaggtgaaactatattacattcaaaattatcctttaaaatcccctgaactcatccataaagtacatggaaggttatgtatgtacaattctggaaaataatgactgtgttcactagagtttgagaatcactcagttaaattaagagggaacaaaagaaaagcctatatttagatggctgggcattcaaaccattccgcctttaaggagactctcagtagaggagaggtggagaattctatggggttctgtttccctgtggggtttactctattattcttcatgctacaagcatcggcagcctggctaaacagaaatgtatttctgttggtgctggctgtgaggatttgactgaacaggggagctgcaccttctctgggattacattctaatgtcacctctgctcctctcccttataatgaattacaggtagacagagctatagcactgtaacaaaggtgaagatacacataggcaatagagacgggaacgtttcagagaagagtaggcaatggtagccagcctgaattttgagctgagtaacagaagaacttcacttctgctgtgaccaccctggtccaagctatcatcaagtcatgccaggagctgccccaagtctctctcctgggattctatggtctattttacccaggcagctgaggggttcttttaacctaaatctgatcacaccagccccatttgtacaacttatttctggcttctcccactgcacatggagttccagcccttctgtcttcatcttgtgccaccctgccccttgttcattatgttctcaccacactggcctttctatttatagtgtcaggtagaagcccactctggccaccgtacgttcccccagatctctgcatcactctccttcagttctcaactccaatccactccctcccagtgccttcccgctctggagtgctctctcccaattgttctgtattatcattctgtctctttccttggcaccattgatgcccacctagaatgatcttttagagctcaactgttcactggctaaagttctaccttccccaccggacgggaatgaaggcagggatcaggtcatgctggtcatattccagcatttagcacagagtgtaacatccagagatgctgaggacacaattctgaaaaaagtagtaacaatgatgacagcagtatcatttactgacggctttataagaacagtcgttttctcacataactctatgaggtggaaggcacgaacctcattttataggcgaggaaacagagcctcagagaagtttagtaatatggtcagggttgcatggtgaagcaggcggaggagctaggctttgattccaggcaatcggaccccaaaatcttatgttctacaacattctattccccaaggaaaaaccaagtgctctgaaaatctagtctaaaacagactataattttcaatacacaaatttacccattgcaagtgtacagttagttctgagttaaaaaaaaaaaaaaaggtaaacatagtgtaaccaccaccacaatcaagatatggaacatataaatttatcttttcaaaaagtttcttatgcccctctgtagccaattccctcctgtcccccgcacccctccccccaccgccgtttcccagtaaccactgatcttacttctgtgcctagttttggctttccaaaatgtcatataaatggaatcatacgacatgctgtcttttgtctctgtcttctttcacttaacatagtgcttttgaaacacacccgtgtcactgcacgtaccagtggtttgttccttttaatttctgagtagtatttcagccgtaatttgtttatctattcatcagctgagggatgtttaggttgtctttagtgatatttaagctaatattcatgtacagatctttgtatggacatgtgtccatacatacacaggaatgggattgtatggtaaattttgtttaaatttattgaaatctgccaaactgttcttggaattgattgtaccattctgcattcacactagcaataaacgagagcttcaggtattctacacccttgtcagcactgtattgttgtttttaataaatgttaattatgct

SEQ ID NO: 178254 - DNA, 1391 bp, Homo sapiens
  Payload ID: 15030
  Gene Symbol:
  Gene Name: RP11-385J1.3
  ENST ID: ENST00000614557
  CDS Start-End: 321-1028
atctgtgagctatccatgctaacatggggaaggtttcagaggaggagcccttccttcccttcgttgccattagcacaggtctccagggcacgtcttttctcctgggtttctatgtttgttttactcactgcctctcgttcctctgcttacgacattttcatgaataagccagaagatagtcagcacagaagcctccctacaacctggaaaaagaaatgagctttcactttgaatatcacacagacatactgaggtctttttgccattcctccaggacatccaccataaggaaaggagaccctggaccaacattctctaagatgtttatatggaccagtggccggacctcttcatcttatagacatgatgaaaaaagaaatatttaccagaaaatcagggaccatgacctcctggacaaaaggaaaacagtcacagcactgaaggcaggagaggaccgagctattctcctgggactggctatgatggtgtgctccatcatgatgtattttctgctgggaatcacactcctgcgctcatacatgcagagcgtgtggaccgaagagtctcaatgcaccttgctgaatgcgtccatcacggaaacatttaattgctccttcagctgtggtccagactgctggaaactttctcagtacccctgcctccaggtgtacgttaacctgacttcttccggggaaaagctcctcctctaccacacagaagagacaataaaaatcaatcagaagtgctcctatatacctaaatgtggaaaaaattttgaagaatccatgtccctggtgaatgttgtcatggaaaacttcaggaagtatcaacacttctcctgctattctgacccagaaggaaaccagaagagtgttatcctaacaaaactctacagttccaacgtgctgttccattcactcttctggccaacctgtatgatggctgggggtgtggcaattgttgccatggtgaaacttacacagtacctctccctactatgtgagaggatccaacggatcaatagataaatgcaaaaatggataaaataatttttgttaaagctcaaatactgttttctttcattcttcaccaaagaaccttaagtttgtaacgtgcagtctgttatgagttccctaatatattcttatatgtagagcaataatgcaaaagctgttctatatgcaaacatgatgtctttattattcaggagaataaataactgttttgtgttggttggtggttttcataatcttatttctgtactggaactagtactttcttctctcattccgccaaaacagggctcagttattcatttgccaagcttcgtggaggaatgtaggtgacatcaatgtgataaagtctgtgttctgagttgtcagatctcttga

SEQ ID NO: 178255 - DNA, 566 bp, Homo sapiens
  Payload ID: 15031
  Gene Symbol:
  Gene Name: RP1-138B7.6
  ENST ID: ENST00000621802
  CDS Start-End: 1-228
caccagtccctcttcatgtcagccctgtcggcccaccctgaccgctcactctcagtgtgctgggagcagcactgcaagctcctgccaggagtagcgggcatctcagcctcgacagtcgccaagtggaccatcgatgaggtcttcggctttgttcagaccctgacaggttgtgaggaccaagcacgcctcttcaaagacgagagctgcctgatcattgctacagaatgaactctagcccagctgggaccccaagtccacagccctccagggccaatgggaacatcaacctggggccttcagccaacccaaatgcccagcccacggacttcgacttcctcaaagtcatcggcaaagggaactacgggaaggtcctactggccaagcgcaagtctgatggggcgttctatgcagtgaaggtactacagaaaaagtccatcttaaagaagaaagagcagagccacatcatggcagagcgcagtgtgcttctgaagaacgtgcggcaccccttcctcgtgggcctgcgctactccttccagacacctgagaagctctacttcgtgctcgac

SEQ ID NO: 178256 - DNA, 669 bp, Homo sapiens
  Payload ID: 15032
  Gene Symbol:
  Gene Name: RP11-38C17.1
  ENST ID: ENST00000410042
  CDS Start-End: 208-603
gcacttttccagctcgagccctcacgaggccgtgggtacgaccggaagccgcagactgaatctcgctctgttgcccagcccatctcggcccactgaaacctccacctcccgggttcaagcgattctcctgcctcagcctcccgagtagctgagattacaggcgcctgccaccacgcccagcctctaaagagagcaatcactacacttatggctgggattttgcgcttagtagttcaatggcccccaggcagactacagactgtgacaaaaggtgtggagtctcttatttgtacagattggattcgtcacaaattcaccagatcaagaattccagaaaaagtgtttcaggcctcacctgaagatcatgaaaaatacggtggggatccacagaaccctcataaactgcatattgttaccagaataaaaagtacaagaagacgtccatattgggaaaaagatataataaagatgcttggattagaaaaagcacatacccctcaagttcacaagaatatcccttcagtgaatgcaaaattgaaagtagttaagcatttgataaggtttgttgtttcttctcagctctttttaaaatgtattgcctagtgtaattctaaatgcatttttcttttttcgttaatgttctgaaaaaaactttttaaaaaactaaaa

SEQ ID NO: 178257 - DNA, 647 bp, Homo sapiens
  Payload ID: 15033
  Gene Symbol:
  Gene Name: RP1-139D8.6
  ENST ID: ENST00000372963
  CDS Start-End: 95-478
acctcaccatcaagaaaggccctggtccaggatgtgcaaggtgtgatgaaatcacagggctggggaaggtcagctcggggtcacaagaagcctgatgggcaggaaagagcatgaaagccccagccagcctcacatgtgcggctgggaggactcacagaaaccctctgtacccagtcatgggccaaagacaccgtcatgcaagggggtgaaggctccacactcgtcccggccccgggcgtggaagcaggacctcgagcagtctctggcagcagcctatgtgccggtcgttgtggactctaaggggcagaatccggacaagctcaggttcaatttctacacctcccagtactccaactccctgaaccccttctacactttgcagaagcctacctgtggctacctgtaccgccgggacactgaccacacccgcaagcgctttgatgtgcctcctgccaacttggtcttgtggcgctcctaggcctgagccaaacggaagcccccgacccttcaccctcacccctgtgacctcaggtccccaaggggaagggctgctcactgcaggaggagtgacctatattcgggctaagacagctgtgccatgcccacctattgacaatgataaagggaggtctctcttctcagcagca

SEQ ID NO: 178258 - DNA, 580 bp, Homo sapiens
  Payload ID: 15033
  Gene Symbol:
  Gene Name: RP1-139D8.6
  ENST ID: ENST00000623004
  CDS Start-End: 52-390
ccctgaccaccagaagttccacctcaccatcaagaaaggccctggtccaggatgtgcaaggactcacagaaaccctctgtacccagtcatgggccaaagacaccgtcatgcaagggggtgaaggctccacactcgtcccggccccgggcgtggaagcaggacctcgagcagtctctggcagcagcctatgtgccggtcgttgtggactctaaggggcagaatccggacaagctcaggttcaatttctacacctcccagtactccaactccctgaaccccttctacactttgcagaagcctacctgtggctacctgtaccgccgggacactgaccacacccgcaagcgctttgatgtgcctcctgccaacttggtcttgtggcgctcctaggcctgagccaaacggaagcccccgacccttcaccctcacccctgtgacctcaggtccccaaggggaagggctgctcactgcaggaggagtgacctatattcgggctaagacagctgtgccatgcccacctattgacaatgataaagggaggtctctcttctcagcagcagttaaagtttgtccttccttt

SEQ ID NO: 178259 - DNA, 2395 bp, Homo sapiens
  Payload ID: 15034
  Gene Symbol:
  Gene Name: RP11-400G3.5
  ENST ID: ENST00000464755
  CDS Start-End: 1-1005
aaggagatccggcgtttctgcctcatgactctgcggaattttgggatggggaagaggagcatcgaggaccgtgttcaagaggaagcccgctgccttgtggaggagttgagaaaaaccaatgcctcaccctgtgatcccactttcatcctgggctgtgctccctgcaatgtgatctgctctgttattttccatgatcgatttgattataaagatcagaggtttcttaacttgatggaaaaattcaatgaaaacctcaggattctgagctctccatggatccaggtctgcaataatttccctgctctcatcgattatctcccaggaagtcataataaaatagctgaaaattttgcttacattaaaagttatgtattggagagaataaaagaacatcaagaatccctggacatgaacagtgctcgggactttattgattgtttcctgatcaaaatggaacaggaaaagcacaatcaacagtctgaatttactgttgaaagcttgatagccactgtaactgatatgtttggggctggaacagagacaacgagcaccactctgagatatggactcctgctcctgctgaagtacccagaggtcacagctaaagtccaggaagagattgaatgtgtagttggcagaaaccggagcccctgtatgcaggacaggagtcacatgccctacacagatgctgtggtgcacgagatccagagatacattgacctcctccccaccaacctgccccatgcagtgacctgtgatgttaaattcaaaaactacctcatccccaagggcacgaccataataacatccctgacttctgtgctgcacaatgacaaagaattccccaacccagagatgtttgaccctggccactttctggataagagtggcaactttaagaaaagtgactacttcatgcctttctcagcagctctcaaaaatctatggccctgtgttcactctgtattttggcctggaacgcatggtggtgctgcatggatatgaagtggtgaaggaagccctgattgatcttggagaggagttttctggaagaggccatttcccactggctgaaagagctaacagaggatttggaatcgttttcagcaatggaaagagatggaaggagatccggcgtttctccctcatgacgctgcggaattttgggatggggaagaggagcattgaggaccgtgttcaagaggaagcccgctgccttgtggaggagttgagaaaaaccaaggcttcaccctgtgatcccactttcatcctgggctgtgctccctgcaatgtgatctgctccattattttccagaaacgtttcgattataaagatcagcaatttcttaacttgatggaaaaattgaatgaaaacatcaggattgtaagcaccccctggatccagatatgcaataattttcccactatcattgattatttcccgggaacccataacaaattacttaaaaaccttgcttttatggaaagtgatattttggagaaagtaaaagaacaccaagaatcgatggacatcaacaaccctcgggactttattgattgcttcctgatcaaaatggagaaggaaaagcaaaaccaacagtctgaattcactattgaaaacttggtaatcactgcagctgacttacttggagctgggacagagacaacaagcacaaccctgagatatgctctccttctcctgctgaagcacccagaggtcacagctaaagtccaggaagagattgaacgtgtcattggcagaaaccggagcccctgcatgcaggacaggggccacatgccctacacagatgctgtggtgcacgaggtccagagatacatcgacctcatccccaccagcctgccccatgcagtgacctgtgacgttaaattcagaaactacctcattcccaagggcacaaccatattaacttccctcacttctgtgctacatgacaacaaagaatttcccaacccagagatgtttgaccctcgtcactttctggatgaaggtggaaattttaagaaaagtaactacttcatgcctttctcagcaggaaaacggatttgtgtgggagagggcctggcccgcatggagctgtttttattcctgaccttcattttacagaactttaacctgaaatctctgattgacccaaaggaccttgacacaactcctgttgtcaatggatttgcttctgtcccgcccttctatcagctgtgcttcattcctgtctgaagaagcacagatggtctggctgctcctgtgctgtccctgcagctctctttcctctggtccaaatttcactatctgtgatgcttcttctgacccgtcatctcacattttcccttcccccaagatctagtgaacattcagcctccattaaaaaagtttcac

SEQ ID NO: 178260 - DNA, 701 bp, Homo sapiens
  Payload ID: 15035
  Gene Symbol:
  Gene Name: RP11-403P17.5
  ENST ID: ENST00000561728
  CDS Start-End: 1-220
caatcctgagacttgttaccagaggttaaagaagagatgcagggaagaggagaaggtcattccgctggaatacctggaagcaattcaccatctccatgaggagtggctcatcaaaggcagccttttccccatggcagcccctgttctgcgctctctacagaggcacaacaaacaggccgggaggagggacgggaggccaggagagctccacgttccgtgaaacctttgcagggggaagttgatcccacagccacggaaatagccagatactcctctggccttccctcccaccctgagggagacacccggaggagcagatccccagggaattcagaacagctgccacggaacctcccctgaaactgcaggggcattcccggcatgcctactcaacagcctgaggagggcaccagctgagagacagaatttttggaagaacttaggaaagaaactaagaaaagacaacagcacacagcaacaagcagtcatccgggcctctcatgtcaccgagaacattatggtgggcgcctgtgagctcttcctgaccacccaagacttctaggatgctttcccgaccaccctgctccacccagggcagagttgccaactccttgatgcctcctgtgttgcaatcccagtcagatgaggtcccagggccccagggtgggcggcggctcaccgtagccgtgctcgtactctcg

SEQ ID NO: 178261 - DNA, 600 bp, Homo sapiens
  Payload ID: 15036
  Gene Symbol:
  Gene Name: RP11-404P21.8
  ENST ID: ENST00000553811
  CDS Start-End: 151-378
agctctggcttctgggctccgaggaggggtggggacggtggggacggtggggacatcaggctgccccgcagtaccagggagcgactgaagtgcccatgccgcttgctccggagaaggtgtggcctcactcacatcccactctgagtccaaatgttctctccctggaagatatcaatgtttctgtctgttcgtgaggactccgtgcccaccacggcctctttcagggtctcagtccgtcggcccagactgaagtgcagtggcacaatcatagctcgctgcagcctcgaccttccaggcttaaacgattctcccacctcagcctctcgagttgctgggaccacaggtcactgtgcatggcatcatcctggccccctctagagctccaatcctccaaccagagccagctcttccctcaaaatgctacggcctgtgacaatgctccagaagcctgggacctgctgcacagagtgctgccaacatttatcatctccatctgtttcttcggcctcctagggaacctttttgtcctgttggtcttcctcctgccccggcggcaactgaacgtggcagaaatctacctggccaacctggcagcctctg

SEQ ID NO: 178262 - DNA, 4392 bp, Homo sapiens
  Payload ID: 15037
  Gene Symbol:
  Gene Name: RP11-407N17.3
  ENST ID: ENST00000553728
  CDS Start-End: 214-4233
gacactgcagattgaaaacagacagtgtttgtctctcaagttaaaccaacaagccgatagaaaaaggtagttatcaagagatttttaaaacttcaaccctttttctcttatagttagtgaagagagtagaatatctccagttttggctgacatctctacaacctgaacaattggcttaaacttcacttgggattcccggttgcttgttttagcatggcaaaatttggcgttcacagaatccttcttctggctatttctctgacaaagtgtctggagagtacaaaactgctggcagaccttaaaaaatgtggtgacttggaatgtgaagctttaataaacagagtctcagccatgagagattatagaggacctgactgccgatacctgaacttcactaagggagaagagatatctgtttatgttaaacttgcaggagaaagggaagatttgtgggcaggaagtaaaggaaaggagtttggatattttcccagagatgcagtccagattgaagaggtgttcatatctgaggaaattcagatgtcaacgaaagaatctgactttctttgtcttcttggagtaagttacacatttgacaatgaagatagtgaattaaacggtgattatggtgaaaatatatatccttatgaagaagataaagatgaaaaatctagtatatatgaaagtgattttcagatagaacctggattttatgcaacttatgaaagtactttgtttgaagaccaagttccagcattagaggctcctgaagatatcggaagtaccagtgaatcaaaagactgggaagaagtagttgttgaaagtatggaacaggatcgtattccagaagtgcatgtcccaccatcttcagctgtgtctggagtcaaagaatggtttggattgggaggagaacaagctgaagagaaggcttttgaatcagttattgaacctgtacaagaaagctcatttcggagtagaaaaatagcagtggaagatgagaatgacctagaggaattaaataatggtgagcctcaaacagaacatcagcaagaatctgaatcagaaattgattcagtgccaaagacacagtctgaactagcatctgagtcagagcacattcccaaacctcaatccactggttggtttggtggaggatttacaagttatttaggttttggagatgaggatacagggcttgaattaatagctgaagaaagcaatccaccactacaagattttcccaattccatatcatctgataaagaagccacagttccatgtacagaaatattaacagaaaaaaaagacacaatcactaatgatagcttgagtctcaagccaagttggtttgattttggttttgctatactaggctttgcatatgccaaggaagataaaattatgttagatgacaggaaaaatgaagaagatggtggggcagatgaacatgaacatcctctaacaagtgaattagaccctgaaaaagaacaagaaatagaaacgataaaaattatagaaacagaagatcaaatagacaagaaaccagtctcagaaaaaacagacgaatctgatactataccatatttgaaaaagttcttgtataattttgacaacccttggaacttccagaacattccaaaggaaacagaattgccatttcccaaacagatactggatcaaaataatgtaattgaaaatgaagaaactggagaattttccattgataattatcccacagataatacaaaagttatgatattcaaaagttcatacagtctgtcagaagatgcttctgagtttcagattctgaaatacttattccaaattgatgtttatgatttcatgaattctgcattttcaccaattgtaattcttacagaaagggttgtggcagcactgcctgaaggtatgagaccagattctaatctttatggttttccatgggaattggtgatatgtgcagctgttgttggattttttgctgttctcttttttttgtggagaagttttagatcggttaggagtcggctttatgtgggacgagagaaaaagcttgctctaatgctttctggactaattgaagaaaaaagtaaactacttgaaaaatttagccttgttcaaaaagagtatgaaggctatgaagtagagtcatctttaaaggatgccagctttgagaaggaggcaacagaagcacaaagtttggaggcaacctgtgaaaagctgaacaggtccaattctgaacttgaggatgaaatactctgtctagaaaaagagttaaaagaagagaaatccaaacattctgaacaagatgaattgatggcggatatttcaaaaaggatacagtctctagaagatgagtcaaaatccctcaaatcacaagtagctgaagccaaaatgaccttcaagatatttcaaatgaatgaagaacgactgaagatagcaataaaagatgctttgaatgaaaattctcaacttcaggaaagccagaaacagcttttgcaagaagctgaagtatggaaagaacaagtgagtgaacttaataaacagaaagtaacatttgaagactccaaagtacatgcagaacaagttctaaatgataaagaaagtcacatcaagactctgactgaacgcttgttaaagatgaaagattgggctgctatgcttggagaagacataacggatgatgataacttggaattagaaatgaacagtgaatcggaaaatggtgcttacttagataatcctccaaaaggagctttgaagaaactgattcatgctgctaagttaaatgcttctttaaaaaccttagaaggagaaagaaaccaaatttatattcagttgtctgaagttgataaaacaaaggaagagcttacagagcatattaaaaatcttcagactgaacaagcatctttgcagtcagaaaacacacattttgaaaatgagaatcagaagcttcaacagaaacttaaagtaatgactgaattatatcaagaaaatgaaatgaaactccacaggaaattaacagtagaggaaaattatcggttagagaaagaagagaaactttctaaagtagatgaaaagatcagccatgccactgaagagctggagacctatagaaagcgagccaaagatcttgaagaagaattggagagaactattcattcttatcaagggcagattatttcccatgagaaaaaagcacatgataattggttggcagctcggaatgctgaaagaaacctcaatgatttaaggaaagaaaatgctcacaacagacaaaaattaactgaaacagagcttaaatttgaacttttagaaaaagatccttatgcactcgatgttccaaatacagcatttggcagagagcattccccatatggtccctcaccattgggttggccttcatctgaaacaagagcttttctctctcctccaactttgttggagggtccactcagactctcacctttgcttccagggggaggaggaagaggctcacgaggcccagggaatcctctggaccatcagattaccaatgaaagaggagaatcaagctgtgataggttaaccgatcctcatagggctccctctgacactgggtctctgtcacctccatgggaccaggaccgtaggatgatgtttcctccgccaggacaatcatatcctgattcagcccttcctccacaaaggcaagacagattttgttctaattctggtagactgtctggaccagcagaactcagaagttttaatatgccttctttggataaaatggatgggtcaatgccttcagaaatggaatccagtagaaatgataccaaagatgatcttggtaatttaaatgtgcctgattcatctctccctgctgaaaatgaagccactggccctggctttgttcctccacctcttgctccaatcagaggtccattgtttccagtggatgcaagaggcccattcttgagaagaggacctcctttccccccacctcctccaggagccatgtttggagcttctcgagattattttccaccaggggatttcccaggtccaccacctgctccatttgcaatgagaaatgtctatccaccgaggggttttcctccttaccttcccccaagacctggatttttccccccacccccacattctgaaggtagaagtgagttcccctcaggtttgattccaccttcaaatgagcctgctactgaacatccagaaccacagcaagaaacctgacaatatttttgctctcttcaaaagtaattttgactgatctcattttcagtttaagtaactgctgttacttaagtgattacacttttgctcaaattgaagcttaatggaattataattctcaggatagtattttgtaaataaagatgatttaaatatgaa

SEQ ID NO: 178263 - DNA, 1044 bp, Homo sapiens
  Payload ID: 15038
  Gene Symbol:
  Gene Name: RP11-407P15.2
  ENST ID: ENST00000561882
  CDS Start-End: 1-1044
atggttcaagcatctgggcacaggcggtccacccgtggctccaaaatggtctcctggtccgtgatagcaaagatccaggaaatatggtgcgaggaagatgagaggaagatggtgcgagagttcttggccgagttcatgagcacatatgtcatgatggtattcggccttggttctgtggcccatatggttctaaataaaacatatgggagctaccttggtgtcaacttgggttttggcttcggggtcaccatgggagtccacgtggcaggccgcatctctggagcccacatgaatgcagctgtgaccttcactaactgtgcgctgggccgcgtgccctggaggaagtttccagtccatgtgctggggcagttcctgggctccttcctggcagctgccaccatctacatctgtgtctccgcagcggccattctccacttttcgggtggagagctgatggtgaccggtccctttgctacagctggcatttttgccacctaccttcctgatcacatgacattgtggcggggcttcctgaatgaggagtggctgaccaggatgctccagctgtgtctcttcaccatcacggaccaggagaacaacccagcactgccaggaacacacgcgctggtgataagcatcctcgtggtcatcatcagggtgtcccatggcataaacacaggatatgccatcaatccatcccgggacccgccccccagcatcttcaccttcattgctggctggggcaaacaggtcttcagcgatggggagaactggtggtgggtgccagtggtggcaccacttctgggtgcctctctaggtggcatcatctacctggtcttcattggctccaccatcccacgggagcccctgaaattggaggactctgtggcgtatgaagaccacgggataaccgtattgcccaagatgggatctcatgaacccatgatctctcccctcaccctcatctccgtgagccttgccaacagatcttcagtccactctgccccacccttacatgaatccatggccctagagcacttctaa

SEQ ID NO: 178264 - DNA, 1423 bp, Homo sapiens
  Payload ID: 15039
  Gene Symbol:
  Gene Name: RP11-411B6.6
  ENST ID: ENST00000527595
  CDS Start-End: 21-344
gaaacgtgaagaaggtgaagatggcggtggccagggccggggtcttgggagtccagtggctgcaaagggcatcccggaacgtgatgccgctgggcgcacggacagcctcccacatgaccaaggacatgttcccggggccctatcctaggaccccagaagaacgggccgccgccgccaagaagtataatatgcgtgtggaagactacgaaccttacccggatgatggcatggggtatggcgactacccgaagctccctgaccgctcacagcatgagagagatccatggtatagctgggaccagccgggcctgaggttgaactggggtgaaccggatagaccatgaagctgaaggaacttgagcggccagctgtccaggcatggagcccagccagccaataccctttgtatctggccacaggaacatctgcccaacagctagattcctccttcagcacaaatggcacattggaaatatttgaggttgatttcagggacccttctctggacttgaaacacagaggagtcctttctgccttgagcagggcaacctcctggcttcaggggccagcgattctgaaatcttcatttgggatctgaataacttgaatgtgccaatgaccctgggatccaagtcacagcagcctccagaggacatcaaggcactgtcttggaaccggcaagcccaacacattctgtcttctgctcaccccagtggcaaggcagttgtgtgggatctcaggaagaatgaacctatcatcaaagtcagtgatcacagcaacaggatgcactgctcaggcctggcctggcatcctgacatagccacccagttagtgctgtgctcagaggatgatcgacttcccgtgattcagctgtgggacttgcgctttgcctcctcgcccttgaaggtgctggagagccacagcagggggatcttgtcagtgtcatggagccaggctgatgctgagctgctgctcactagtgctaaggacagccagatcttgtgccggaacctggggagcagtgaggtggtatataagctaccaacacagagcagctggtgctttgatgtgcagtggtgccctcgggacccttcagtgttctctgctgcctccttcaacggctggatcagtttgtactctgtgatgggtaggagctgggaagtccagcatatgagacaggctgacaaggtttgaagggcttggtagagaatgctggagggaaggggctgtctctgtttgtgggagagagacatatggcttgagaagcggagatattggagattgggagaccagggcccggggtttgggagggctgcacctttgccctagtgcccatcttcctgaaaggatgttagtttctgccacaatgtgaagaaggccttcaccttgactcttgttattggatgggccctgtagtatttca

SEQ ID NO: 178265 - DNA, 1952 bp, Homo sapiens
  Payload ID: 15039
  Gene Symbol:
  Gene Name: RP11-411B6.6
  ENST ID: ENST00000529568
  CDS Start-End: 21-500
gaaacgtgaagaaggtgaagatggcggtggccagggccggggtcttgggagtccagtggctgcaaagggcatcccggaacgtgatgccgctgggcgcacggacagcctcccacatgaccaaggacatgttcccggggccctatcctaggaccccagaagaacgggccgccgccgccaagaagtataatatgcgtgtggaagactacgaaccttacccggatgatggcatggggtatggcgactacccgaagctccctgaccgctcacagcatgagagagatccatggtatagctgggaccagccgggcctgaggttgaactggggtgaaccgatgcactggcacctagacatgtacaacaggaaccgtgtggatacatcccccacacctgtttcttggcatgtcatgtgtatgcagctcttcggtttcctggctttcatgatattcatgtgctgggtgggggacgtgtaccctgtctaccagcctgtggatagaccatgaagctgaaggaacttgagcggccagctgtccaggcatggagcccagccagccaataccctttgtatctggccacaggaacatctgcccaacagctagattcctccttcagcacaaatggcacattggaaatatttgaggttgatttcagggacccttctctggacttgaaacacagaggagtcctttctgccttgagcaggtttcacaagctggtctgggggagctttggcagtgggcttctggaaagctccggggttattgttggcggcggggacaatggcatgcttattctatacaatgtgacccacatcctgtcttcggggaaggagcctgtgattgctcagaaacagaagcacacgggggctgtcagagccctcgacttgaatcctttccagggcaacctcctggcttcaggggccagcgattctgaaatcttcatttgggatctgaataacttgaatgtgccaatgaccctgggatccaagtcacagcagcctccagaggacatcaaggcactgtcttggaaccggcaagcccaacacattctgtcttctgctcaccccagtggcaaggcagttgtgtgggatctcaggaagaatgaacctatcatcaaagtcagtgatcacagcaacaggatgcactgctcaggcctggcctggcatcctgacatagccacccagttagtgctgtgctcagaggatgatcgacttcccgtgattcagctgtgggacttgcgctttgcctcctcgcccttgaaggtgctggagagccacagcagggggatcttgtcagtgtcatggagccaggctgatgctgagctgctgctcactagtgctaaggacagccagatcttgtgccggaacctggggagcagtgaggtggtatataagctaccaacacagagcagctggtgctttgatgtgcagtggtgccctcgggacccttcagtgttctctgctgcctccttcaacggctggatcagtttgtactctgtgatgggtaggagctgggaagtccagcatatgagacaggctgacaaggtttgaagggcttggtagagaatgctggagggaaggggctgtctctgtttgtgggagagagacatatggcttgagaagcggagatattggagattgggagaccagggcccggggtttgggagggctgcacctttgccctagtgcccatcttcctgaaaggatgttagtttctgccacaatgtgaagaaggccttcaccttgactcttgttattggatgggccctgtagtatttcagggaccgtgggacccctttgctgggacagttatttcaagagtatgactcttatctttctctcttctatagatccattttgtgccacactccattgtagactttgaatgtagtagtctttccaagagcctacttgcatgggagtcccaccctcgctaccactcacttccccatcccct

SEQ ID NO: 178266 - DNA, 538 bp, Homo sapiens
  Payload ID: 15039
  Gene Symbol:
  Gene Name: RP11-411B6.6
  ENST ID: ENST00000528174
  CDS Start-End: 27-242
agaagggaaacgtgaagaaggtgaagatggcggtggccagggccggggtcttgggagtccagtggctgcaaagggcatcccggaacgtgatgccgctgggcgcacggacagcctcccacatgaccaaggacatgttcccggggccctatcctaggaccccagaagaacgggccgccgccgccaagaagtataatatgcgtgtggaagactacgaaccttacccggatgatggcatggggtgagacagagagggtatggcgactacccgaagctccctgaccgctcacagcatgagagagatccatggtatagctgggaccagccgggcctgaggttgaactggggtgaaccggatagaccatgaagctgaaggaacttgagcggccagctgtccaggcatggagcccagccagccaataccctttgtatctggccacaggaacatctgcccaacagctagattcctccttcagcacaaatggcacattggaaatatttgaggttgatttcagggacccttctctggacttgaaacaca

SEQ ID NO: 178267 - DNA, 582 bp, Homo sapiens
  Payload ID: 15039
  Gene Symbol:
  Gene Name: RP11-411B6.6
  ENST ID: ENST00000533549
  CDS Start-End: 14-229
gaagaaggtgaagatggcggtggccagggccggggtcttgggagtccagtggctgcaaagggcatcccggaacgtgatgccgctgggcgcacggacagcctcccacatgaccaaggacatgttcccggggccctatcctaggaccccagaagaacgggccgccgccgccaagaagtataatatgcgtgtggaagactacgaaccttacccggatgatggcatggggtgagacagagagggtatggcgactacccgaagctccctgaccgctcacagcatgagagagatccatggtatagctgggaccagccgggcctgaggttgaactggggtgaaccgatgcactggcacctagacatgtacaacaggaaccgtgtggatacatcccccacacctgtttcttggcatgtcatgtgtatgcagctcttcggtttcctggctttcatgatattcatgtgctgggtgggggacgtgtaccctgtctaccagcctgtggatagaccatgaagctgaaggaacttgagcggccagctgtccaggcatggagcccagccagccaataccctttgtatctggccacag

SEQ ID NO: 178268 - DNA, 1234 bp, Homo sapiens
  Payload ID: 15039
  Gene Symbol:
  Gene Name: RP11-411B6.6
  ENST ID: ENST00000557395
  CDS Start-End: 31-549
gtgcagaagggaaacgtgaagaaggtgaagatggcggtggccagggccggggtcttgggagtccagtggctgcaaagggcatcccggaacgtgatgccgctgggcgcacggacagcctcccacatgaccaaggacatgttcccggggccctatcctaggaccccagaagaacgggccgccgccgccaagaagtataatatgcgtgtggaagactacgaaccttacccggatgatggcatggggtatggcgactacccgaagctccctgaccgctcacagcatgagagagatccatggtatagctgggaccagccgggcctgaggttgaactggggtgaaccgatgcactggcacctagacatgtacaacaggaaccgtgtggatacatcccccacacctgtttcttggcatgtcatgtgtatgcagctcttcggtttcctggctttcatgatattcatgtgctgggtgggggacgtgtaccctgtctaccagcctgtgtgtaggcaccacttctcttacaatttaggctttctctctgccttgggctgagtgaggaagaggagtgctgttcctgccttcctagcccagctgggtctgaccagaggctactgtgtacccatttaccatgcgtgattgttaactcagagtggggtgtagccaggatagaccatgaagctgaaggaacttgagcggccagctgtccaggcatggagcccagccagccaataccctttgtatctggccacaggaacatctgcccaacagctagattcctccttcagcacaaatggcacattggaaatatttgaggttgatttcagggacccttctctggacttgaaacacagaggagtcctttctgccttgagcagggcaacctcctggcttcaggggccagcgattctgaaatcttcatttgggatctgaataacttgaatgtgccaatgaccctgggatccaagtcacagcagcctccagaggacatcaaggcactgtcttggaaccggcaagcccaacacattctgtcttctgctcaccccagtggcaaggcagttgtgtgggatctcaggaagaatgaacctatcatcaaagtcagtgatcacagcaacaggatgcactgctcaggcctggcctggcatcctgacatagccacccagttagtgctgtgctcagaggatgatcgacttcccgtgattcagctgtgggacttgcgctttgcctcctcgcccttgaa

SEQ ID NO: 178269 - DNA, 744 bp, Homo sapiens
  Payload ID: 15040
  Gene Symbol:
  Gene Name: RP11-426L16.10
  ENST ID: ENST00000605933
  CDS Start-End: 1-744
tgaattcacccaccttgagttcccccgcagagttctgcccaaggagctggggcagaggatgttgtaccgggaccagaacatgaccggctgggcctacaaaaagatcgagctggaggatctcaggtttcctctggtctgtggggagggcaaaaaggctcgggtgatggccaccattggggtgacccgaggcttgggagaccacagccttaaggtctgcagttccaccctgcccatcaagccctttctctcctgcttccctgaggtacgagtgtatgacctgacacaatatgagcactgcccagatgatgtgctagtcctgggaacagatggcctgtgggatgtcactactgactgtgaggtagctgccactgtggacagggtgctgtcggcctatgagcctaatgaccacagcagccccaccatggctgcaatccgaaagaagctggtgatcgttggggatggtgcctgtgggaagacctgcctcctcatcgtcttcagcaaggatcagtttccggaggtctacgtccctactgtctttgagaactatattgcggacattgaggtggacggcaagcaggtggagctggctctgtgggacacagcagggcaggaagactatgatcgactgcggcctctctcctacccggacactgatgtcatcctcatgtgcttctccatcgacagccctgacagcctggaaaacattcctgagaagtggaccccagaggtgaagcacttctgccc

SEQ ID NO: 178270 - DNA, 680 bp, Homo sapiens
  Payload ID: 15040
  Gene Symbol:
  Gene Name: RP11-426L16.10
  ENST ID: ENST00000606954
  CDS Start-End: 1-100
tgaattcacccaccttgagttcccccgcagagttctgcccaaggagctggggcagaggatgttgtaccgggaccagaacatgaccggctggctcgggtgatggccaccattggggtgacccgaggcttgggagaccacagccttaaggtctgcagttccaccctgcccatcaagccctttctctcctgcttccctgaggtacgagtgtatgacctgacacaatatgagcactgcccagatgatgtgctagtcctgggaacagatggcctgtgggatgtcactactgactgtgaggtagctgccactgtggacagggtgctgtcggcctatgagcctaatgaccacagcagccccaccatggctgcaatccgaaagaagctggtgatcgttggggatggtgcctgtgggaagacctgcctcctcatcgtcttcagcaaggatcagtttccggaggtctacgtccctactgtctttgagaactatattgcggacattgaggtggacggcaagcaggtggagctggctctgtgggacacagcagggcaggaagactatgatcgactgcggcctctctcctacccggacactgatgtcatcctcatgtgcttctccatcgacagccctgacagcctggaaaacattcctgagaagtggaccccagaggtgaagcacttctgccc

SEQ ID NO: 178271 - DNA, 813 bp, Homo sapiens
  Payload ID: 15040
  Gene Symbol:
  Gene Name: RP11-426L16.10
  ENST ID: ENST00000606505
  CDS Start-End: 1-813
tgaattcacccaccttgagttcccccgcagagttctgcccaaggagctggggcagaggatgttgtaccgggaccagaacatgaccggctgggcctacaaaaagatcgagctggaggatctcaggtttcctctggtctgtggggagggcaaaaaggctcgggtgatggccaccattggggtgacccgaggcttgggagaccacagccttaaggtctgcagttccaccctgcccatcaagccctttctctcctgcttccctgaggtacgagtgtatgacctgacacaatatgagcactgcccagatgatgtgctagtcctgggaacagatggcctgtgggatgtcactactgactgtgaggtagctgccactgtggacagggtgctgtcggcctatgagcctaatgaccacagcagccttgacttcatctcagctccagagcccgccctctcttcctgcagcctgggaacttcagccggctggagccccaccatggctgcaatccgaaagaagctggtgatcgttggggatggtgcctgtgggaagacctgcctcctcatcgtcttcagcaaggatcagtttccggaggtctacgtccctactgtctttgagaactatattgcggacattgaggtggacggcaagcaggtggagctggctctgtgggacacagcagggcaggaagactatgatcgactgcggcctctctcctacccggacactgatgtcatcctcatgtgcttctccatcgacagccctgacagcctggaaaacattcctgagaagtggaccccagaggtgaagcacttctgccc

SEQ ID NO: 178272 - DNA, 3360 bp, Homo sapiens
  Payload ID: 15041
  Gene Symbol:
  Gene Name: RP11-432B6.3
  ENST ID: ENST00000483754
  CDS Start-End: 187-3033
agcccttcggggcagaggagggcggggactcggggcggctctcagcatccgcctggagctcgtggcgctgtgtttccgtgctgtggagttgcctggtccgcttcctccccgcgaataagaataaaagattctggaggagttggagaagagtgtattcagcccccaaaccacgagatcaacaaagaaatgcacaattttgaggaagagttaacttgtcccatatgttatagtatttttgaagatcctcgtgtactgccatgctctcatacattttgtagaaattgtttggaaaacattcttcaggcatctggtaacttttatatatggagacctttacgaattccactcaagtgccctaattgcagaagtattactgaaattgctccaactggcattgaatctttacctgttaattttgcactaagggctattattgaaaagtaccagcaagaagaccatccagatattgtcacctgccctgaacattacaggcaaccattaaatgtttactgtctattagataaaaaattagtttgtggtcattgccttaccataggtcaacatcatggtcatcctatagatgaccttcaaagtgcctatttgaaagaaaaggacactcctcaaaaactgcttgaacagttgactgacacacactggacagatcttacccatcttattgaaaagctgaaagaacaaaaatctcattctgagaaaatgatccaaggcgataaggaagctgttctccagtattttaaggagcttaatgatacattagaacagaaaaaaaaaagtttcctaacggctctctgtgatgttggcaatctaattaatcaagaatatactccacaaattgaaagaatgaaggaaatacgagagcagcagcttgaattaatggcactgacaatatctttacaagaagagtctccacttaaatttcttgaaaaagttgatgatgtacgccagcatgtacagatcttgaaacaaagaccacttcctgaggttcaacccgttgaaatttatcctcgagtaagcaaaatattgaaagaagaatggagcagaacagaaattggacaaattaagaacgttctcattcccaaaatgaaaatttctccaaaaaggatgtcatgttcctggcctggaacaccagtgtattcagtagcgtggggccctgattcagaaaaggttctttatacagcaggcaagcagctaatcattaaacctcttcaaccaaatgctaaagttttgcagtggaaagctcatgatggcattattttaaaagtagattggaactcggtcaatgatcttattttatctgctggtgaagactgtaaatataaggtatgggatagttacggccgcccactgtacaattcacaacctcatgagcatcccattacttcagttgcctgggctccagatggagaattatttgctgttggatcgtttcatactttacgcttgtgtgataaaactgggtggtcatatgcattagaaaaacccaacactggcagcatatttaatattgcatggtctatcgatggcactcagattgctggagcctgtggaaatggacatgtcgtttttgcacatgtggtggaacaacattgggagtggaaaaattttcaagtaacattaacgaaaagaagagccatgcaggttcgtaatgttcttaatgatgcagtggatttactggaattccgtgatagagtcattaaagcatctttgaactatgcacacttagttgtttcaacgtctcttcaatgttacgtgttctccacgaagaactggaacacaccaattatatttgatctcaaagaaggaactgttagtttgattctgcaggcagaaagacattttcttcttgtagatggtagtagtatctatttatattcatatgaagggcgctttatttcatctccaaaatttcctggaatgagaacagatattctgaatgcacagactgtgtctttgagtaatgataccatagcaataagagacaaagctgatgaaaaaataatcttcctctttgaggcatcaaccggaaagccgttaggtgatggaaagtttctttctcataagaatgaaatcttggaaattgctctggatcaaaaaggacttaccaatgatagaaaaattgctttcattgataaaaatagagatctctgtatcacttctgtgaaacgatttgggaaggaagaacaaattatcaagcttggaacaatggtgcatactttggcatggaacgatacatgcaatatcctttgtggacttcaagatactcgatttatagtgtggtattaccccaatacagtttatgtggacagagacattttgcctaaaacattatatgaaagggatgcaagtgaatttagtaaaaatccccatattgtgagttttgttggaaatcaagtaactattagaagagctgatggctccctggttcacatcagcataacaccatatcctgctattctccatgaatatgtaagcagttcaaaatgggaagatgctgtgagactttgtcgctttgttaaggagcaaaccatgtgggcttgtctagctgctatggcagttgctaatcgagatatgactactgcagaaatagcctatgcagcaattggtgaaattgataaggttcagtacatcaattctataaaaaatcttccatctaaagaatcaaaaatggcccacatactactgtttagtgggaacatacaggaggctgaaatagtacttcttcaggctggccttgtttatcaagcaatccagatcaatattaatctctacaactgggaaagggcactggaattggctgtaaaatacaaaacacatgttgatacagttcttgcttaccgtcaaaagtttttggagacatttggtaaacaggaaactaataaacgatacttgcattatgcagaaggtctccaaatagattgggagaaaatcaaagccaaaattgagatggaaattacaaaagaaagagagcaatcatcaagcagccaatccagcaagagtataggtttaaagccctaaatgccatgcgtatctttaagaaattttatcttttgaaacacgttctgattaaccaaggggcgtgtcacagaacaggaaactgatacaatgacacttgtttcttaagagaagctgattgaatcctgtagcacattactgcacaattaatggctttaaacgagttacaagtcgtaagttcttatgttttggatcatgttgtggaatgtattccaaatgaaaaatggaggagaaagtgcacaacatcatatgcttcatggtatggcatatacatgtcaattatttttacatataactgtgatgaatgatacaattaaaagctatactaca

SEQ ID NO: 178273 - DNA, 653 bp, Homo sapiens
  Payload ID: 15042
  Gene Symbol:
  Gene Name: RP11-434D12.1
  ENST ID: ENST00000608606
  CDS Start-End: 1-400
gggcccagctcacgtggtcactgtgattgcccggcagcggggtgaccagctagtcccattctccaccaagtctggggataccttactgctcctgcaccacggggacttctcagcagaggaggtgtttcatagagaactaaggagcaactccatgaagacctggggcctgcgggcagctggctggatggccatgttcatgggcctcaaccttatgacacggatcctctacaccttggctttttttaggcttctgtcaccacaaaatgttacttggaaaactagatcccagcagatgacctgtacttctctgctctctcccctactgcaaagaggcagtgagggcagcattagtaagcctgactcaggggaaggtaagtggcctgcagagaaatggtcctaggtccgcaaccgaggcgagtgaacttgtcggacagatgaagactctaactggaagaaacgatcagcgcattcacggatgcaccaccatccagaaatctcccggtggcttccatacaaaaactgatgtttctaaagatggaaagaacaggtctaggaggcagaagagtatctcctagcaaagtgttctgtagctcaaagggcagtcaggagcacgtctttgaattcctcgcagacgatgtatccatcagtcctgt

SEQ ID NO: 178274 - DNA, 1721 bp, Homo sapiens
  Payload ID: 15043
  Gene Symbol:
  Gene Name: RP11-435I10.4
  ENST ID: ENST00000568224
  CDS Start-End: 337-1419
cctcagggtccctgctgtagacggggcgggggagagtacgatgggtggggcgtggtgggtcgtagggcgctcgagatggagcccccagcttccttgatggatcgcggggcgcgagtgccctagacaagccggagctgggaccggcaatcgggcgttgatccttgtcacctgtcgcagaccctcatccctcccgtgggagccccctttggacactctatgaccctggaccctcgggggacctgaacttgatgcgatgggaggctgtgcaggctcgcggcggcgcttttcggattccgagggctgctgggcctttgcaacaacttctcttatgtggtgatgctgagtgccgcccacgacatccttagccacaagaggacatcgggaaaccagagccatgctgtgctcctggcggacatcctccccacactcgtcatcaaattgttggctcctcttggccttcacctgctgccctacagcccccgggttctcgtcagtgggatttgtgctgctggaagcttcgtcctggttgccttttctcattctgtggggaccagcctgtgtggtgtggtcttcgctagcatctcatcaggccttggggaggtcaccttcctctccctcactgccttctaccccagggccgtgatctcctggtggtcctcagggactgggggagctgggctgctgggggccctgtcctacctgggcctcacccaggccggcctctcccctcagcagaccctgctgtccatgctgggtatccctgccctgctgctggccagctatttcttgttgctcacatctcctgaggcccaggaccctggaggggaagaagaagcagagagcgcagcccggcagcccctcataagaaccgaggccccggagtcgaagccaggctccagctccagcctctcccttcgggaaaggtggacagtgttcaagggtctgctgtggtacattgttcccttggtcgtagtttactttgccgagtatttcattaaccagggactttttgaactcctctttttctggaacacttccctgagtcacgctcagcaataccgctggtaccagatgctgtaccaggctggcgtctttgcctcccgctcttctctccgctgctgtcgcatccgtttcacctgggccctggccctgctgcagtgcctcaacctggtgttcctgctggcagacgtgtggttcggctttctgccaagcatctacctcgtcttcctgatcattctgtatgaggggctcctgggaggcgcagcctacgtgaacaccttccacaacatcgccctggagaccagtgatgagcaccgggagtttgcaatggcggccacctgcatctctgacacactggggatctccctgtcggggctcctggctttgcctctgcatgacttcctctgccagctctcctgatactcgggatcctcaggacgcaggtcacattcacctgtgggcagagggacaggttatcaatagtctggctgtctatcgtcatcgtgagactgactttggtgtaggagttcgagaccaccctggccaacatggcaaaaccccatctccacaaaaattggataatttgataattatcattattgggtttctgagacgttacacatttaacgttctcttctgcacaagttgcctttgtgtgagtatactaactttctgtagaggtatacttgtaatcacaaataagaataaattatataaaacaa

SEQ ID NO: 178275 - DNA, 808 bp, Homo sapiens
  Payload ID: 15044
  Gene Symbol:
  Gene Name: RP11-437B10.1
  ENST ID: ENST00000629685
  CDS Start-End: 428-808
agagcccgcgggcggcaggtgggcggggggcagcctcgtcgccgggactggatccgccgggaaaggggcggcgggtgaatgccggcgagagcccgaaggggatcgggcgtggagagcccctttctgtcctggtgacttaagagattaaaattaatttggttgctgttggttctgaacaaataatgagttcttttatttgaggtatgccattttgaagactgagacgttggagttttatcctagaggataaaggaaatctttgggaaagtcagtattttatatagcaaaaatatgaacctcaaactgaatcctctaaaggccccatacaatgaagtagacattggtggaaacatttataaatacctgggcacaggacttcaaagcaaacacagattccccctcccccttaatatttaagaattaaaagatgatgagaaataaggacaaaagccaagaggaggacagttcgctacacagcaatgcatcgagtcactcagcctctgaagaagcttcgggttcagactcaggcagtcagtcggaaagtgagcagggaagtgatccaggaagtggacatggcagcgagtcgaacagcagctctgaatcttctgagagtcagtcggaatctgagagcgaatcagcaggttccaaatcccagccagtcctcccagaagccaaagagaagccagcctctaagaaggaacggatagctgatgtgaagaagatgtgggaagaatatcctgatgtttatggggtcaggcggtcaaaccgaagcagacaagaaccatcgcgatttaatattaaggaagag

SEQ ID NO: 178276 - DNA, 2831 bp, Homo sapiens
  Payload ID: 15045
  Gene Symbol:
  Gene Name: RP11-438J1.1
  ENST ID: ENST00000450534
  CDS Start-End: 1-336
cagaaggaggacgatgtggcttgctcgcggaggttatcctggggctcatcccgccgcagaaataactcctcctcctccttctccccacatttcttgggccctggtgtgggcggggccgcctccaaaggctgcctgattcggaacactcgggggttcctgtcttcagggggatcccctctgcgtcctgccaacgcctctttggaagaaatggcttctctagaggaggaagcctgcagccttaagctgaagctgagggtcagaatgatacaattgaggaacccaacaaggtccagaaaaggaagagggatagacttcgagaccagggctccacaatgatctacctgaaggctatccagggcatcctggggaaatcgatgccaaaaaggaagggagaggctgccactcgggcaaaaccaagcgcagcagagcatcccagccatggagaaggaccagccaggagtgaaggaccagccaagactgcagaaggagcagccaggagtgtcacagtcactgctgctcagaaggagaaagacgcaaccccagaggtcagcatggaggaggataagacagtgccagagaggagcagcttctatgacaggagagtagttatagaccctcaagagaaacccagtgaggagccccttggggaccgaaggactgtcattgacaaatgctctccacccctagagttcttggatgactctgactctcatttagaaatccaaaagcataaagatagggaggtggtgatggagcacccctcttctggaagtgactggtctgatgttgaggagatctccacagtcagattctctcaggaggaacctgtctccctgaaaccttcagccgttccggagccttcttccttcaccaccgactatgtcatgtaccctcctcatttgtacagtagtccttggtgtgactacgccagctattggaccagcagccccaagccttctagctacccctccacaggcagcagcagcaacgatgcagcccaggttgggaagagcagccggagccgcatgagtgattattcccccaactctacagggagtgtccaaaacacctccagagacatggaggcctcagaggaaggctggtcccagaattctcgttcatttcgcttctccagaagctcagaagaaagagaggtgaaggagaaaagaacattccaagaggagatgcctccgcgtccttgtggaggacacgcatccagctccctgccaaagagccacctggagccaagcctagaggagggcttcattgacactcattgtcacctggacatgctctattccaagctatctttccaagggacctttacaaagttcagaaaaatttacagcagctccttccctaaggaatttcagggctgcatctctgacttctgtgatccccgcaccctgacagattgcctatgggaggagctgttgaaagaggatctggtctggggggcctttggctgtcaccctcattttgcacgttactacagtgagagtcaagaaagaaatcttttgcaagccttaaggcaccctaaggctgtggcatttggagaaatgggcttggattactcttacaagtgcaccacgcctgtcccagaacagcacaaggtatttgagagacagctgcagctggctgtgtctctaaagaagcccttggtgatccactgccgagaagctgatgaagatctgctagaaatcatgaaaaagtttgtgccccctgactacaagatccataggcattgcttcaccggcagctacccggtcattgagcccctgctgaagtactttcccaacatgtctgtgggcttcacggcagtgctgacatactcctctgcctgggaggcccgggaagccttgaggcagatcccactggagagaatcatcgtggaaacggatgctccctatttcctccctcgccaggttcccaaaagcctttgccagtatgcccacccgggcctggccttgcatacggtccgagagattgccagagtcaaagatcagccactctccctcaccttggctgccttgcgtgagaacaccagtcgcctctacagtctttaagcagagaagggcgaccagcagcctgacagaacacaggctggcttgaagtctgtgtctcaggtcgaggatgtgtttagagagctgattggaacacagaaaaccaggacaggatgttttcctccaagcgggtcataaggcttcagcttctgggtggtgggtggggtggggtgggcatggaatgaggggtatggggactgcctgtaatagcactgggattttgcctcccagccaaaatgctccagggtaggcagcaaagaagaaagagtgcgatatgagggtacagtgagtttggcagtccaaattctgttctctgcagcctgtttttgagtagttggtgaataaagtcacccgcctacttgtctaagcacatgtgggtgtgtaactcagttcctggttctcggttctaaaaacagacttccaactgggaaactttttgggggaaattaactggacacctatctcggaggtttattttcttgcaaccagtgaagtcgtcctcctcccttccctggataactcttcagtttgactgtcactgttctggtgtcaactccagcgtcggcacaggcagaaggacttcagctgctggtctcattggttccactgccattgatatgggggggtgcagaggagcactcattgtccatgatggagatccaggacagactgggggactccgggaagaggctttcttggggaagaggaccccaaaggagcatacagtttgaacatttattcgcctcctgagcttgtacaacagtcgtg

SEQ ID NO: 178277 - DNA, 2270 bp, Homo sapiens
  Payload ID: 15045
  Gene Symbol:
  Gene Name: RP11-438J1.1
  ENST ID: ENST00000437082
  CDS Start-End: 1-1998
cagaaggaggacgatgtggcttgctcgcggaggttatcctggggctcatcccgccgcagaaataactcctcctcctccttctccccacatttcttgggccctggtgtgggcggggccgcctccaaaggctgcctgattcggaacactcgggggttcctgtcttcagggggatcccctctgcgtcctgccaacgcctctttggaagaaatggcttctctagaggaggaagcctgcagccttaaggttgattccaaagatagttctcataactccacaaactctgaatttgcagctgaagctgagggtcagaatgatacaattgaggaacccaacaaggtccagaaaaggaagagggatagacttcgagaccagggctccacaatgatctacctgaaggctatccagggcatcctggggaaatcgatgccaaaaaggaagggagaggctgccactcgggcaaaaccaagcgcagcagagcatcccagccatggagaaggaccagccaggagtgaaggaccagccaagactgcagaaggagcagccaggagtgtcacagtcactgctgctcagaaggagaaagacgcaaccccagaggtcagcatggaggaggataagacagtgccagagaggagcagcttctatgacaggagagtagttatagaccctcaagagaaacccagtgaggagccccttggggaccgaaggactgtcattgacaaatgctctccacccctagagttcttggatgactctgactctcatttagaaatccaaaagcataaagatagggaggtggtgatggagcacccctcttctggaagtgactggtctgatgttgaggagatctccacagtcagattctctcaggaggaacctgtctccctgaaaccttcagccgttccggagccttcttccttcaccaccgactatgtcatgtaccctcctcatttgtacagtagtccttggtgtgactacgccagctattggaccagcagccccaagccttctagctacccctccacaggcagcagcagcaacgatgcagcccaggttgggaagagcagccggagccgcatgagtgattattcccccaactctacagggagtgtccaaaacacctccagagacatggaggcctcagaggaaggctggtcccagaattctcgttcatttcgcttctccagaagctcagaagaaagagaggtgaaggagaaaagaacattccaagaggagatgcctccgcgtccttgtggaggacacgcatccagctccctgccaaagagccacctggagccaagcctagaggagggcttcattgacactcattgtcacctggacatgctctattccaagctatctttccaagggacctttacaaagttcagaaaaatttacagcagctccttccctaaggaatttcagggctgcatctctgacttctgtgatccccgcaccctgacagattgcctatgggaggagctgttgaaagaggatctggtctggggggcctttggctgtcaccctcattttgcacgttactacagtgagagtcaagaaagaaatcttttgcaagccttaaggcaccctaaggctgtggcatttggagaaatgggcttggattactcttacaagtgcaccacgcctgtcccagaacagcacaaggtatttgagagacagctgcagctggctgtgtctctaaagaagcccttggtgatccactgccgagaagctgatgaagatctgctagaaatcatgaaaaagtttgtgccccctgactacaagatccataggcattgcttcaccggcagctacccggtcattgagcccctgctgaagtactttcccaacatgtctgtgggcttcacggcagtgctgacatactcctctgcctgggaggcccgggaagccttgaggcagatcccactggagagaatcatcgtggaaacggatgctccctatttcctccctcgccaggcagtgcaaagccctaccctgtagagggtagtccaaggaagcgtgggaccctgctcacccagagcccccatgactaggactctccctgcacctgcaggttcccaaaagcctttgccagtatgcccacccgggcctggccttgcatacggtccgagagattgccagagtcaaagatcagccactctccctcaccttggctgccttgcgtgagaacaccagtcgcctctacagtctttaagcagagaagcatacagtttgaacatttattcgcctcctgagcttgtacaacagtcgtg

SEQ ID NO: 178278 - DNA, 3513 bp, Homo sapiens
  Payload ID: 15046
  Gene Symbol:
  Gene Name: RP11-444E17.6
  ENST ID: ENST00000505802
  CDS Start-End: 1-406
gcgcctcaccttcagcagcgcctaccagggcaacagcctcatgtaccatgacagcccctgctccaacggctatgtctacatccccctggccttcctgctcatgttgtacgccgtctacctggtggagtgttggcactgccaagcccgccatgagctgcagcaccgtgttgatgtgagcagtgtgcgggaacgtgtgggccgcatgcagcaagccacgccctgcatctggtggaaggccatcagctaccactatgtccgccgcacccgccaggtcaccagataccgcaatggagacgcctataccaccacccaggtaccaggctgcctaggaagccaggtggtgcctttaagatctccatggagaaacgcacagctcgacgcaggatccgacgaagaaccagcctaaaggggttcagagcccagacatgaatccccagcggctcatgcccttccagactcacgggggacctgacatcccagggaagatgccatcagagatgcagacactgagtgtgcggatgtggtcagccaccacgcggtacgctgtgtctgtgcgcccctcgtctgccacccctactcggcccaagtaagggggtgccctgcagccctgggaagcagaagagtcagccagtggccctgcctgacctggcccaggtgggtgctctttatcgcctctagagcatctgccctcagccctaaagccaaccacatccagaatggccttgccagtccagtcctgggctgagaagcctcacagatgagcacaagccaggccctgccctcacggggctcatatttggtgctacaagtgaacatatctgtgaccatttactgaatttctactatcagaactgggtgctaattgcagtgattttctggaatctaagggatgttttgccaacacaacaccctctggcaaaagtgtcagttcctcatcttctgtggaaacaggcccaagtgtcagtgagcctcctggcctccccagagtgtctgcttacgtagacaccactgctgacttggatcggaaactctccttctcacattctgatcactcctctgaaatgtcgttgcctgaagtccaaaaggataaatatcctgaggaattcagcctgcttaagttgcagacgaaagatgggcatcgtcctgagtggacattttacccaaggtttagcagcaacatccacacctaccacgtcggaaagcagtgcttctttaatggagtcttcctcggcaacaagaggtctctatcagagaggacggtggacaagtgctttgggagaaagaaatacgatattgatcccaggaatggaatcccaaagttaactccaggcgacaatccatatatgtacccagaacagagtaaaggcttccacaaagcaggatcaatgctcccaccagtgaatttttcaatagtgccttatgaaaagaaatttgatacatttattccacttgagcctcttccacaaattcccaacttgcctttctgggtgaaggagaaggccaacagtttgaaaaatgagatacaagaggttgaggagcttgacaactggcagccagcagtgcccttaatgcacatgctacacctttctggtgctttggactttccaagacaatcctgagcataaacaggcccacaaaacatgtgctgactgcactctggcgacccttttccagttgatgttttttgtcatgtgactgttctaaatccagtgtttgacccttatgaggaagtgttgtgctttgcttttttaaaactttatattttgaaaactttcacatttacataaaagttgcaagaattgtacaacaaacacctgcatatccttcacatagattctatcattgttaatatttgttcaaactttctctctctcacaatattacagttaccattttgctgaactctttgagagtgagtggcagatattgtaaccctttacacctgtatacctacatacctcagcatgtatcttctaaggtcaaggatgttgtctaacaaccacaacacaaataccaaactcacagaatttaacactgataaaatattattaacatttagtccacattcaattttagtcaattatatttagttttctaaggatgccctcaaatcaatcataaaatacagacatgatgtgagtgtcttagcctgttcaggctgctataacaaaacgccataaacagaatggcttataaacaataggaattcatttcttacagttctggaggctgggaagtccaagcgcagggtgctggcaggttcagtgtctgctgagggccagccttctggctcatagatagtaccttcttgctgtgtcctcatatgatagaaagggtgagctagtcctctggggtctcttttacaagggcactaatctcattcatgagggctctggtctcatgacctaatcgcctcccaatggccttacctcctaataccatcaccttggggattaggtttcgacatatgcattttggggtggggaggacaaacatttagaccatagcagtgaactttcattgcttttggtaaaacttttcattttattaataccttttggaatgtttctctaatgttaacttggtacatgtcagaaaaacatgaaggctggatctataccaggtaagtaatactattgccctgtagctgcattccccagtttagtattgcctatctacaatagccaagcagggtgagagctcagtgaccaccagtcatgagttttagggcctcctgtcaatcagacaagaagcaaacatttggaggaaaaggtgaaaacaaaagctgcctcacaggctttgacacagtcaaactagtgactcacggcatttttacagccaatctctttctccactagggaacccccttggctggctaatgaaggctgcagatctagtatctccaaaaccttaaagtggaaagagattggggtccatgctgagactccacatgtctatgacatgagcatgatttatttcccaaaatgtttgttgtctccagtcacagccaaagtgaatgaagcaggtttagaacacgatacatttagccaggtgtggtggctcatgcctgtaatcccagcacttttggaggccgaggcaggcgaatcacttgaggtcaggagttcgagaccagcctggtcaacatggcgaaacctgtctctactaaaatcacaaaaattagccaggcaagatggtgggcacctgtaatccctggtactcgggaggctgaggcaggagaatctcttgaacccaggaggcagaggttgcagtgagccaagaccatgccattgcactccagcctgggcgacaagagcgaaactccatcccaaaaacaaagaagcaaacaaaaaccacaatgcattcatggcaccttcatatgtgcctctagactaactggcagagagcatggtgccgactgccagctgctgtgcctgaccactccttgggttaacatcagcatacatccgtgctaatcctctggcccctgggtcacaggcccacccctgctcccaa

SEQ ID NO: 178279 - DNA, 2382 bp, Homo sapiens
  Payload ID: 15047
  Gene Symbol:
  Gene Name: RP11-446E24.4
  ENST ID: ENST00000311841
  CDS Start-End: 321-533
attttcttataggtgatacctgctaagcgctccccgcctacccagagactgggaggaacctggaaaatcctcacgtgaggtgaagcgcaggcgagtagggccagacatggtggctcatgcctgtaatctcagcactttgggagactgagatgagaagatcacttgaggccaggagttcgagaccagactggcaacatagtgagaccctgtctctacaaaatgctggccaaggagcagggcctgcgcccgtggtctcatagagcctggcctgttctggaagagcacccagttgttccttctaggctgcccaagccccactgatgatggctgagagggaagaggacgacgacactgaggaagcctggatgcagctacggcccacagaacccttgccttcccagtgctgcggcagtggctgctcaccctgtgtgtttgacctctatcaccgagatctggcaaggtgggaggcagcccaagccagcaaggacaggagcctgctgcgtgggccagagtcacagagggatagtagatgacttagaaattcagagagcctatacgcccatcagccctgccaacgcagaaggatactttgaagtgttaattaagtgctaccagatggggctgatgtcccggtatgttgagtcctggagagtaggagacacagctttctggcgaggacctttcggagatttcttctataaaccaaaccaggcctgagttccttcccttcctgatagtgtggtcggtgcagatctcagaacgtgtaaacctggtgacaccagatccgtcactttacacctcacctctctttcccttgctccggaccctgagatcctggcctacctgagctcggcagacctgtgggggcccctggtgaggagatgctggcagagtggggggcttgcctgctgctggcagtggcactgctgggcccagggctccaggcccaagccatggaaggtgtcaaatgtgggggtgtgctctcagcaccttctggaaacttctccagccccaacttccctagactgtacccctacaacacagagtgcagctggctgatcgtggtggccgagggatcctcggtgctgctcaccttccatgcctttgacctagagtaccacgacacctgcagcttcgactttctggagatctacaatggggcctcaccagacaagggcaacctgctggggaggttctgcggcaaggtgcccccgccgcccttcacctcctcctggcatgtcatgtctgtcatcttccactcggacaagcatgtggccagccatggcttttctgcgggctaccagaaaggtcaacggggggccttagggacctgttgcagtggctcacacctgtaatcctggtgctttggcaagccaaagtgggaggattacttgatcccaggagttcaaggggggatttggcagtggaggagctggccctggggtggagatgggaagatagcagcagggctcaggtgagacctacagggtctcagcatcttggcacgtaggctgctctgtaacctgcaggacccagctctcatgcatagtttataaggcaaaagcagcctcctcactgttcatgaccatgcttgtagctggggttcccaccttcatggcaatgctccccatgccgcctccgtttctcctagagtcgtcagagggtcgcactgcgctcaggaatgaggctctcatgctctactacccttgtcattcttgtcctgtgtcatggcataaggccacaggagaggacaccactgctgttggggccttctgcagcatcccaccacttcacggcttgggaatccttgcctgagttcccacacgagggtctgggtggagctagtggctgttatatcatgtgtccctaacccctctctccttcaaccaggcttgacacctgcctctcagtctagtgagggagaggaggccttgttcttcttgcctttctctttcactcactcatccttgtctccaggttctgtgcaaaggctcaaatctcctgcttcctcccaatgccagaaccaaagacctcactgatgttaactcaaacagtagacacccacagaggctactggttcccagggtccgccaacagcaatcctgggggactcaggtgggaccccagtcactgctgcatttggaaggatagaattgtagaatgccacaacacaagaaccataggctgatctaatcatagttttggaattttagacccttagatttgtagaatgttaggatatcaaagtcttaataccatcagccacatttcctaacatttttaaaaacaggaatacctttatgtcaaatggaaccttatgttaatcccctatatttaaaaaaaaaaaaaaagataaaggcaataaaaaataaaggcaatgtt

SEQ ID NO: 178280 - DNA, 708 bp, Homo sapiens
  Payload ID: 15048
  Gene Symbol:
  Gene Name: RP11-447L10.1
  ENST ID: ENST00000431391
  CDS Start-End: 71-391
ctgctgccggccgcgaccgcaacccgctaggccttcatcgcgagctacgcccggaccgagaagccccggcatggccacgtccatcggagtgtccttctcggtgggcgacggggtgcctgaggctgagaagaacgcaggggagcccgagaacacctatattctgcggcctgttttccagcagaggttcaggccctctgtggttaaagactgtatccatgctgtgctcaaggaggaactggcaaatgctgaatattctccagaagaaatgcctcagcttacaaaacatttatcagaaaacattaaagataaattaaaagaaatgggatttgaccgatacaaaatggtggtgcaagtagtgattggagaacaaagaggtgaaggagtattttaaaagaagatggatgcacagtgttcagccaaggtcaatgcaaggaagaggagaaaagaggcgcccggacccaacggggcaacagaagaagatggggttccttccaaagtgcagcgctgtgcagtgggcttacggcaaccagctcctttttctgatgaaattgaagttgactttagtaagccctatgtcagggtaactatggaagaagccagcagaggaactccttgtgagcgacctgtgagagtttatgccgatggaatatttgacttatttcactctggtcacgcccgagctctgatgcaagcgaagaaccttttccc

SEQ ID NO: 178281 - DNA, 3311 bp, Homo sapiens
  Payload ID: 15049
  Gene Symbol:
  Gene Name: RP11-449H3.3
  ENST ID: ENST00000506502
  CDS Start-End: 217-3300
actgtctcccgcccacctcagccttcgggctaggttgagtgagggctcttgggttagttcctgttaggccccggccgggggagtaggttgaagtctcctaagatgcccggtgggctggggcaccgggagctgtgaagggaacgtgagggggcggcgtagtggagacccacggcaggcctgaagaagagcggcggccgagcccgccttccctgcaccatgctcatagaggatgtggatgccctcaagtcctggctggccaagttactggagccgatatgtgatgctgatccttcagccttagccaactatgttgtagcactggtcaagaaggacaaacctgagaaagaattaaaagccttttgtgctgatcaacttgatgtctttttacaaaaagaaacttcaggttttgtggacaaactatttgaaagtctctatactaagaactaccttccacttttggaaccagtaaagcctgagccaaaaccactagtccaagaaaaagaagaaattaaagaagaggtatttcaggagccagcagaggaagaacgagatggcagaaaaaagaaatatcctagtccccagaagactcgttcagaatctagtgaacgaaggacacgtgagaaaaaaagagaagacgggaaatggagagactatgaccggtactatgagcggaatgaattgtaccgtgagaagtatgactggagaagaggcaggagtaagagtcggagtaagagtcgaggcctgagtcgcagtagaagccgaagtagggggcgcagcaaagaccgggatccaaataggaatgttgagcacagggaaagatcgaagtttaagagtgaaaggaatgacctggagagttcctatgtgcctgtgtctgcaccacctccaaactcttctgagcagtattcctctggggcacagtctattcccagcactgttactgtgatcgcacctgctcaccactctgaaaacacaactgagagttggtctaattactataacaatcatagctcttccaattcttttggtcgaaacctaccaccaaagaggcgatgcagagattatgatgaaagaggattttgtgtacttggtgacctttgtcagtttgatcatggaaatgatcccctagttgttgatgaagttgctctgccaagtatgattcctttcccaccccctcctcctgggcttcctcctccaccacctcctggaatgttaatgcctccaatgccaggtccaggcccaggcccgggcccaggtccaggcccaggcccgggcccaggtccaggtcctggccatagtatgagacttcctgttccccaaggacatggtcagcctccaccatccgttgtgcttcccataccaagaccacctataacacaatcaagcttgataaacagccgtgaccagcctgggacaagtgcagtgcccaatcttgcatcagtgggaacaagactacctcctcctttaccccagaacctcctttacacagtatcagaacatacatatgaaccagatggttacaacccagaagctcctagtattactagttctggtagatctcagtacagacagttcttttcaagaactcagacacagcgtcccaatctgattggcctaacatctggagatatggatgtaaatccaagagctgctaacattgtgatccagactgaaccaccagttcctgtttcgattaatagcaacataaccagagtagttcttgaaccagatagtcgaaaaagagctatgagtggtttggaagggccactcacaaagaaaccttggctgggaaagcaaggaaataacaatcaaaataaaccagggttcttacgaaagaatcagtatacaaacaccaaattagaagtcaagaaaatccctcaggaattgaacaacattaccaagctcaatgaacacttcagcaaatttggaactattgttaatatccaggttgcttttaagggtgacccagaagcagccctaatccaatatcttaccaatgaggaggccaggaaagccatttctagcacagaagcagttctaaacaaccgattcattcgagtcttgtggcatagggaaaataatgagcaaccgacactacagtcctcagcacagctgctcctgcaacaacagcaaacacttagtcacctctcacagcagcaccatcacctgccacagcatctacatcagcagcaggtgctagtggcccagtctgctccttcaacagtgcacggaggtatccagaagatgatgagcaaaccacagacatcaggtgcatatgttcttaacaaagttcctgttaaacatcgtcttggacatgcaggtggtaaccagagtgatgcatcacatttgttgaatcagtctggtggtgctggagaagattgccagatattttcaactccaggccatccaaaaatgatttacagctcctcaaacttaaagacaccttcaaagctctgttcagggtctaaatctcatgatgttcaagaagtgcttaaaaaaaaacaggaagcaatgaagttacaacaagatatgaggaaaaaaagacaggaagtgttagaaaagcaaatagaatgccaaaagatgttaatatccaagttagaaaaaaacaaaaacatgaaaccagaagaaagagcaaatataatgaagactttgaaagagcttggagagaagatctcacaattaaaagatgaattaaaaacatcttctgcagtctccacaccatctaaagtgaagacaaaaacggaggcccagaaggagttattagatactgaactggacctccacaagaggctgtcctcaggagaagacaccacagaattacggaaaaaactcagtcagttacaggttgaggctgcacggttaggtattttacctgtgggtcgaggaaagaccatgtcctctcaaggtcgaggaagaggccgagggcgtggaggaagaggaaggggctcactaaatcacatggtggtggaccatcgtcccaaagcactaacagttggaggattcattgaggaagaaaaagaagacttgcttcagcatttctcaatggagttttgctcttgttgcccaggctggagtgcaatggtgcgatctcggctcactgcaacctctgcctccctggttcaagtgattctcctgcctcagcctcccaagcagctgagattacaggagcgcgaagatgatggccatgaactccaagcagcctttcggcatgcacccggtgctgcaagaacccaaattctccagtctgcactctggctccgaggccatgcgccgagtctgtctcccagccccgcaggtacgtagtggagcataat

SEQ ID NO: 178282 - DNA, 3411 bp, Homo sapiens
  Payload ID: 15050
  Gene Symbol:
  Gene Name: RP11-458D21.5
  ENST ID: ENST00000612520
  CDS Start-End: 337-1053
aaacttcgggcggcggctgaggcggcggccgaggagcggcggactcggggcgcggggagtcgaggcatttgcgctgggcttcggagcgtagcgccagggcctgagcctttgaagcaggaggaggggaggagagagtggggctcctctatcgggaccccctccccatgtggatctgcccaggcggccgcggcggcggcggcggaggaggcgaccgagaagatacccgccctgcgccccgctctgctgtgggcgctgctggcgctctggctgtgctgcgcgacccccgcgcatgcattgcagtgtcgagatggctatgaaccctgtgtaaatgaaggaatgtgtgttacctaccacaatggcacaggatactgcaaatgtccagaaggcttcttgggggaatattgtcaacatcgagacccctgtgagaagaaccgctgccagaatggtgggacttgtgtggcccaggccatgctggggaaagccacgtgccgatgtgcctcagggtttacaggagaggactgccagtactcgacatctcatccatgctttgtgtctcgaccttgcctgaatggcggcacatgccatatgctcagccgggatacctatgagtgcacctgtcaagtcgggtttacaggtaaggagtgccaatggaccgatgcctgcctgtctcatccctgtgcaaatggaagtacctgtaccactgtggccaaccagttctcctgcaaatgcctcacaggcttcacagggcagaagtgtgagactgatgtcaatgagtgtgacattccaggacactgccagcatggtggcacctgcctcaacctgcctggttcctaccagtgccagtgccttcagggcttcacaggccagtactgtgacagcctgtatgtgccctgtgcaccctcgccttgtgtcaatggaggcacctgtcggcagactggtgacttcacttttgagtgcaactgccttccagacggttacctggcacgctggccacattctgcctcactcttatcagagtctgagctactggcagtgctttcagctctgagttgaggcacctcgaaccttgtttttgtggtgaaggatcctaaagtgctgtggggagtgatcacatttttcacaacatccctgactccacctcttctgccacaaacgtcagcatggtggtatcagccggcccttggtccagtgagaaggcagagatgaacattctagaaatcaacgagacattgcgcccccagctggcagagaagaaacagcagttcagaagcctcaaagagaaatgttttctaactcaactggccggcttcctggccaaccgacagaagaaatacaagtatgaagagtgtaaagacctcataaaatttatgctgaggaatgagcgacagttcaaggaggagaagcttgcagagcagctgaagcaagctgaggagctcaggcaatataaagtcctagttcactctcaggaacgagagctgacccagctaagggagaagttacgggaagggagagatgcctcccgctcattgtatgagcatctccaggccctcctcactccggatgagccggacaagtcccaggggcaggacctccaagaacagctggctgaggggtgtagactggcacagcaccttgtccaaaagctcagcccagaaaatgacgaagatgaggatgaagatgttcaagttgaggaggctgagaaagtactggaatcatctgcccccagggaggtgcagaaggctgaagagagcaaagtccctgaggactcactggaggaatgtgccatcacttgttcaaatagccacggcccttgtgactccaaccagcctcacaagaacatcaaaatcacatttgaggaagacgaagtcaactcaactctggttgtagacagagaatcctctcatgatgaatgtcaggatgctctaaacattctcccagtccctggccccacctcttctgccacaaacgtcagcatggtggtatcagccggccctttgtccagcgagaaggcagagatgaacattctagaaatcaatgagaaattgcgcccccagctggcagagaagaaacagcagttcagaaacctcaaagagaaatgttttctaactcaactgtccggcttcctggccaaccaacagaagaaatacaaatatgaagagtgcaaagacctcataaaatttatgctgaggaatgagcgacagttcaaggaggagaagcttgcagagcagctcaagcaagctgaggagctcaggcaatataaagtcctggttcacgctcaggaacgagagctgacccagttaaaggagaagttacgggaagggagagatgcctcccgctcattgaatgagcatctccaggccctcctcactccgtatgagccggacaagtcccaggggcaggacctccaagaacagctggctgaggggtgtagactggcacagcaccttgtccaaaagctcagcccagaaaatgacaacgatgacgatgaagatgttcaagttgaggtggctgagaaagtgcagaaatcatctgcccccagggagatgcagaaggctgaagaaaaggaagtccctgaggactcactggaggaatgtgccatcacttattcaaatagccatggctcttatgactccaaccagccacataggaaaaccaaaatcacatttgaggaagacaaagtcgactcaactctcattggctcatcctctcatgttgaatgggaggatgctgtacacattattccagaaaatgaaagtgatgatgaggaagaggaagaaaaagggccagtgtctcccaggaatctgcaggagtctgaagaggaggaagtcccccaggagtcctgggatgaaggttattcgactctctcaattcctcctgaaatgttggcctcgtaccagtcttacagcagcacatttcactcattagaggaacagcaagtctgcatggctgttgacataggcagacatcggtgggatcaagtgaaaaaggaggaccaagaggcaacaggtcccaggctcagcagggagctgctggatgagaaagggcctgaagtcttgcaggactcactggatagatgttattcaactccttcaggttgtcttgaactgactgactcatgccagccctacagaagtgccttttatgtattggagcaacagcgtgttggcttcgcttttgacatggatggaattaaaaaggacgaagaagaggaagaagaccaagacccaccatgccccaggctcagcagggagctgctggaggtagtagagcctgaagtcttgcaggactcactggatagatgttattcaactccttccagttgtcttgaacagcctgactcctgccagccctatggaagttccttttatgcattggaggaaaaacatgttggcttttctcttgacgtgggag

SEQ ID NO: 178283 - DNA, 1693 bp, Homo sapiens
  Payload ID: 15051
  Gene Symbol:
  Gene Name: RP11-45M22.4
  ENST ID: ENST00000427497
  CDS Start-End: 502-789
tcacgcgcctgggtgtcggcggggctgcgggaccgcgagtgagtgtggtcgctcctggttctgccagctcccctgagagcctgaacccgggcttgagagcctcgccaccccgggtgacatccctgccgtgggcttgggggctctgggtgtgattccgccggtccgggtcccgcagcgaccacctacccagcgcagtcaggggcggggctgggacccagagcgggaccccggctgccgagtccaggtgtcccgcgggcctcgatttggggagcagaaaacgccaggtcttcaagggtgtctgccaccaccatgcctgacccatttggcagcagcctcgtgtgtggtggtctggtgtggacggtggaagcgtgattctgctgagtgtcagtgtgaccactcgtgctcagccgtatctcagcaggaggacaggtgccggagcagctcgtgcagctaagcagccaactgcagaaacgtcaggcctgttgcagtctccaaggcaccatgaatgccatcgtggctctctgccacttctgcgagctccacggcccccgcactctcttctgcacggaggtgctgcacgccccacttcctcaaggggatgggaatgaggacagtcctggccagggtgagcaggcggaagaagaggaagctgccagtcttcaagtccctccggcacatgaggcaggtcctgggtgccccttctttccgcatgctggcctggcacgttctcatggggaaccaggtgatctggaaaagcagagacgtggacctcgtccagtcagcttttgaagtacttcggaccatgcttcccgtgggctgcgtccgcatcatcccatacagcagccagtacgaggaggcctatcggtgcaacttcctggggctcagcccgcacgtgcagatccccccccacgtgctctcctcagagtttgctgtcatcgtggaggtccacgcagccgcacgttccaccctccaccctgtggggtgtgaggatgaccagtctctcagcaagtacgagtttgtggtgaccagtgggagccctgtagctgcagaccgagtgggccccaccatcctgaataagattgaagcggctctgaccaaccagaacctgtctgtggatgtggtggaccagtgcctcgtctgcctcaaggaggagtggatgaagtcattccccagcccagcctagctgctcccgagaagacagtgaagggcactgagaagggccaagaaaacttcataaagcaggggatccaggtccggcacgatcaagacccaggctacatgcatcacaagtttgccatcgtggacaagagggtgctcatcactggctcgctcaactggaccacgcaagccatccagaacaacagggagaatgttctcatcacggaggacgacgagtacgtgcggctttttctggaagaatttgagcgcatctgggaacagtttaaccctacaaagtatacctttttcccaccaaagaaaagtcacggaagctgtgccccacctgtctccagagctggagggagattgctttcatggcacagaacttgcggcacctccagcgaaagccaaacctaaccaagaatggggctgagccctccctgcgggctgctgtgcgttctgagggagggagacctcggcactagaaaaaaatcgttaaactaaagtctcgtctattagaatactaaattgaact

SEQ ID NO: 178284 - DNA, 603 bp, Homo sapiens
  Payload ID: 15052
  Gene Symbol:
  Gene Name: RP11-463C8.4
  ENST ID: ENST00000557752
  CDS Start-End: 104-277
atgcgccacctgacccacaggccggtcgtggagctgcgaccccggccctagggcagtccagatgaaaagagtaccaatgaatctgcctccagctgaataaaccatggagaggaaaaacccatccagagagagccccagaagactctctgccaaagtaggcaaaggcacagagatgaagaaagtggctcgtcagcttgggatggctgctgctgagtcagacaaggactctggcttttcagggatcctcccaggatgtctgcctcaccagacgacctgagtacagggggaaggttacagaacatgacagtggatgaatgcttccagtctcggaacaccgtcctccaggggcagccctttgggggtgtccccaccgtgctgtgcctcaacatcgccctgtgggtgctcgtccttgtggtttactccttcctccggaaagctgcgtgggactatgggcgcctggctctgctgatacacaatgacagcctgacctcgctgatctatggggagcagagcgagaagacatctccctcggagacttccttggagatggaacgcagagacaagggattctgttcctggttcttcaacagcataacaatgaag

SEQ ID NO: 178285 - DNA, 776 bp, Homo sapiens
  Payload ID: 15053
  Gene Symbol:
  Gene Name: RP11-463D19.2
  ENST ID: ENST00000358757
  CDS Start-End: 33-518
ggcctcgccggtcttggggggatggttccatcatggcgtcaatgcagaaacgactacagaaagaactgttggctttgcaaaatgacccacctcctggaatgaccttaaatgagaagagtgttcaaaattcaattacacagtggattgtagacatggaaggtgcaccaggtaccttatatgaaggggaaaaatttcaacttctatttaaatttagtagtcgatatccttttgactctcctcaggtcatgtttactggtgaaaatattcctgttcatcctcatgtttatagcaatggtcatatctgtttatccattctaacagaagactggtccccagcgctctcagtccaatcagtttgtcttagcattattagcatgctttccagctgcaaggaaaagagacgaccaccggataattctttttatgtgcgaacatgtaacaagaatccaaagaaaacaaaatggtggtatcatgaggctgcctaccacaaggactttagcttactttttaaagattgaagaaaaaaaagaagacagaaaaagaagaactcaaagatacacaaagtaatttgaaccaaggctcagaagtttttggagccgtgagggatacagcagtttggtcaatattgtcttaacatgcttcaaataaatcagatgttctcagtgcagctgagtcttggtgagcagacatgggaatccgaaggcagcagtataaagaaggctcagcaggctgttgccaataaagctttgactgaatctacgcttcccaaaccagtt

SEQ ID NO: 178286 - DNA, 2740 bp, Homo sapiens
  Payload ID: 15054
  Gene Symbol:
  Gene Name: RP11-468E2.1
  ENST ID: ENST00000530611
  CDS Start-End: 35-2482
gctgaggggcggaggcgggagaggcgagctcgcgatgagtggtctcggcaggctcttcgggaaggggaagaaggagaaagggccaacccctgaagaagcaatacagaaactgaaggagacagagaagatactgatcaagaaacaggaatttttggagcagaagattcaacaggagctacaaacagccaagaagtatgggaccaagaataagagagctgccctacaggctttgcggaggaagaaaagattcgaacagcagctggcacaaactgacgggacattatccaccctggagtttcagcgtgaggccattgagaatgccactaccaatgcagaagtccttcgtaccatggagcttgctgcccaaagcatgaagaaggcctaccaggacatggacattgacaaggtagatgaactgatgactgacatcacggaacaacaggaggtggcccagcagatctcagatgccatttctcggcctatgggctttggagatgatgtggatgaggatgaactgctggaggagctagaggagctggagcaggaggaattggcccaggagttgttaaatgtgggcgacaaggaagaagaaccctcagtcaaattgcctagtgtaccttctactcatctgccggcagggccaggttccactgccttaaggatgacagtcgtagggaaccctcgaagttggagctgccagtggttgccaatcctgatactgttgctgggcacaggccatgggccaggggtggaaggcgtgacacactacaaggccggcgaccctgttattctgtatgtcaacaaagtgggaccctaccataaccctcaggaaacttaccactactatcagcttccagtctgctgccctgagaagatacgtcacaaaagccttagcctgggtgaagtgctggatggggaccgaatggctgagtctttgtatgagatccgctttcgggaaaacgtggagaagagaattctgtgccacatgcagctcagttctgcacaggtggagcagctgcgccaggccattgaagaactgtactactttgaatttgtggtagatgacttgccaatccggggctttgtgggctacatggaggagagtggtttcctgccacacagccacaagataggactctggacccatttggacttccacctagaattccatggagaccgaattatatttgccaatgtttcagtgcgggacgtcaagccccacagcttggatgggttacgacctgacgagttcctaggccttacccacacttatagcgtgcgctggtctgagacttcagtggagcgtcggagtgacaggcgccgtggtgacgatggtggtttctttcctcgaacactggaaatccattggttgtccatcatcaactccatggtgcttgtgtttttactggtgggttttgtggctgtcattctaatgcgtgtgcttcggaatgacctggctcggtacaacttagatgaggagaccacctctgcaggttctggtgatgactttgaccagggtgacaatggctggaaaattatccatacagatgtcttccgcttccccccataccgtggtctgctctgtgctgtgcttggcgtgggtgcccagttcctggcccttggcactggcattattgtcatggcactgctgggcatgttcaatgtgcaccgtcatggggccattaactcagcagccatcttgttgtatgccctgacctgctgcatctctggctacgtgtccagccacttctaccggcagattggaggcgagcgttgggtgtggaacatcattctcaccaccagtctcttctctgtgcctttcttcctgacgtggagtgtggtgaactcagtgcattgggccaatggttcgacacaggctctgccagccacaaccatcctgctgcttctgacggtttggctgctggtgggctttcccctcactgtcattggaggcatctttgggaagaacaacgccagcccctttgatgcaccctgtcgcaccaagaacatcgcccgggagattccaccccagccctggtacaagtctactgtcatccacatgactgttggaggcttcctgcctttcagtgccatctctgtggagctgtactacatctttgccacagtatggggtcgggagcagtacactttgtacggcatcctcttctttgtcttcgccatcctgctgagtgtgggggcttgcatctccattgcactcacctacttccagttgtctggggaggattaccgctggtggtggcgatctgtgctgagtgttggctccaccggcctcttcatcttcctctactcagttttctattatgcccggcgctccaacatgtctggggcagtacagacagtagagttcttcggctactccttactcactggttatgtcttcttcctcatgctgggcaccatctcctttttttcttccctaaagttcatccggtatatctatgttaacctcaagatggactgagttctgtatggcagaactattgctgttctctccctttcttcatgccctgttgaactctcctaccagcttctcttctgattgactgaattgtgtgatggcattgttgccttcccttttgccctttgggcattccttccccagagagggcctggaaattataaatctctatcacataaggattatatatttgaactttttaagttgcctttagttttggtcctgatttttctttttacaattaccaaaataaaatttatt

SEQ ID NO: 178287 - DNA, 4351 bp, Homo sapiens
  Payload ID: 15055
  Gene Symbol:
  Gene Name: RP11-468E2.2
  ENST ID: ENST00000561419
  CDS Start-End: 1-431
tcatccacatgactgttggaggcttcctgcctttcagtgccatctctgtggagctgtactacatctttgccacagtatggggtcgggagcagtacactttgtacggcatcctcttctttgtcttcgccatcctgctgagtgtgggggcttgcatctccattgcactcacctacttccagttgtctggggaggattaccgctggtggtggcgatctgtgctgagtgttggctccaccggcctcttcatcttcctctactcagttttctattatgcccggcgctccaacatgtctggggcagtacagacagtagagttcttcggctactccttactcactggttatgtcttcttcctcatgctgggcaccatctcctttttttcttccctaaagttcatccggtatatctatgttaacctcaagatggactgagttctgtatggcagaactattgctgttctctccctttcttcatgccctgttgaactctcctaccagcttctcttctgattgactgaattgtgtgatggcattgttgccttcccttttgccctttgggcattccttccccagagagggcctggaaattataaatctctatcacataaggattatatatttgaactttttaagttgcctttagttttggtcctgatttttctttttacaattaccaaaataaaatttattaagaaaaaggctcatgcagttggaggttttggtctggatataggaactcgagccctgctgttaagggcacggtcctttataaagccgagctggccactgaatgcccgaagctcgagttctccaacccagcttgggaactcccggcgtggggaacctacattgccagagtcgggtttccgcgattcagccggtgctcagcctaacggaagtggaggagccggacctctttgtgggaagcgaattgaatcaccttggcaacccgcggggcgtgcagcaacgccctttcctccggaagtgggtgtcagaacctccacgtgctgtccctccccctccccttttcggcccagtagcggcggctcagttgctgccatggagtcagccgggctagagcagctcctacgggagctgctgctaccggacaccgagcgcatccgtcgggccacggaacagctccagatcgttcttcgggcccccgccgctttgccggctctctgcgacctgctagcctcggcggccgacccccagatccgccagtttgcggccgtgctgacccgcagacgactgaacacccgctggcgacggctggcggcggagcaacgggagagcctcaagtccctgatcctgacggccctgcagagagaaacagagcactgtgtgagcctcagcctggcccagctctcagccaccatttttcgaaaggaaggcttggaggcctggccacagcttttgcagctgcttcagcacagtacccacagcccccacagcccagagagagagatggggcttttgctgctaagtgtggtggtgacctcccggcccgaggccttccaaccccaccaccgggagcttcttcggcttctgaatgagactcttggtgaggtgggctctcctgggctgctcttctactccctgcgcactctgaccaccatggctccctacctcagcactgaagatgtgcctctcgctcggatgttggtgcccaagctgatcatggccatgcagactctgatccccatagatgaggcaaaggcctgtgaggcccttgaggctttggatgaactgttggagtcagaggtgccggtcatcaccccctacctctctgaagtcctcacattctgcctggaggtagctagaaatgtggccctgggcaatgcgatacgcatacgtattctctgctgcctcactttcttggtcaaagtcaagagcaaggccttactgaagaatcgtctcctgccacccttgctgcacacccttttccccattgtggctgctgagcccccaccaggccagttggatcccgaggaccaggattcagaagaggaagagttggagattgagctgatgggggagactcccaagcatttcgctgtacaagttgtggacatgctggcactacacctgccccccgagaagctctgtccccagctgatgcccatgttggaagaggctttgcggagcgagagcccataccagcgcaaagctggactcctggtgctggccgtgctgtctgacggagctggcgaccacatcaggcagagactgctgcccccactgctgcagattgtgtgcaagggcctggaggacccctcgcaagttgtacgcaatgctgcgctgtttgccctgggccagttctcagaaaacctacagccccatatcagcagctattcaagggaggtaatgccactgctcctcgcctacttgaagtcggtgcctcttggacacacacaccacctagccaaggcctgctatgccctggagaattttgtggagaacctagggcccaaggtgcagccctaccttccggagcttatggaatgcatgctgcagcttctgaggaaccccagcagtccccgggccaaggagctggctgtgagcgccctgggagccattgctacggctgcccaggcctcgctgctgccctacttccctgccatcatggagcacctgcgggaattcctgttaacaggccgtgaggaccttcagcctgtgcagatccagagcctggagacactgggggtgctggcacgagcagtgggggagcccatgaggccgctggctgaggaatgctgccagctgggtctgggcctctgcgaccaggtagacgaccctgacttgcggcgctgcacgtacagcctatttgcagccttatcgggtctgatgggtgagggcctggcgccccacttggaacagatcaccacgctcatgctgctgtcactgcgttccaccgagggcattgtgcctcagtatgacgggagcagctccttccttctgtttgacgatgagagtgatggggaagaagaggaggagctcatggatgaggatgtggaagaagaggatgactcagagatctcagggtacagcgtggagaatgccttcttcgatgagaaggaagacacctgtgctgccgtgggggagatctctgtgaacaccagtgtggccttccttccatacatggaaagtgtctttgaagaagtatttaaactgctggagtgccctcacctgaatgtgcggaaggcagcccatgaggctctgggtcagttttgctgtgcactgcacaaggcctgtcaaagctgcccctcggaacccaacactgctgctttgcaggctgccctggcccgagtcgtgccatcctacatgcaggcagtgaacagggagcgggaacgccaggtggtgatggccgtgctggaggccctgacaggggtgctccgcagctgtgggaccctcacactgaagccccctgggcgcctcgctgagctctgtggcgtgctcaaggctgtgctgcagaggaagacagcctgtcaggatactgacgaggaggaggaagaggaagatgatgatcaggctgaatacgacgccatgttgctggagcacgctggagaggccatccctgccctggcagccgcggctgggggagactcctttgccccattctttgccggtttcctgccattattggtgtgcaagacaaaacagggctgcacagtggcagagaagtcctttgcagtggggaccttggcagagactattcagggcctgggtgctgcctcagcccagtttgtgtctcggctgctccctgtgctgttgagcaccgcccaagaggcagaccccgaggtgcgaagcaatgccatcttcgggatgggcgtgctggcagagcatgggggccaccctgcccaggaacacttccccaagctgctggggctcctttttcccctcctggcgcgggagcgacatgatcgtgtccgtgacaacatctgtggggcacttgcccgcctgttgatggccagtcccaccaggaaaccagagccccaggtgctggctgccctactgcatgccctgccactgaaggaggacttggaggagtgggtcaccattgggcgcctcttcagcttcctgtaccagagcagccctgaccaggttatagatgtggctcccgagcttctgcgtatctgcagcctcattctggctgacaacaagatcccaccagacaccaaggccgcactgttgctgctcctgacgttcctggccaaacagcacaccgacagctttcaagcagctctgggctcactgcctgttgacaaggctcaggagctccaggctgtactgggcctctcctagactgcaggctgcagccagtccagagagaatagagcctgcccaggcct

SEQ ID NO: 178288 - DNA, 297 bp, Homo sapiens
  Payload ID: 15055
  Gene Symbol:
  Gene Name: RP11-468E2.2
  ENST ID: ENST00000625289
  CDS Start-End: 1-297
atggagtcagccgggctagagcagctcctacgggagctgctgctaccggacaccgagcgcatccgtcgggccacggaacagctccagatcgttcttcgggcccccgccgctttgccggctctctgcgacctgctagcctcggcggccgacccccagatccgccagtttgcggccgtgctgacccgcagacgactgaacacccgctggcgacggctggcggcggagcaacgggagagcctcaagtccctgatcctgacggccctgcagagagaaacagaatggggcttttgctgctaa

SEQ ID NO: 178289 - DNA, 4798 bp, Homo sapiens
  Payload ID: 15056
  Gene Symbol:
  Gene Name: RP11-468E2.4
  ENST ID: ENST00000558468
  CDS Start-End: 1-1644
tcagaactgccctacgtcctggagatggtggctgagctggctggacagcaggaccctgggctgggtgccttttcctgtcaggaggcccggagagcctggctggatcgtcatggcaaccttgatgaagctgtggaggagtgtgtgaggaccaggcgaaggaaggtgcaggagctccagtctctaggctttgggcctgaggaggggtctctccaggcattgttccagcacggaggtgatgtgtcacgggccctgactgagctacagcgccaacgcctagagcccttccgccagcgcctctgggacagtggccctgagcccaccccttcctgggatgggccagacaagcagagcctggtcaggcggcttttggcagtctacgcactccccagctggggccgggcagagctggcactgtcactgctgcaggagacacccaggaactatgagttgggggatgtggtagaagctgtgaggcacagccaggaccgggccttcctgcgccgcttgcttgcccaggagtgtgccgtgtgtggctgggccctgccccacaaccggatgcaggccctgacttcctgtgagtgcaccatctgtcctgactgcttccgccagcacttcaccatcgccttgaaggagaagcacatcacagacatggtgtgccctgcctgtggccgccccgacctcaccgatgacacacagttgctcagctacttctctacccttgacatccagcttcgcgagagcctagagccagatgcctatgcgttgttccataagaagctgaccgagggtgtgctgatgcgggaccccaagttcttgtggtgtgcccagtgctcctttggcttcatatatgagcgtgagcagctggaggcaacttgtccccagtgtcaccagaccttctgtgtgcgctgcaagcgccagtgggaggagcagcaccgaggtcggagctgtgaggacttccagaactggaaacgcatgaacgacccagaataccaggcccagggcctagcaatgtatcttcaggaaaacggcattgactgccccaaatgcaagttctcgtacgccctggcccgaggaggctgcatgcactttcactgtacccagtgccgccaccagttctgcagcggctgctacaatgccttttacgccaagaataaatgtccagagcctaactgcagggtgaaaaagtccctgcacggccaccaccctcgagactgcctcttctacctgcgggactggactgctctccggcttcagaagctgctacaggacaataacgtcatgtttaatacagagcctccagctggggcccgggcagtccctggaggcggctgccgagtgatagagcagaaggaggttcccaatgggctcagggacgaagcttgtggcaaggaaactccagctggctatgccggcctgtgccaggcacactacaaagagtatcttgtgagcctcatcaatgcccactcgctggacccagccaccttgtatgaggtggaagagctggagacggccactgagcgctacctgcacgtacgcccccagcctttggctggagaggatccccctgcttaccaggcccgcttgttacagaagctgacagaagaggtacccttgggacagagtatcccccgcaggcggaagtagctgagggcaagggtcccgatgagggtcccatggcctgctccctcaggaacagctccagcaccaataaagaggcatcttaccacccaggcttcttggtggtccttcttcctggtgccaccatctaggggcaccagggaaagagcggggtgaacagagctttgctgaaaagggccccctgcaacctagtgcctgaccctccctggactcaggaccaggaaggagttgacaccctggatggtcaagggaggccctccccatccagcagcctggcctgggcttcctccctccctgcctccttttttcctttcatagaatttgactggtatttgaagtcacccaatatgtatcaggtgggcactgtgggggaatgcagatgcacaggtgtacacagcagtccagaggtcccaggcctgactccaggaaactggcctccctggggaagccacggtgtcacccagaggtcagatagaagcaagagtatctgagggaggcaggggaatgagccaggctggagctgagccagcagggcagggcccccctgctgcgacagtggcatcctgatagtgagatgctcagatgctgctgccctctagtggccgccagttccctgcaactcagaccacgtgatttctgggaaaaggccctccctggaggagaactgaaacttagggtggggactgtagaaaggggcggagagatcagccgcccagccaggagttaagctgaggtcgtctgagccctgcgacagcctggacagcaactcaggatggcatcaggcagggcacgctgcacccgaaaactccggaactgggtggtggagcaagtggagagtgggcagtttcccggagtgtgctgggatgatacagctaagaccatgttccggattccctggaaacatgcaggcaagcaggacttccgggaggaccaggatgctgccttcttcaaggcctgggcaatatttaagggaaagtataaggagggggacacaggaggtccagctgtctggaagactcgcctgcgctgtgcactcaacaagagttctgaatttaaggaggttcctgagaggggccgcatggatgttgctgagccctacaaggtgtatcagttgctgccaccaggaatcgtctctggccagccagggactcagaaagtaccatcaaagcgacagcacagttctgtgtcctctgagaggaaggaggaagaggatgccatgcagaactgcacactcagtccctctgtgctccaggactccctcaataatgaggaggagggggccagtgggggagcagtccattcagacattgggagcagcagcagcagcagcagccctgagccacaggaagttacagacacaactgaggccccctttcaaggggatcagaggtccctggagtttctgcttcctccagagccagactactcactgctgctcaccttcatctacaacgggcgcgtggtgggcgaggcccaggtgcaaagcctggattgccgccttgtggctgagccctcaggctctgagagcagcatggagcaggtgctgttccccaagcctggcccactggagcccacgcagcgcctgctgagccagcttgagaggggcatcctagtggccagcaacccccgaggcctcttcgtgcagcgcctttgccccatccccatctcctggaatgcaccccaggctccacctgggccaggcccgcatctgctgcccagcaacgagtgcgtggagctcttcagaaccgcctacttctgcagagacttggtcaggtactttcagggcctgggccccccaccgaagttccaggtaacactgaatttctgggaagagagccatggctccagccatactccacagaatcttatcacagtgaagatggagcaggcctttgcccgatacttgctggagcagactccagagcagcaggcagccattctgtccctggtgtagagcctgggggacccatcttccacctcacctctttgttcttcctgtctcctttgaagtagactcattcttcacacgattgacctgtcctctttgtgataattctcagtagttgtccgtgataatcgtgtcctgaaaatcctcgcacacactggctggtggagaactcaaggctaattttttatccttttttttttttaattttgagatatacgccctctttcatctgtaagggactaggaaattccaaatggtgtgaacccagggggcctttccctcttccctgacctcccaactctaaagccaagcactttatattttcctcttagatattcactaaggacttaaaataaaattttattgaaagaggaatcagtatctgattttctgggagaagaaggtagcagtggtcacagatagagatgtaaacttaagagtggggcactggggttctcttcctgctgacatctccagcctctttcctctcctctgcccacaggttctggctaagatgctgcctgggccctgtgggtcctgggcctggcactctacagaggtaccctctgggcagataagattagggtgtgggttgggcaccaagccttcagccaggcactatagccaccaacttcacatggtaaagtctgggctccacagttcttgctagaaggccccaacatcgggcctgaggttagttagattggaggtctaaatgaagaggagacacttgagggtgacctgaaactatggtctagaggccctgggacctgagaacagaggagtcagagagaagagttgctgaaactgtacctgctgttactggcacctcttcctccagcacaatttcactgtcaccccagcagggtactcccaaactggattccttgctctatctaagccccataaaagacactctggccggctgggcgcagtggctcacacctataatcccagcactttgggaggccaaggtgggtggatcacttgagatcaggagttcgagaccagcctggccaacacggtgaaacagcgtctcttctaaaaatacaaaaattagccaggcctggtggcgggcacctgtaatctcagctacttgggaggctgaggcaggagaatcgcttgaacccgggaggcggaggttgcagtgagccaagatcgtgctattgtactccagcctgggcaacaagagcgagactctgtctcaagatt

SEQ ID NO: 178290 - DNA, 850 bp, Homo sapiens
  Payload ID: 15057
  Gene Symbol:
  Gene Name: RP11-468E2.6
  ENST ID: ENST00000558325
  CDS Start-End: 1-850
actgggactatcggtggcagcaagtgcccaaaaaagcctggcggaagctgaagctcccaggggacagctccttgatgacctaccggggccacggagtgctgcacaccctcatccgctgccggttctcccccattcatagcactggccagcagttcatctacagtggctgctccactggcaaagtggttgtgtacgaccttctaagtggccacattgtgaagaagctgaccaaccacaaggcctgtgtgcgtgacgtcagttggcacccctttgaagagaagattgtcagcagttcggaactggaacatggtcggagccaaggacacaggactaacaggaaaggacacagactgctgtcaggacacatactaccacacacccgaggccaggaccctgctgacgtggcagacctccaccctggccccttactgccccccgcccctctcccccacctgccagctgccaacagggctctgccttgtgtctgccacacctgtcactgcctatccttgtccagggggggccccatcagcccctcctcagctgcccagcaaagcaagcagttagtggggaggggagggaacatggagcgggggccggtggtgggggcaggactgggggccggggcccgaatccaggcactgctgggctgcctgctcaaggtgctgctctgggtggcctctgccttgctgtactttggaagcgaacaggccgcccgccttctgggcagcccctgcttacggcgcctctaccatgcctggctggcagcagtggtcatctttgggccgcttctgcagttccatgtcaaccctcggactatcttcgccagccacggcaacttcttcaacat

SEQ ID NO: 178291 - DNA, 2306 bp, Homo sapiens
  Payload ID: 15058
  Gene Symbol:
  Gene Name: RP11-474G23.1
  ENST ID: ENST00000406334
  CDS Start-End: 220-1215
atgtatagacaaatttcctcaagaaaagtgggcactgaacagatgggcctgcgggtgctgcaccggggtgacagcagtcctgatgggccgtgcaattctgtagtggatccaagtcggtacacggatgcacagatacctttgactgcctctcgcaggacttggatttttcctgttttttggtgcggcatccggggaaatgaggcaagttatcctttggaaatgtgctcacactttgatgcggatgaaattaaaaggctaggaaagagatttaagaagcttgatttggacaattctggttctttgagtgtggaagagttcatgtctctgcctgagttacaacagaatcctttagtacagcgagtaatagatatattcgacacagatgggaatggagaagtagactttaaagaattcattgagggcgtctctcagttcagtgtcaaaggagataaggagcagaaattgaggtttgctttccgtatctatgacatggataaagatggctatatttccaatggggaactcttccaggtattgaagatgatggtggggaacaatctgaaagatacacagttacagcaaattgtagacaaaaccataataaatgcagataaggatggagatggaagaatatcctttgaagaattctgtgctaggggtgggaagacgggcctcttcgccggcctggcctcctctgtgtccatgcggcccgcatccccgccctctcctgctgcggacagctgttcagcctgtcgtttcttcgcccgtcggccacccttgcgggtgacctgggtaaagccctcctctgccctggcgctctgcgtttccatttcggattccatccccggaaatcttaaagcgctgccggctgaaacacgtgcgcagctgcaccacgcagaagccagcctcagccaaccacccctgcagctccgcccctttcctaaaacgtcacaggccggggacctgcaggatttggggccgtatgtatgtgtgcgaaaggcagtgggtaaaggcgataaacaaattcgtgctgttgtgaaggaacattctgtgcgatcgcaggagcgcatctggcattatccggggataactacagccaacatgccagggcatctggggcagaatacggaaagcgggagggacaaattgccaatgtttggagtctggtttccaggttgccgtttttgggggctctgggtgtggcggttgccgtagctgaaattggctgcaccatgtcggccttcgagaagcctcagatcatcgcccatatccagaagggcttcaactacacggtgtttgactgtaagtgggtgccctgcagcgccaaatttgtgaccatgggcaacttcgcacggggcaccggcgtcattcagctgtacgagatccagcacggggacctgaagctgcttcgggagattgaaaaggccaaacctattaaatgtggaacatttggtgcaacatctttacagcagagatatttagctactggagattttggtggaaaccttcatatatggaatttagaagctccagagatgccagtatattctgtaaagggccataaagaaattataaatgccatagatggcataggtggactaggaattggagaaggagcacctgaaattgtgactggcagccgagatggaactgtgaaggtgtgggacccaaggcaaaaagatgatcctgttgctaatatggaacctgtacaaggagaaaacaagagagactgttggactgtggcatttggcaatgcttataatcaagaagaacgtgttgtttgtgctggctatgacaatggggatatcaaactatttgatctcagaaatatggcattacggtgggagacaaacatcaaaaatggggtgtgtagcttggagtttgacagaaaagacataagtatgaataagttagtagccacatctctggaaggaaagttccatgtttttgacatgagaacacagcatccaaccaaaggttttgcctctgtttcagaaaaggctcataaatctactgtgtggcaggtccgacacctgccgcagaacagggagctctttctgacagctggaggcgccggcggccttcacctctggaagtatgaataccctattcagcggtcaaagaaagattctgagggaatagaaatgggagtcgcaggttctgtaagccttctgcagaatgttacgttgtccacccagcccatttcaagtttggattggagtccagataaaaggggtctctgcgtctgtagttcatttgaccaaacggtgagagtactgatcgttacaaagctcaataaaatttga

SEQ ID NO: 178292 - DNA, 557 bp, Homo sapiens
  Payload ID: 15059
  Gene Symbol:
  Gene Name: RP11-475E11.9
  ENST ID: ENST00000357393
  CDS Start-End: 11-557
gaacaattcgatgacgaggcccaggaagcacgctgaaaccctgggcggcggcaagctgtgcgacctcttctgcggccggcctgggcaggtgtcttcctcgagaggcaggcaggggatcccggacatggagcccatagtacatatccaccaagaacttctcacaggaatagaatctgaggcaagtctctctaagttgtcaccaacctctcagaaaggcacttcctcaagttcttcttacatatttcaaaagatatcccaagggaaacagatgtgtcagaagttgaaagaacagactgatcaactgaagactaaagtacaagaattttccaaaagaataaaacaggactctccttaccatttgcaagacaagaagctggtcctggagaaactgcagggacaccttgaactgctggagcagaactttctggccaccaaggacaagcatctgactttgcagcagcaagtccacaagcacgaatcaacaatcgttggtgactttgatccagaaagaaaagtggaaggtgaaatcttcaaattggagatgctgcttgaagatg

SEQ ID NO: 178293 - DNA, 779 bp, Homo sapiens
  Payload ID: 15060
  Gene Symbol:
  Gene Name: RP11-47I22.4
  ENST ID: ENST00000556347
  CDS Start-End: 1-437
cagacttcggaatgtgcaaggaggggatttgcaatggtgtcaccacggccacattctgtggcacgccagactatatcgctccagagatcctccaggaaatgctgtacgggcctgcagtagactggtgggcaatgggcgtgttgctctatgagatgctctgtggtcacgcgccttttgaggcagagaacgaagatgacctctttgaggccatactgaatgatgaggtggtctaccctacctggctccatgaagatgccacagggatcctaaaatctttcatgaccaagaaccccaccatgcgcttgggcagcctgactcagggaggcgagcacgccatcttgagacatcctttttttaaggaaatcgactgggcccagctgaaccatcgccaaatagaaccgcctttcagacccagaatctggcttctagaagagtgagtctggaaaatactgcccctactttcaaatgggagaaagcctcccttgtactaagtttgcaatcattagaaaactgttgatatacagcaaaagaaactaccatcagagtgaacaggcaacctacagaatgggagaaaatttttgcaatctactcatctgacaaagggctaatagccagaatctacaaagaactcaaacaaatttacaagaaaaaacaaacaaccccatcaaaaagtgggcaaaggatatgaacagacacttctcaaaagaagacatttatgcagccaacagacacatgaaaaaatgctcatcatcactggccatcagagaaatgcaaatcaa

SEQ ID NO: 178294 - DNA, 246 bp, Homo sapiens
  Payload ID: 15061
  Gene Symbol:
  Gene Name: RP11-484M3.5
  ENST ID: ENST00000490594
  CDS Start-End: 43-246
gaggatagccaagtagacctcaattccaagccttcagttgaaatggaaactcagaatgcaaccactatcccaccctacaacccagttgatgccagattcaccagtaacttccaagcaaaagaccaagctcttttcccaagactcccctccatctcatccaaattgaactataccagcagtcaagaaaaaactcaagccatagtaaccaaatcttgttgcggcattgccctgactgcggagtgcatc

SEQ ID NO: 178295 - DNA, 561 bp, Homo sapiens
  Payload ID: 15062
  Gene Symbol:
  Gene Name: RP11-49K24.6
  ENST ID: ENST00000588705
  CDS Start-End: 5-253
ggccatggcctttaccctgtactcactgctgcaggcagccctgctctgcgtcaacgccatcgcagtgctgcacgaggagcgattcctcaagaacattggctggggaacagaccagggaattggtggatttggagaagagccgggaattaaatcacagctaatgaaccttattcgatctgtaagaaccgtgatgagagtgccattgataatagtaaactcaattgcaattgtgttacttttattatttggatgaatatcagtggagaaaatggagactcagaagaggacatgccagtagaagttattactttgtgaattaactgaattgctgacatacatccagaagactcatgagcaccttttatttcatgacttcagttacttctaaaactatggagcagggaatgaaggatggcagcatgccgtgcattaaaagctgttttggtagatctcagtggcacacttcacattgaagatgcagctgtgccaggcgcacaggaagctcttaaaaggttacgtggtgcttctgtaatcattaggtttgtgaccaatacaaccaaa

SEQ ID NO: 178296 - DNA, 254 bp, Homo sapiens
  Payload ID: 15062
  Gene Symbol:
  Gene Name: RP11-49K24.6
  ENST ID: ENST00000602459
  CDS Start-End: 4-126
gccatggcctttaccctgtactcactgctgcaggcagccctgctctgcgtcaacgccatcgcagtgctgcacgaggagcgattcctcaagaacaggaatgaaggatggcagcatgccgtgcattaaaagctgttttggtagatctcagtggcacacttcacattgaagatgcagctgtgccaggcgcacaggaagctcttaaaaggttacgtggtgcttctgtaatcattaggtttgtgaccaatacaaccaaa

SEQ ID NO: 178297 - DNA, 291 bp, Homo sapiens
  Payload ID: 15062
  Gene Symbol:
  Gene Name: RP11-49K24.6
  ENST ID: ENST00000602926
  CDS Start-End: 4-126
gccatggcctttaccctgtactcactgctgcaggcagccctgctctgcgtcaacgccatcgcagtgctgcacgaggagcgattcctcaagaacaggaatgaaggatggcagcatgccgtgcattaaaagctgttttggtagatctcagtggcacacttcacattgaagatgcagctgtgccaggcgcacaggaagctcttaaaaggcaagctatcctccaggttcagctgacaaatatgtttgttacgtggtgcttctgtaatcattaggtttgtgaccaatacaaccaaa

SEQ ID NO: 178298 - DNA, 1641 bp, Homo sapiens
  Payload ID: 15063
  Gene Symbol:
  Gene Name: RP11-49K24.9
  ENST ID: ENST00000611323
  CDS Start-End: 1-1641
atggcggcagggtccactacgctgcgcgcagtggggaagctgcaggtgcgtctggccactaagacggagccgaaaaagctagagaaatatttgcagaaactctccgccttgcccatgaccgcagacatcctggcggagactggaatcagaaagacggtgaagcgcctgcggaagcaccagcacgtgggcgactttgccagagacttagcggcccggtggaagaagctggtgctcgtggaccgaaacaccgggcctgacccgcaggaccctgaggagagcgcttcccgacagcgcttcggggaggctcttcaggagcgggaaaaggcctggggcttcccagaaaacgcgacggcccccaggagcccatctcacagccctgagcacagacggacagcacgcagaacacctccggggcaacagagacctcacccgaggtctcccagtcgcgagcccagagccgagagaaagcgccccagaatggccccagctgattccggcccccatcgggaccctccaacgcgcaccgctcccctcccgatgcccgagggccctgagcccgctgtgcccggggagcaacccggaagaggccacgctcacgccgctcagggcgggcctctgctgggtcaaggctgccagggccaaccccagggggaagcggtggggagccacagcaaggggcacaaatcgtcccgcggggcttcggctcagaaatcgcctcctgtccaggaaagccagtcagagaggctgcaggcggccggcgctgattccgccgggccgaaaacggtgcccagccatgtcttctcggagctctgggacccctcagaggcctggatgcaggccaactacgatctgctgtccgcttttgaggccatgacctcccaggcaaacccagaagcactctgcgcgccagcgctccaggaggaagctgctttccctggacgcagagtgaacgctaagatgccggtgtactcgggctccaggcctgcctgccagctccaggtgccgacgctgcgccagcagtgcctccgggtgcctaggaacaatccggacgccctcggcgacgtggaaggggtcccctactcggttcttgaacccgttctggaagggtggacgcccgatcagctgtaccgcacagagaaagacaatgccgcactcgctcgagagacagatgaattatggaggattcattgcctccaggacttcaaggaagaaaagccacaggagcacgagtcttggcgggagctgtacctgcggcttcgggacgcccgagagcagcggctgcgagtagtgaccacgaaaatccgatccgcacgtgaaaacaaacccagcggccgacagacaaagatgatctgtttcaactctgtggccaagacgccttatgatgcttccaggaggcaagagaagtctgcaggagccgctgaccccggaaatggagagatggagccagcccccaagcccgcaggaagcagccaggctccctccggcctcggggacggcgacggcggcagcgtgagcggcggcggcagcagcaaccggcacgcggcgcccgcggacaaaacccgaaaacaggctgccaagaaagtggccccgctgatggccaaggcaattcgagactacaagggaagattctcccgacgataa

SEQ ID NO: 178299 - DNA, 1449 bp, Homo sapiens
  Payload ID: 15064
  Gene Symbol:
  Gene Name: RP11-49P4.7
  ENST ID: ENST00000634804
  CDS Start-End: 88-621
gaccagcgtgaggaggctcctggcagttgggctgttccgggccggcggcaggagggagcttgatgcgtgcctggcgtgcgcaggccgatgccgccggcagaaaagagcgaggggccaccggtcccggcgcccgcggaacgcgcccggggccgggtgcccggcctgccgtcgccggcgctgtgctgcgcctgcggtctgtgcgcgctgctggcgggcgtgaacgtgacgctggcaggcgccttcgcctccttcttgcccgagcacaacgcgctgctcgtcgtggggctggcgctgctggtgctggcgctcggcttcttcgcggcctgctgcgtgtgtagccgccggggcctcgcgccccgtgggcgctcggcggccgcggcgggcccgggccagggtggcggccgcgccgggcccgtggcgctggagatggagagcagcgagcccacggcacaggacaccacggccgtgcagctcagccctgccgtctccgccgcgtcctccggctgctccagccccggccccagccccctcgccctggaggccccggcgcccgcggccgtctgcgcgctgcgctcggaaggagtccagctcaacccaccccgggcgcgcgccgccccctagcggaccagggccccgccgtgactccgctgtccgggttcattccccttccttcagtgccatttaaggggggaaaagaaagaaaagaaaaagaaaaaagaaaaccttttcttccttccttcctttcttttttacaagggtctggtgctgggctcaggtggcctcatcttttccatctcccaaactcctgggtagaatgtggtgatggtgtcaggggtcacaccccaaagaagggagcagcagagccttggccccttagacagggtctctggtctctagtaaaccttacccatccagcttgctgaaagtaggcccctggaccctggaaccctgacactgccacctccccctggcatttgggcactgtgaaccaaggagcacccaccctgaaggggctaaccaccagcagtccccccagtgaggtgggaggaagagagggagaagggttgaatgtcagcctgggctgtctctgtccttgcacacaccgtgaaaggcttccagtcccctctcctgcccctccccaccttccttgtttctaccccaacatgacctttgggattcatttggctgagaagccgtggctctgacttgggccaggatggtccctagaattagggccggggtgagcactccccaccctttctgtctgactaagagcaagagtagctgagactggggccctgacagaggtgagtggtgagggagcttctgcagccctgaaagtcctagtgtgactttcactgccagcaatgctggcccccacccaccctgactgtggcacaccatgcattcctgcagtgccttactcctcaataaagcacctttggagtc

SEQ ID NO: 178300 - DNA, 818 bp, Homo sapiens
  Payload ID: 15065
  Gene Symbol:
  Gene Name: RP11-500M8.7
  ENST ID: ENST00000536588
  CDS Start-End: 1-155
gatccccagaagtgatcctgggccacccctacgacgtggccattgacatgtggagcctgggctgcatcacggcggagttgtacacgggctaccccctgttccccggggagaatgaggtggagcagctggcctgcatcatggagctcaccaactaagacgtttgtgctcacatggaaggagaagtgctccttgatgtccggacaggttctgccattactgcaatagccacatctgtgtgtcacggcccaccctgtcgccagcttcatcatgccctcatgcctcatgggaaaggtggacgttcctcagtcagtgggattgtggccactgtgtttggagcaacaggattcctggggcgatatgttgtcaaccaccttggacgcatggggtcacaggtaatcataccctatcggtgtgataaatatgacatcatgcaccttcgtcccatgggtgacctgggccagcttctgtttctggaatgggacgcgagagataaagattctatccgacgagtagtacaacacagcaatgtggtcatcaatcttattggacgagactgggaaaccaaaaactttgattttgaggatgtttttgtgaagattccccaagcaattgctcaactgtccaaggaagctggagttgaaaaattcattcatgtttcacatctgaatgcgaatattaaaagctcttctagatatttgagaaataaggctgttggagagaaagtagtgagagatgcatttccggaagccattatcgtaaagccgtcggacatctttggaagagaggatagattccttaattcttttgcaagtacgtat

SEQ ID NO: 178301 - DNA, 583 bp, Homo sapiens
  Payload ID: 15066
  Gene Symbol:
  Gene Name: RP11-505K9.4
  ENST ID: ENST00000566309
  CDS Start-End: 1-297
gttgggccctacagaaggtgttacttcttttctcactgttcgacccctggggagcccctggtcgttttgcacgtggcactgactggtgacatctccagcaacatccaggcaatcgtgaaggaacatcctccatcagaaacagaagagaagaacaaaatcactgctgcgatcttttattccatcagcttgacccagcagggactccaaggggtggagctgggaacattcctcataaagcgagtcgtcaaggagttgcagatggagtctcgctctgtcgcccaggctgaagtgcagtgactcagtcttagctcactgcaacctccgcttcccgggttcaagcaattctcctccctcagactcctgagtagctgggattacagtatcggcctttgtcttagtcaagctttcgaggagcaactcagcaattctgttaccgataatcacctaacagtttacacattcaaaaccactgggaagccacagaccaggcaccgtgggatggggaagtggagaccgagaggctgctgccggggaaatatgcagtgcagacaagaggttcctgctactctcacctcatcagagt

SEQ ID NO: 178302 - DNA, 458 bp, Homo sapiens
  Payload ID: 15066
  Gene Symbol:
  Gene Name: RP11-505K9.4
  ENST ID: ENST00000563312
  CDS Start-End: 1-276
gttgggccctacagaaggtgttacttcttttctcactgttcgacccctggggagcccctggtcgttttgcacgtggcactgactggtgacatctccagcaacatccaggcaatcgtgaaggaacatcctccatcagaaacagaagagaagaacaaaatcactgctgcgatcttttattccatcagcttgacccagcagggactccaaggggtggagctgggaacattcctcataaagcgagtcgtcaaggagttgcagtatcggcctttgtcttagtcaagctttcgaggagcaactcagcaattctgttaccgataatcacctaacagtttacacattcaaaaccactgggaagccacagaccaggcaccgtgggatggggaagtggagaccgagaggctgctgccggggaaatatgcagtgcagacaagaggttcctgctactctcacctcatcag

SEQ ID NO: 178303 - DNA, 723 bp, Homo sapiens
  Payload ID: 15066
  Gene Symbol:
  Gene Name: RP11-505K9.4
  ENST ID: ENST00000561562
  CDS Start-End: 1-526
ggctgtgcatcctgtaaaaaactggatggacatgaagcgccgcgttgggccctacagaaggtgttacttcttttctcactgttcgacccctggggagcccctggtcgttttgcacgtggcactgactggtgacatctccagcaacatccaggcaatcgtgaaggaacatcctccatcagaaacagaagagaagaacaaaatcactgctgcgatcttttattccatcagcttgacccagcagggactccaaggggtggagctgggaacattcctcataaagcgagtcgtcaaggagttgcagtttacacattcaaaaccactgggaagccacagaccaggcaccgtgggatggggaagtggagaccgagaggctgctgccggggaaatatgcagtgcagacaagaggttcctgctactctcacctcatcagagttgttttctaccaggaaccagccccagccccagccccagcccctgctggcagatgctccggtaccctgggctgtggcttccaggatgtgcctgactccagggcagggctgtggccaccagggccaggacgagggtgaggagggggaggcatcacctcaggcacaaaattttaggggcagcaaagcactcccatcaccagaatacatactgtgtccatgcagtgttcttacacatcaaaattcatgaaaaaaaatccagaatggaaaaaatatcaaacttttattataaaca

SEQ ID NO: 178304 - DNA, 1052 bp, Homo sapiens
  Payload ID: 15067
  Gene Symbol:
  Gene Name: RP11-506B6.7
  ENST ID: ENST00000585611
  CDS Start-End: 843-1052
tcccctttggagatcactggaaacagcttctggaccacaaatggggtgaactactgtatcgagaaaggagagagtaagacttgagagctatctttttagctcagggtgcagtctgtactctaaaacaagtgtggaagtggagcactctacatatcctaagtgccaaaaatattcctcttcatgaaattcgccagatctgcaaaacacagctccttttgaagagaagagccagggaactccattagcaggctttgatggcattaataattcagagagatgccctctatcttctttaagatagacagaagggtcccttttaatgtataaccaggcagaaaagaggagaggacacgggtgggagagaagaggaggttgcaagccagcacctgccccacaccaggggatggaagctaattgtgaaaagctgccccactacagctgctgcctcttgaaaaatgcaaactgtgttttgagcaaacatatcatccacttgcagtataaaaacgctggtgtctctccgcggaaactccgagaggagcagaggtctgtagaggtagagacgtaggcttcggatcttttagaattctgctggaagtctccaagtcaagaggatctacaaagaaatactgagtggagactatactgagattctgttaaagacccacttgaattcagcccccattaggagaaactttggccggagcagccaacacatcacctggaagtcttcagactagactattgaagagtggattgtgtactgagggctcccaagtgcttccagaagccaataaaggatcacttcagtttacttcacggctaaggagtaacccttaagaaccatggccaaacgcctgcaagcagagttgtcctgtccagtttgcctggattttttctcctgttccatttctctctcttgtacacacgtgttctgctttgattgcatccagaggtatatactagaaaaccatgattttagagcgatgtgccccttgtgtcgagacgtggtgaaggtacctgctttggaagaatggcaagtgagcgtcctaaca

SEQ ID NO: 178305 - DNA, 567 bp, Homo sapiens
  Payload ID: 15067
  Gene Symbol:
  Gene Name: RP11-506B6.7
  ENST ID: ENST00000590673
  CDS Start-End: 462-567
tcccctttggagatcactggaaacagcttctggaccacaaatggggtgaactactgtatcgagaaaggagagagtaagacttgagagctatctttttagctcagggtgcaggcagtataaaaacgctggtgtctctccgcggaaactccgagaggagcagaggtctgtagaggtagagacgtaggcttcggatcttttagaattctgctggaagtctccaagtcaagaggatctacaaagaaatactgagtggagactatactgagattctgttaaagacccacttgaattcagcccccattaggagaaactttggccggagcagccaacacatcacctggaagtcttcagactagactattgaagagtggattgtgtactgagggctcccaagtgcttccagaagccaataaaggatcacttcagtttacttcacggctaaggagtaacccttaagaaccatggccaaacgcctgcaagcagagttgtcctgtccagtttgcctggattttttctcctgttccatttctctctcttgtacacacgtgttctgctttgattgcatcc

SEQ ID NO: 178306 - DNA, 894 bp, Homo sapiens
  Payload ID: 15067
  Gene Symbol:
  Gene Name: RP11-506B6.7
  ENST ID: ENST00000587816
  CDS Start-End: 509-894
tcccctttggagatcactggaaacagcttctggaccacaaatggggtgaactactgtatcgagaaaggagagagtaagacttgagagctatctttttagctcagggtgcaggttcaagcaattctatgcctcagcctcacaagtagctggaattacaggcagtataaaaacgctggtgtctctccgcggaaactccgagaggagcagaggtctgtagaggtagagacgtaggcttcggatcttttagaattctgctggaagtctccaagtcaagaggatctacaaagaaatactgagtggagactatactgagattctgttaaagacccacttgaattcagcccccattaggagaaactttggccggagcagccaacacatcacctggaagtcttcagactagactattgaagagtggattgtgtactgagggctcccaagtgcttccagaagccaataaaggatcacttcagtttacttcacggctaaggagtaacccttaagaaccatggccaaacgcctgcaagcagagttgtcctgtccagtttgcctggattttttctcctgttccatttctctctcttgtacacacgtgttctgctttgattgcatccagaggtatatactagaaaaccatgattttagagcgatgtgccccttgtgtcgagacgtggtgaaggtacctgctttggaagaatggcaagtgagcgtcctaacacttatgaccaagcagcacaatagccgacttgagcaaagtctgcacgtgagggaggagctccggcattttcgggaggatgtgaccctggatgcagccactgccagctccctccttgtcttctccaatgatctaagaagcgctcagtgtaagaagatccaccacgatctgacaaaaga

SEQ ID NO: 178307 - DNA, 2281 bp, Homo sapiens
  Payload ID: 15068
  Gene Symbol:
  Gene Name: RP11-507M3.1
  ENST ID: ENST00000610442
  CDS Start-End: 90-728
aaaatgtagacagtgatgatctggtaactggcacacttcccaagctcaagagctcaaaagaatggttggagcccaagcccctttgttttatggaggttttagctaaagaagatactgaggcagctattcaatcaatattatacaaagaaaattctgtaattaagggaaatgcatttatagaacattatgatccaaaagagtatgatcccttttatatgagcaagaaggaccccaattttctgaaggttaccatcccaccatttcatgaccctttgaaaaaagcacaatatgacaaggataacgaaaaaagaactcttcttcagtgtgagactggcaaaatatattcaataaaggaattcaaagaagttgagaaggttcagctgcattccagattcccacaaatttctaattcaaggcactttataactccaaacgagtggctgaaactgcctacaagatacatagaaagtgaattttgtagaaggagaagaaacaaagggtcatcctttctagaaagagaaccgctgtgctatcaggagggaaataatccaagtgccaaagaggccatctctgaagggtatttttcttccttgagcctcagccaggaacgggaggaagaccaggatgggtcttgttctgtctcccagctggagtggatacaagcatggcttgcttcagcctcaacctcccggactcaagtgatcctcccacctcagcttcctgagtagctgggactacaggtgcctgccaccatgcccagctaatttttaaacgttttgtagagacgcggtcccattgtgttgcccaggctggtcttgaacacctggcctcaagcgatcctcctacctcggcctcccaaagtgctgggattacatgcatgagccaccatgactggcctagactttttgatttaaagagactttttggatagaaatgcttttctctattacagttataaatgactaaaaatactagctatgccaaaatggcaaccagaggccgactgcaaagcttcaaaaggcttgatgctctcctggtagacaagtcttcagtctcttaaatgtttttttcatatgttgacattgaaatttcattttgtgtagatgttgggattatgtctcattcatttatttattcatcattcacttagtaagtatttaagtgcctgtttttcccaggtgctctgccaggttctggggatataaggatgagccaacataggctctctgccctaaagttagtgggagaaacagtaacaaaagattttaatactatgagattaactgacttagttgtggtatgtagaaagagacacagagcctgcagcaagagcctaggtgaagactcagtgaagcactacctattgaaaggagaatctttcaaatccttaacagttattttcaccatgtaaaaaaggcgacattgccagggaacatcaagtaaagagacaaatgctcagtcagagttttcgcattttcctgattggcccaaatgttttgaagtcggtttcttcacatcagaatccaaaccaggtccacctgtggcaccttcacccttcagtgggagtaaggagccggacgcgtcacttaaaaccattcctcttacgttgtcaccctcaatcttacagggattctcctgtccatggctgccaccaaaactgcgagttatgatgaacatttcaggccagaaaagttaagagaatggccggagcccgagtccgtttctttaatggaggattgtgacagtgcctgctttaaagcaggcgttgaaggggaatgttcgggctcagatttggccgagagtgtggccaagagtgtttccagtcgccagcctgggggctggcgcaccgacgggggcgggcagccgggcgggtgaaggcagccaccccagctccccggcagaagccaggtctgggcttgccagtcaattctgcatacttcagcgtctggtattagctagagaagacattgatgaagcagtatgtgcaatattatttaaagaaaattccattgtgaaggttacagtcccaccatttgttgatcctctgtttcaaagacagcaagaggtggatgaagagaggagaactggtcttcagtgtgagacaggaaaacgacattccataaaagaacttgaagaaatagagaaggccaggctgcatgccagctcgccctacttcactttcacttcacactgtgtgattccaaaagagtggcataaagcctctgcaagagccaggagtaaaacttacaaatacagtcctgaaaagctcatctatgcagac

SEQ ID NO: 178308 - DNA, 859 bp, Homo sapiens
  Payload ID: 15069
  Gene Symbol:
  Gene Name: RP11-511P7.5
  ENST ID: ENST00000491664
  CDS Start-End: 197-808
agctatttgataagagcaacgtcgcgggacgcttgccgtctttatgggggcggggagaaggggcgcgggtgtcgctgcgggagagttaccgtatttgcgttgagcagcgcagactgtagagcaaagagctgcggccggagaccggaggagcaggggctcagctgggctggactggtgattgcagctggaagtgcccatgaccgagctggcgtcctccgggggcgggtcccctgcgggggacggggaggagggtctgggggacgagcgaggcctggtcatccaccaccctgcagaggagcagccctaccgctgcccgctgtgcggccagaccttctcgcagcagcccagcctggtgcggcaccagaaggcgcacgccggagcgggccgcgcggctgccttcgtgtgtcccgagtgcggcaaggccttcagcgtcaagcacaacctcgaggtgcaccagcgcacgcacaccggggagcggcccttcccctgccccgagtgcggccgctgcttcagcctcaagcagaacctgctcacgcaccagcgcatccacagcggcgagaagccgcaccagtgcgcgcagtgcggccgctgcttccgcgagccgcgcttcctgctcaaccaccagcgcacccacgcgcgcatgcccgcgccgcacccgcgccgccccggcgtcttcggggagcggcggccctacttctgcccccgctgcggcaagagcttcgcgcgcgagggctcgctcaagacccatcagcgcagccacggccacgggcccgagggccaggcggcccacttaggacgcgtgctatgatgcgcccggggcctgctgccgacggctgcttcccgccccgcacgtgcgtcc

SEQ ID NO: 178309 - DNA, 521 bp, Homo sapiens
  Payload ID: 15069
  Gene Symbol:
  Gene Name: RP11-511P7.5
  ENST ID: ENST00000481877
  CDS Start-End: 66-350
gtcctttccgggagtgggagcgccgggacttaattacggactggtgattgcagctggaagtgcccatgaccgagctggcgtcctccgggggcgggtcccctgcgggggacggggaggagggtctgggggacgagcgaggcctggtcatccaccaccctgcagaggagcagccctaccgctgcccgctgtgcggccagaccttctcgcagcagcccagcctggtgcggcaccagaaggcgcacgccggagcgggccgcgcggctgccttcgtgtgtcccgagtgcggcaaggccttcagcgtcaagcacaacctcgagttgcagagtgggcaggatcttaagacccgataggtgcagaacccatctggacacggagaccaggaatggagttccatggaggcctggctggcactgcacccgggcatgaggacacatccagtaagaagacctgcctcaagaggtgcactgcggtgaccagtggaggtgactggttggagcctggaattggaagcagattccaag

SEQ ID NO: 178310 - DNA, 1167 bp, Homo sapiens
  Payload ID: 15069
  Gene Symbol:
  Gene Name: RP11-511P7.5
  ENST ID: ENST00000498682
  CDS Start-End: 201-812
cgcatggtcgccgctccggcccgggcgggcgcagcgctggcagccccgttttccgccagccgggctgccggagagttagacctcccagcctcacggggctgctgtgcggctgcgacgacgccggcgactgcggcgctgcagcggagacggaaggctcgggaggcggcgccatggactggtgattgcagctggaagtgcccatgaccgagctggcgtcctccgggggcgggtcccctgcgggggacggggaggagggtctgggggacgagcgaggcctggtcatccaccaccctgcagaggagcagccctaccgctgcccgctgtgcggccagaccttctcgcagcagcccagcctggtgcggcaccagaaggcgcacgccggagcgggccgcgcggctgccttcgtgtgtcccgagtgcggcaaggccttcagcgtcaagcacaacctcgaggtgcaccagcgcacgcacaccggggagcggcccttcccctgccccgagtgcggccgctgcttcagcctcaagcagaacctgctcacgcaccagcgcatccacagcggcgagaagccgcaccagtgcgcgcagtgcggccgctgcttccgcgagccgcgcttcctgctcaaccaccagcgcacccacgcgcgcatgcccgcgccgcacccgcgccgccccggcgtcttcggggagcggcggccctacttctgcccccgctgcggcaagagcttcgcgcgcgagggctcgctcaagacccatcagcgcagccacggccacgggcccgagggccaggcggcccacttaggacgcgtgctatgatgcgcccggggcctgctgccgacggctgcttcccgccccgcacgtgcgtccccgacccctggagatggccctgggccgcagctccctctctagatgggatcccgggagaggggcagcgctggcttgggctcttgaaggtgtgggccgccgccaggctccggccgcccgctcgcgttcctccctcgggaccctctggctggctgcgcacagctgcttccggctcctgccatggttctccttctctggcccatccggcctagagcagttgcagagtgggcaggatcttaagacccgataggtgcagaacccatctggacacggagaccaggaatggagttccatggaggcctggctg

SEQ ID NO: 178311 - DNA, 2748 bp, Homo sapiens
  Payload ID: 15070
  Gene Symbol:
  Gene Name: RP11-512M8.5
  ENST ID: ENST00000535844
  CDS Start-End: 16-1632
gggtggtggagcaagatggcggctcatctgtcctacggccgagtgaacctaaacgtgttgcgcgaggcggtgcgtcgcgagctgcgcgagttcctggacaagtgcgcaggaagcaaggcaatagtttgggatgaatacctaactggaccctttggcctgattgcacagtattcactattgaaggaacatgaagtggaaaaaatgttcacacttaaaggaaatcgtttgccggcagctgatgtgaagaatataattttttttgtcagacccaggctagagttgatggatataatcgctgaaaacgtgctcagtgaagatagacgaggcccaacgagagattttcatattctgtttgtgccacgccgtagcctgttgtgcgaacagcggttgaaggatctgggtgtcttgggatcctttattcacagggaggagtacagcttagatctcattccattcgatggggatctcttatccatggaatcagagggtgcattcaaacaagtggccaatatgatgatcaggatgaagagagagtttacaggaagccagaattcaatatttcctgtttttgataatctcttgttgcttgatcggaatgtggatttattaacacctcttgccactcagctgacatatgaaggactcattgatgaaatttatggcattcagaacagttatgtgaaattacctccagagaaatttgcacctaagaaacagggcgatggtggtaaggacctccccacggaagcaaagaagctgcagctgaattctgcagaggagctctatgctgagatccgagataagaacttcaacgcagttggctctgtgctcagcaagaaagcaaagatcatctctgcagcattcgaggaaagacacaatgctaagaccgtgggggagatcaagcagtttgtttcccagttgccccacatgcaggcagcaaggggctcgcttgcaaaccatacctcaattgcagaattgatcaaagatgtcactacttctgaagacttttttgataaattaaccgtggaacaggagtttatgtctggaatagacactgataaggtcaacaattacattgaggattgtatcgcccaaaagcactcgttgatcaaggtgttaagactagtttgcctccaatccgtgtgtaatagtgggctcaaacaaaaagttttggattattacaaaagagagattctccagacatacggctatgagcacatattgaccttacacaacctggagaaggccggcctgctgaaaccgcagacggggggcagaaacaattacccaactatacggaaaacattacgcctctggatggatgatgttaatgagcaaaaccccacggacatatcgtatgtgtacagtgggtatgccccgctcagtgtgcggctggcccagctgctttcccggcctggctggcggagcatcgaggaggtcctccgcatcctcccagggccccactttgaggagcggcagccactgcccacaggactgcagaagaaacgtcaaccgggagaaaaccgagtgactctgatatttttccttgggggcgtaaccttcgctgaaattgctgccctgcgatttctctcccagttggaagatggagaaatcagagcctcattcccttagtagtgaagcattgatgaggagagcagtgtctttggtaacagatagcacctctacctttctctctcagaccacatatgcgttgattgaagctattactgaatatactaaggctgtttataccttaacttctctttaccgacaatatacaagtttacttgggaaaatgaattcagaggaggaagatgaagtgtggcaggtgatcataggagccagagctgagatgacttcaaaacaccaagagtacttgaagctggaaaccacttggatgactgcagttggtctttcagagatggcagcagaagctgcatatcaaactggcgcagatcaggcctctataaccgccaggaatcacattcagctggtgaaactgcaggtggaagaggtgcaccagctctcccggaaagcagaaaccaagctggcagaagcacagatagaagagctccgtcagaaaacacaggaggaaggggaggagcgggctgagtcggagcaggaggcctacctgcgtgaggattgagggcctgagcacactgccctgtctccccactcagtggggaaagcaggggcagatgccaccctgcccagggttggcatgactgtctgtgcaccgagaagaggcggcagatcctgccctggccaatcaggcgagacgcctttgtgagctgtgagtgcctcctgtggtctcaggcttgcgctggacctggttcttagcccttgggcactgcaccctgtttaacatttcaccccactctgtacagctgctcttacccattttttttacctcacacccaaagcattttgcctacctgggtcagagagaggagtcctttttgtcatgcccttaagttcagcaactgtttaacctgttttcagtcttatttacgtcgtcaaaaatgatttagtacttgttccctctgttgggatgccagttgtggcagggggaggggaacctgtccagtttgtacgatttctttgtatgtatttctgatgtgttctctgatctgcccccactgtcctgtgaggacagctgaggccaaggagtgaaaaacctattactactaagagaaggggtgcagagtgtttacctggtgctctcaacaggacttaacatcaacagga

SEQ ID NO: 178312 - DNA, 600 bp, Homo sapiens
  Payload ID: 15071
  Gene Symbol:
  Gene Name: RP11-514O12.4
  ENST ID: ENST00000507747
  CDS Start-End: 1-557
gcctgggcggtgcggacaagcgcctgcgtgacaaccatgagtggaaaaaactaattatggttcagcactggcctgagacagtatgcgagaaaattcaaaacgactgtagagaccctccggattactggacaatacatggactatggcccgataaaagtgaaggatgtaatagatcgtggcccttcaatttagaagagattaaggatcttttgccagaaatgagggcatactggcctgacgtaattcactcgtttcccaatcgcagccgcttctggaagcatgagtgggaaaagcatgggacctgcgccgcccaggtggatgcgctcaactcccagaagaagtactttggcagaagcctggaactctacagggagctggacctcaacagtgtgcttctaaaattggggataaaaccatccatcaattactaccaaaccacagaggaggatctcaacctggatgtggagcccaccacagaagacactgcagaagaagtaactatacacgttttattacactctgctttgtttggggagattgggcccagaaggtggtgaagggggaaatggaagtttgaaattaaatatctgtgagcagtta

SEQ ID NO: 178313 - DNA, 3569 bp, Homo sapiens
  Payload ID: 15072
  Gene Symbol:
  Gene Name: RP11-514P8.6
  ENST ID: ENST00000519541
  CDS Start-End: 129-1019
tgtttgagaggagggggtagctgggaggggcagcaggagatgccaggaacagcttcccctagcacagcacagactacagacaggggagcctctggggctgcagacactgcagacggacggacagacagatggacaacagctggaggcttggcccggccatagggctctctgcgggacagtcccagctgctagtgtcgctgttgctgctactgacccgtgtccagcctgggacagacgtggctgccccagagcacatcagctatgtgccccagctctcaaacgacaccttggcggggaggctcaccctgtccaccttcacgctggagcagcctctaggccagttcagcagccacaacatctctgacttggataccatctggctggtggtggccctcagcaacgccacccagagcttcacggccccacggacaaaccaggacatccctgctcctgccaacttctcccagaggggctactatctcacactgagggccaaccgggtgctgtaccagaccagaggccagctccatgtcctccgcgtcggcaatgatacccactgccaaccaacaaaaattggctgcaaccatcccctaccaggacccggcccctacagggtgaagttcctggtgatgaatgacgaaggacccgtggctgaaaccaagtggtccagcgacactcgcctgcagcaagcccaggcacttcgggctgtccccggcccccagagcccgggcaccgtggtcatcatcgccatcctgtctatcctcctggccgtcctcctcacggtcctcctggctgtgctcatatacacctgccccagctcttctccttcaagcccagctcaggtgccgcctcttccaggaagccccctgggaccatctccagtctcagtgggagcagtgtgtccttggttgctcccagagtctatagcagagatctggacccaagactctggactcccggctttgggctggcagcactggcagcagcgacccctactgcatcgtgaaggtggacaatgagcccatcatcaggacagccacagtgtggaagaccctgtgccccttctggggtgaggagtaccaagtgcacctgccgcccaccttccacgctgtggctttctatgtcatggatgaggatgccctcagccgggacgacgttatcggaaaggtctgccttacaagggacaccatagcctctcaccctaagggtttcagcgggtgggcccacctgacggaggtcgaccccgatgaggaggtgcagggcgagatccacctgcggctggaagtgtggccaggggcccgggcctgccggctacgctgctctgtgctggaggccagggatctggccccaaaggaccgcaatggcacatctgaccccttcgtccgagtgcgctacaagggccggacacgggagacctcgatcgtgaagaagtcatgctacccacgctggaatgagacgtttgaatttgagctgcaggagggggccatggaggcgctgtgcgtggaggcctgggactgggaccttgtcagccgaaacgacttcctgggcaaagtggtgattgatgtccagagactgcgggtggtgcagcaggaggagggctggttccggctgcagcccgaccagtccaagagccggcggcatgacgagggcaacctgggctccttgcagctggaggtgcggctgcgggacgagacggtgctgccctccagctactaccagccactggtgcacctgctgtgccacgaggtcaagctgggcatgcagggcccagggcagctgatcccactcatcgaggagacaaccagcaccgagtgtcgccaggacgtggccacgaacctgctcaagctcttcctggggcaggggctggccaaggacttcctggacctgctcttccagctggagctgagtcgcaccagtgagaccaacaccctgttccggagcaactctctggcctcaaagtccatggagtcttttctgaaggtggccgggatgcagtacctgcacggcgtcctgggccccatcatcaacaaggtgtttgaggagaagaagtacgtggagctggaccccagcaaagtggaagttaaggatgtagggtgctccgggctgcaccgcccgcagaccgaggccgaggtgctggagcagagcgcgcagacgctgcgcgcccacctgggggccctgctgagcgcgctcagccgctcggttcgcgcgtgccccgccgtggtgcgcgccaccttccgccagctcttccggcgcgtgcgcgagcgcttccccggcgcccagcacgagaatgtaccgttcatcgccgtcaccagcttcctgtgcctgcgcttcttctctcccgccatcatgtcgcccaagctcttccacctgcgggagcgccacgcggacgcccgcaccagccgcaccctgctcctgttggccaaggcagtccagaacgtgggcaacatggacacgccggcttccagggccaaggaggcttggatggagccgctgcagcccaccgtgcgccagggcgtggcgcagctgaaggacttcatcaccaagctcgtggacatcgaggagaaggacgagctggacctgcagcggacgctgagtttgcaggcgccacctgtgaaggaggggccactcttcatccacaggaccaagggcaagggccccctcatgtcctcctccttcaagaagctctacttctccctcactaccgaggccctcagcttcgcgaagacgcccagctccaagaaaagcgccctcatcaagttagccaacatccgggcagcggaaaaggttgaggaaaagagctttggcggctcgcacgtcatgcaggtcatctacacggacgacgccggcaggccccagactgcctacctgcagtgcaagtgtgtgaatgagcttaaccagtggctgtctgcgctgcggaaggtgagcatcaacaacaccggactgctgggctcctaccaccctggcgtcttccgtggggacaagtggagctgctgccaccaaaaagagaagacaggtcagggctgcgataagacccggtcacgggtgaccctgcaggagtggaatgaccctcttgaccatgaccttgaggcccagctcatctaccggcacctgctgggcgtggaggccatgctgtgggagaggcaccgggagctgagcgggggcgcagaggcaggcacggtgcccacgagccctggcaaagtccccgaggactcattggcccggctgctccgggtgctgcaggacctccgcgaggcccatagctccagcccggccggctccccaccctcagagcccaactgcctcctggagctgcagacgtgaggcccgccctacgctccccttgctgagtcccctgccaagcgctcggagcccccccaggacactctgcaccccctcaccccggtcctcctcattagggtgcagggcctaggtctcttccaggtgggggaggggggagagtcaggaataaggggatccccagaagtgcagagctgagcaggcttgggcctgtcatggctggccggaagtgtccccagctccctacagacgctgtagccatcactgcctct

SEQ ID NO: 178314 - DNA, 911 bp, Homo sapiens
  Payload ID: 15073
  Gene Symbol:
  Gene Name: RP11-514P8.7
  ENST ID: ENST00000514917
  CDS Start-End: 83-911
gcagcggacgctgagtttgcaggcgccacctgtgaaggaggggccactcttcatccacaggaccaagggcaagggccccctcatgtcctcctccttcaagaagctctacttctccctcactaccgaggccctcagcttcgcgaagacgcccagctccaagtgtgtgaatgagcttaaccagtggctgtctgcgctgcggaaggtgagcatcaacaacaccggactgctgggctcctaccaccctggcgtcttccgtggggacaagtggagctgctgccaccaaaaagagaagacaggtcagggctgcgataagacccggtcacgggtgaccctgcaggagtggaatgaccctcttgaccatgaccttgaggcccagctcatctaccggcacctgctgggcgtggaggccatgctgtggatcaccattaacaaggacaccaaggtacccaatgcctgtttattcaccatcaacaaagaagaccacacactgggaaacatcattaaatcacgtgcctgcttccccttcgccttctgccgtgattgtcagtttcctgaggcctccccagccacgcttcctgtacagcctgcagaacttctggcatggaaaagcccctgtgcaactggtaaagatatcaataagcaccaggaggtatctaaatccaccaggagccataggcatcacgttgacatccatttaccagtcttccctggcaagattcttctgaattgtgctgccttggccaaaagagctgccccagagcacatcagctatgtgccccagctctcaaacgacaccttggcggggaggctcaccctgtccaccttcacgctggagcagcctctaggccagttcagcagccacaacatctctgacttggataccatctggctggtggtggccctcagcaacg

SEQ ID NO: 178315 - DNA, 2128 bp, Homo sapiens
  Payload ID: 15074
  Gene Symbol:
  Gene Name: RP11-51F16.8
  ENST ID: ENST00000580553
  CDS Start-End: 1-164
aagcagataagaaccgtgcccgagtagaagagaacttcttgaaactgacacatgtgcaaagacaggaagcagcacagtctcggcgggaggagaaaaaaagagcagagaaggagcgaatcatgaatgaggaagatcctgagaaacagcgcaggctggaggtttaagtttttgaaactgaagtaggcctacacagtaggaactcatgtcatttcttgtaagtaaaccagagcgaatcaggcggtgggtctcggaaaagttcattgttgagggcttaagagatttggaactatttggagagcagcctccgggtgacactcggagaaaaaccaatgatgcgagctcagagtcaatagcatccttctctaaacaggaggtcatgagtagctttctgccagagggagggtgttacgagctgctcactgtgataggcaaaggatttgaggacctgatgactgtgaatctagcaaggtacaaaccaacaggagagtacgtgactgtacggaggattaacctagaagcttgttccaatgagatggtaacattcttgcagggcgagctgcatgtctccaaactcttcaaccatcccaatatcgtgccatatcgagccacttttattgcagacaatgagctgtgggttgtcacatcattcatggcatacggagtgtcaaagccagccacatcctgatctctgtggatgggaaggtctacctgtctggtttgcgcagcaacctcagcatgataagccatgggcagcggcagcgagtggtccacgattttcccaagtacagtgtcaaggttctgccgtggctcagccccgaggtcctccagcagaatctccagggttatgatgccaagtctgacatctacagtgtgggaatcacagcctgtgaactggccaacggccatgtcccctttaaggatatgcctgccacccagatgctgctagagaaactgaacggcacagtgccctgcctgttggataccagcaccatccccgctgaggagctgaccatgagcccttcgcgctcagtggccaactctggcctgagtgacagcctgaccaccagcaccccccggccctccaacggtgactcgccctcccacccctaccaccgaaccttctccccccacttccaccactttgtggagcagtgccttcagcgcaacccggatgccaggcccagtgccagcaccctcctgaaccactctttcttcaagcagatcaagcgacgtgcctcagaggctttgcccgaattgcttcgtcctgtcacccccatcaccaattttgagggcagccagtctcaggaccacagtggaatctttggcctggtaacaaacctggaagagctggaggtggacgattgggagttctgagcctctgcaaactgtgcgcattctccagccagggatgcagaggccacccagaggcccttcctgagggccggccacattcccgccctcctgggcagattgggtagaaaggacattcttccaggaaagttgactgctgactgattgggaaagaaaatcctggagagacacttcactgctccaaggcttttgagacacaagggaatctcaacaaccagggatcaggagggtccaaagccgacattcccagtcctgtgagctcaggtgacctcctccgcagaagagagatgctgctctggccctgggagctgaattccaagcccagggtttggctccttaaacccgaggaccgccacctcttcccagtgcttgcgaccagcctcattctatttaactttgctctcagatgcctcagatgctataggtcagtgaaagggcaagtagtaagctgcctgcctcccttccctcagacctctccctcataattccagagaagggcatttctgtctttttaagcacagactaaggctggaacagtccatccttatccctcttctggcttgggccctgacacctaagtctttcccacggtttatgtgtgtgcctcattcctttcccaccaagaatccatcttagcgcctcctgccagctgccctggtgctttctccaagggccatcagtgtcttgcctagcttgagggcttaagtccttatgctgtgttagtttcgttgtcagaacaaattaaaattttcagaga

SEQ ID NO: 178316 - DNA, 397 bp, Homo sapiens
  Payload ID: 15075
  Gene Symbol:
  Gene Name: RP11-51L5.7
  ENST ID: ENST00000602932
  CDS Start-End: 32-241
agattgctcctcttcaccatctacaaatggaatgttcatccttactaccaatggggacctaccccgaccaatattcatccccaatggaatgccaaacactgttgtgccatgtggaactgagaagaacttcacaaatggaatggttaatggtcacatgccatctcttcctgacagcccctttacaggttacatcattgcagtccaccgaaaaatggatggacgtggtagaggtcgcgggtagttggtgggcacaagagcgagaggacatcattatgaaatacgaaaagggacaccgagctgggctgccagaggacaaggggcctaagccttttggaagctacaacaacaacatcgatcactttgggatgcagcatgagacggagctgcctcctctgac

SEQ ID NO: 178317 - DNA, 988 bp, Homo sapiens
  Payload ID: 15076
  Gene Symbol:
  Gene Name: RP11-520P18.5
  ENST ID: ENST00000562505
  CDS Start-End: 222-638
cgtgattggggttgaccccctcctccccggcctcgggctattttccgcaggaggccgctgcaggcagacgctgaggccctcggggaccccggagccgccccagtacaagagccccgaggaggggctggccggtcccgccccctcggtcccagggctgactcctcctccaggacgcagatccctgcagcccggcaggagagaaggctgagccttctggcgtcatggagaggctcgtcctaaccctgtgcaccctcccgctggctgtggcgtctgctggctgcgccacgacgccagctcgcaacctgagctgctaccagtgcttcaaggtcagcagctggacggagtgcccgcccacctggtgcagcccgctggaccaagtctgcatctccaacgaggtggtcgtctcttttaaatggagtgtacgcgtcctgctcagcaaacgctgtgctcccagatgtcccaacgacaacatgaagttcgaatggtcgccggcccccatggtgcaaggcgtgatcaccaggcgctgctgttcctgggctctctgcaacagggcactgaccccacaggaggggcgctgggccctgcgaggggggctcctgctccaggtgggcctcagcctcctcagggccctgttgtgagggccctccctttacgccccctcctggccctgctggcccatcccgtctcctgcctccaactgccatcctgcctccgccccttccaggacactggggggggaccctccctctctgaggtggtggggagggtgccattgcctccatcccggatctagccacctcactcctccccaccgggggcccctttgctggagaaccccaaggattcagcaactgctcctcctggggaaggacagtgcctctgatgtgggtgatgggaaggacggtgcctctgatgtgggtgatgggaaggacggtgcctctggtgtgggtgatgggaaggacggtgcctctggtgtgggtgatgggat

SEQ ID NO: 178318 - DNA, 987 bp, Homo sapiens
  Payload ID: 15076
  Gene Symbol:
  Gene Name: RP11-520P18.5
  ENST ID: ENST00000631950
  CDS Start-End: 222-638
cgtgattggggttgaccccctcctccccggcctcgggctattttccgcaggaggccgctgcaggcagacgctgaggccctcggggaccccggagccgccccagtacaagagccccgaggaggggctggccggtcccgccccctcggtcccagggctgactcctcctccaggacgcagatccctgcagcccggcaggagagaaggctgagccttctggcgtcatggagaggctcgtcctaaccctgtgcaccctcccgctggctgtggcgtctgctggctgcgccacgacgccagctcgcaacctgagctgctaccagtgcttcaaggtcagcagctggacggagtgcccgcccacctggtgcagcccgctggaccaagtctgcatctccaacgaggtggtcgtctcttttaaatggagtgtacgcgtcctgctcagcaaacgctgtgctcccagatgtcccaacgacaacatgaagttcgaatggtcgccggcccccatggtgcaaggcgtgatcaccaggcgctgctgttcctgggctctctgcaacagggcactgaccccacaggaggggcgctgggccctgcgaggggggctcctgctccaggtgggcctcagcctcctcagggccctgttgtgagggccctccctttacgccccctcctggccctgctggcccatcccgtctcctgcctccaactgccatcctgcctccgccccttccaggacactggggggggaccctccctctctgaggtggtggggagggtgccattgcctccatcccggatctagccacctcactcctccccaccgggggcccctttgctggagaaccccaaggattcagcaactgctcctcctggggaaggacagtgcctctgatgtgggtgatgggaaggacggtgcctctgatgtgggtgatgggaaggacggtgcctctggtgtgggtgatgggaaggacggtgcctctggtgtgggtgatggga

SEQ ID NO: 178319 - DNA, 2110 bp, Homo sapiens
  Payload ID: 15077
  Gene Symbol:
  Gene Name: RP11-529K1.3
  ENST ID: ENST00000443119
  CDS Start-End: 75-1514
acccccggagcccacgatccctcgtgccatccctcgaatccaccagcacgagcgtcccacccgcgcctgggaccatggccactgactcatgggccctggcggtggacgagcaggaagctgcggctgagtcgttgagcaacttgcatcttaaggaagagaaaatcaaaccagataccaatggtgctgttgtcaagaccaatgccaatgcagagaagacagatgaagaagagaaagaggacagagctgcccagtccttactcaacaagctgatcagaagcaaccttgttgataacacaaaccaagtggaagtcctgcaacgggatccaaactcccctctgtactcggtgaagtcgtttgaagagcttcggctgaaaccacagcttctccagggagtctatgccatgggcttcaatcgaccctccaagatacaagagaacgcattacccatgatgcttgctgaacccccacagaatctgattgcccagtctcagtctggcactggtaaaacagctgcctttgtcttagccatgctcagccgagtggagccatcagacagatacccccagtgtctgtgcctctccccaacatatgagctggcgcttcaaacaggaaaagtgattgagcagatgggcaaattttacccagaactgaagcttgcctatgccgttcgaggcaataaattggaaagaggccagaagatcagtgagcagattgtcattggcacccctgggaccgtgctggactggtgctccaagctcaagttcattgatcccaagaaaatcaaggtgtttgttctggatgaggctgatgtcatgatagccactcagggccaccaagatcagagcatccgcatccagaggatgctgcccaggaactgccagatgctgcttttctccgccacctttgaagactctgtgtggaagtttgcccagaaagtggtcccagacccaaatgttatcaaactgaagcgtgaggaagagaccctggataccatcaagcagtactatgtcctgtgcagcagcagagacgagaagttccaggccttgtgtaacctctacggggccatcaccattgctcaagccatgatcttctgccatactcgcaaaacagctagttggctggcagcagagctctcaaaagaaggccaccaggtggctctgctgagtggggagatgatggtggagcagagggctgcggtgattgagcgcttccgagagggcaaagagaaggttttggtgaccaccaacgtgtgtgcccgcggcattgatgttgaacaagtgtctgtcgtcatcaactttgatcttcccgtggacaaggacgggaatcctgacaatgagacctacctgcaccggatcgggcgcacgggccgctttggcaagaggggcctggcagtgaacatggtggacagcaagcacagcatgaacatcctgaacagaatccaggagcattttaataagaagatagaaagattggacacagatgatttggacgagattgagaaaatagccaactgagaagctccaccagccactgatgccagccctggcactgcccctgcacaggagacaagtgcatttagggcacaggccccgacatcaccccaaggacaacggcagaagtagagagaaactacctacctcacttcaaattatgtttggacttgacaaaaataggtgcaaatgatggggggcaatagaagaaaaaatttgcattttggaaaattgggtcctttccccacttttttaaagccacattcccccatctttataataatctggtcacagtggtagtcgctggccccaggaccccctcctgattttggctaggcatcgtggaaccagctccagcccctgaagaaacgatagatgtgcaggttgtgcggaagaggctgagtggaaaatggtgtgagccccaccgctgtgcatcgaatgagggaagtggcagcagagaggccagagctgccccctctctgtctcttcaatggacccttcacaagtgtttctcctgcccttggggctgtcttccttctcctgaaatccagagactttcttgctcatcccttctccctttcacttctgttctctgctgcagaaagcagacttgcatatcc

SEQ ID NO: 178320 - DNA, 867 bp, Homo sapiens
  Payload ID: 15077
  Gene Symbol:
  Gene Name: RP11-529K1.3
  ENST ID: ENST00000567706
  CDS Start-End: 85-867
cctgccgcgaacccccggagcccacgatccctcgtgccatccctcgaatccaccagcacgagcgtcccacccgcgcctgggaccatggccactgactcatgggccctggcggtggacgagcaggaagctgcggctgagtcgttgagcaacttgcatcttaaggaagagaaaatcaaaccagataccaatggtgctgttgtcaagaccaatgccaatgcagagaagacagatgaagaagagaaagaggacagagctgcccagtccttactcaacaagctgatcagaagcaaccttgttgataacacaaaccaagtggaagtcctgcagcgggatccaaactcccctctgtactcggtgaagtcttttgaagagcttcggctgaaaccacagcttctccaaggagtctatgccatgggtttcaatcgtccatccaagatacaagagaacgcattgccactgatgcttgctgagcccccacagaacttaattgcccaatctcagtctggtactggtaaaacagctgccttcgtgctggccatgcttagccaagtagaacctgcaaacaaatacccccagtgtctatgtctctccccaacgtatgagctcgccctccaaacaggaaaagtgattgaacaaatgggcaaattttaccctgaactgaagctagcttatgctgttcgaggcaataaattggaaagaggccagaagatcagtgagcagattgtcattggcacccctgggaccgtgctggactggtgctccaagctcaagttcattgatcccaagaaaatcaaggtgtttgttctggatgaggctgatgtcatgatagccactcagggccaccaagatcagagcatccgcatccag

SEQ ID NO: 178321 - DNA, 565 bp, Homo sapiens
  Payload ID: 15077
  Gene Symbol:
  Gene Name: RP11-529K1.3
  ENST ID: ENST00000565116
  CDS Start-End: 105-197
gtagtggggctggagcagagcctgccgcgaacccccggagcccacgatccctcgtgccatccctcgaatccaccagcacgagcgtcccacccgcgcctgggaccatggccactgactcatgggccctggcggtggacgagcaggaagctgcggctgagtcgaggacagagctgcccagtccttactcaacaagctgatcagaagcaaccttgttgataacacaaaccaagtggaagtcctgcagcgggatccaaactcccctctgtactcggtgaagtcttttgaagagcttcggctcccacagaacttaattgcccaatctcagtctggtactggtaaaacagctgccttcgtgctggccatgcttagccaagtagaacctgcaaacaaatacccccagtgtctatgtctctccccaacgtatgagctcgccctccaaacaggaaaagtgattgaacaaatgggcaaattttaccctgaactgaagctagcttatgctgttcgaggcaataaattggaaagaggccagaagatcagtgagcagattgtcattggcacccctggg

SEQ ID NO: 178322 - DNA, 1042 bp, Homo sapiens
  Payload ID: 15078
  Gene Symbol:
  Gene Name: RP11-540D14.8
  ENST ID: ENST00000505139
  CDS Start-End: 77-778
actttgtacctttctctcctcgactgtgaagcgggccgggacctgccaggccagaccaaaccggacctcgggggcgatgcggctgctgcccctgctgcggactgtcctctgggccgcgttcctcggctcccctctgcgcgggggctccagcctccgccacgtagtctactggaactccagtaaccccagcctgcggcgagagggctacaccgtgcaggtgaacgtgaacgactatctggatatttactgcccgcactacaacagctcgggggtgggccccggggcgggaccggggcccggaggcggggcagagcagtacgtgctgtacatggtgagccgcaacggctaccgcacctgcaacgccagccagggcttcaagcgctgggagtgcaaccggccgcacgccccgcacagccccatcaagttctcggagaagttccagcgctacagcgccttctctctgggctacgagttccacgccggccacgagtactactacatctccacgcccactcacaacctgcactggaagtgtctgaggatgaaggtgttcgtctgctgcgcctccacatcgcactccggggagaagccggtccccactctcccccagttcaccatgggccccaatgtgaagatcaacgtgctggaagactttgagggagagaaccctcaggtgcccaagcttgagaagagcatcagcgggaccagccccaaacgggaacacctgcccctggccgtgggcatcgccttcttcctcatgacgttcttggcctcctagctctgccccctcccctggggggggagagatggggcggggcttggaaggagcagggagcctttggcctctccaagggaagcctagtgggcctagacccctcctcccatggctagaagtggggcctgcaccatacatctgtgtccgccccctctaccccttccccccacgtagggcactgtagtggaccaagcacggggacagccatgggtcccgggcggccttgtggctctggtaatgtttggtaccaaacttgggggccaaaaa

SEQ ID NO: 178323 - DNA, 2349 bp, Homo sapiens
  Payload ID: 15079
  Gene Symbol:
  Gene Name: RP11-542C16.2
  ENST ID: ENST00000315601
  CDS Start-End: 1-995
gtggggtcttccacaacggtctcaagatctgcgagaagtttgggcccaatctggacacgtgccctgaaggcaccatcctgggactgcggctggacagctctggggggctgcatcttcatgttaatggggtggaccagggggtagctgtgccagatgtgccccagccctgccatgcgcttgtggacctctatgggcagtgtgagcaggtgacaatcgtgaaccctgagccaggggctgccagtgggaaaagtgctggaacccaaggggacatggagaaagcagacatggtggacggtatcaaagagagtgtgtgctggggtccaccacctgccgctagtcctctaaagagctgcgagtaccatgccctttgctctcgcttccaagaactcctgctgcttcccgaagattatttcatgcctccgccaaagcgaagcctgtgctactgtgagtcttgccggaagctgcgaggagacgaggcccacaggcgcagaggggagcctccccgggaatatgcactgccctttggctggtgcaggttcaacctcagagtgaatccccgcctggaggctgggacactaaccaagaagtggcacatggcatatcacgggagcaatgttgccgctgtacggagagtgctggaccgaggggagctgggagcaggtactgcctccatcctgagctgccgtcctttgaagggagaacctggggtagggttcgaggagcctggcgagaactgtgcacctcctcgggaggagcagccccctcctgtgctgctttccccctcccttcaatatgctggggcggagaccctggcctccaaagtgcaattccgggaccccaaatcccagcggacgcaccaggctcaggtggcgttccaggagccaataaacaccgtctcagagcctccgcctcggcctctctctcgcgcgcccctctccggagcccgcgtcccctggggtgccaccaggtgggcccgcgaaattaaagagagctgaggatgccaaggccagtctgcagccgtcgtcgctcacgttcccggcgacggggtttgtacgccgcgggcacccgtcgcagcgcgcttccgccttctttcacctgtgaggtcggccgccgccgtgactccggaaggactcggccgggccgccggatgtgacgcaggggccagggcgcgtcggagccgctgagaaagcgcagagaaggcgggccccgtctgaggtctggcagtcagagacagccgggcgcccacggcccgagcgcccacggcagcaccatgcccgcactcctggagcgccccaagctttccaacgccatggccagggcgctgcaccggcacattatgatggagcgggagcgcaagcggcaggaggaagaagaggtggataagatgatggaacagaagatgaaggaagaacaggagagaaggaagaaaaaggagatggaagagagaatgtcattagaggagaccaaggaacaaattctgaagttggaggagaagcttttggctctacaggaagagaagcaccagcttttcctgcagctcaagaaagttttacatgaggaagaaaaacggaggcgaaaggaacagagtgacctgaccaccctaacatcagctgcataccagcagagcctgactgttcacacaggaactcatctcctcagcatgcaggggagccctggaggacacaatcgcccaggcaccctcatggcagctgacagagccaaacaaatgtttggaccccaagtgcttacgacccggcactacgtgggctcagcagctgcttttgcagggacaccagagcatggacaattccaaggcagtcctggtggtgcctatgggactgctcagcccccacctcactatgggcccacacagccagcttatagtcctagtcagcagctcagagctccttcggcattccctgcagtgcagtacctatctcagccacagccacagccctatgctgtgcatggccactttcagcccactcagacaggtttcctccagcctggtggtgccctgtccttgcaaaagcagatggaacatgctaaccagcagactggcttctccgactcatcctctctgcgccccatgcacccccaggctctgcatccagcccctggactccttgcttccccccagctccctgtgcagatgcagccagcaggaaagtcgggctttgcagctaccagccaacctggccctcggctccccttcatccaacacagccagaacccgcgattctaccacaagtgaccatcagattatatcttcaacaccacaccccccaccccatcgtgggtgagggtatcccctgtgtgtcccaggccaataaaatctacctgccactg

SEQ ID NO: 178324 - DNA, 2571 bp, Homo sapiens
  Payload ID: 15079
  Gene Symbol:
  Gene Name: RP11-542C16.2
  ENST ID: ENST00000575474
  CDS Start-End: 1-1217
cttcccttgtcctgggagtcatcacctgcgcgcctgagaggctcaacttccctgcttctgcctgtgccctcaaacgggcagcctggctgctgcggggccgtggggtcttccacaacggtctcaagatctgcgagaagtttgggcccaatctggacacgtgccctgaaggcaccatcctgggactgcggctggacagctctggggggctgcatcttcatgttaatggggtggaccagggggtagctgtgccagatgtgccccagccctgccatgcgcttgtggacctctatgggcagtgtgagcaggtgacaatcgtgaaccctgagccaggggctgccagtgggaaaagtgctggaacccaaggggacatggagaaagcagacatggtggacggtatcaaagagagtgtgtgctggggtccaccacctgccgctagtcctctaaagagctgcgagtaccatgccctttgctctcgcttccaagaactcctgctgcttcccgaagattatttcatgcctccgccaaagcgaagcctgtgctactgtgagtcttgccggaagctgcgaggagacgaggcccacaggcgcagaggggagcctccccgggaatatgcactgccctttggctggtgcaggttcaacctcagagtgaatccccgcctggaggctgggacactaaccaagaagtggcacatggcatatcacgggagcaatgttgccgctgtacggagagtgctggaccgaggggagctgggagcaggtactgcctccatcctgagctgccgtcctttgaagggagaacctggggtagggttcgaggagcctggcgagaactgtgcacctcctcgggaggagcagccccctcctgtgctgctttccccctcccttcaatatgctggggcggagaccctggcctccaaagtgcaattccgggaccccaaatcccagcggacgcaccaggctcaggtggcgttccagaggagtctctccctgtgcccacatgaagctgctttttccggggccaccgggcgggagtggggaagggtgggcgcacggaagatgggggcctctgtacagttgttactgactctgatttctaaggagccaataaacaccgtctcagagcctccgcctcggcctctctctcgcgcgcccctctccggagcccgcgtcccctggggtgccaccaggtgggcccgcgaaattaaagagagctgaggatgccaaggccagtctgcagccgtcgtcgctcacgttcccggcgacggggtttgtacgccgcgggcacccgtcgcagcgcgcttccgccttctttcacctgtgaggtcggccgccgccgtgactccggaaggactcggccgggccgccggatgtgacgcaggggccagggcgcgtcggagccgctgagaaagcgcagagaaggcgggccccgtctgaggtctggcagtcagagacagccgggcgcccacggcccgagcgcccacggcagcaccatgcccgcactcctggagcgccccaagctttccaacgccatggccagggcgctgcaccggcacattatgatggagcgggagcgcaagcggcaggaggaagaagaggtggataagatgatggaacagaagatgaaggaagaacaggagagaaggaagaaaaaggagatggaagagagaatgtcattagaggagaccaaggaacaaattctgaagttggaggagaagcttttggctctacaggaagagaagcaccagcttttcctgcagctcaagaaagttttacatgaggaagaaaaacggaggcgaaaggaacagagtgacctgaccaccctaacatcagctgcataccagcagagcctgactgttcacacaggaactcatctcctcagcatgcaggggagccctggaggacacaatcgcccaggcaccctcatggcagctgacagagccaaacaaatgtttggaccccaagtgcttacgacccggcactacgtgggctcagcagctgcttttgcagggacaccagagcatggacaattccaaggcagtcctggtggtgcctatgggactgctcagcccccacctcactatgggcccacacagccagcttatagtcctagtcagcagctcagagctccttcggcattccctgcagtgcagtacctatctcagccacagccacagccctatgctgtgcatggccactttcagcccactcagacaggtttcctccagcctggtggtgccctgtccttgcaaaagcagatggaacatgctaaccagcagactggcttctccgactcatcctctctgcgccccatgcacccccaggctctgcatccagcccctggactccttgcttccccccagctccctgtgcagatgcagccagcaggaaagtcgggctttgcagctaccagccaacctggccctcggctccccttcatccaacacagccagaacccgcgattctaccacaagtgaccatcagattatatcttcaacaccacaccccccaccccatcgtgggtgagggtatcccctgtgtgtcccaggccaataaaatctacctgccactg

SEQ ID NO: 178325 - DNA, 2096 bp, Homo sapiens
  Payload ID: 15080
  Gene Symbol:
  Gene Name: RP11-544M22.13
  ENST ID: ENST00000289779
  CDS Start-End: 56-241
gccgagagggcgggccagggccgcactccggagactcgcggttgctacgcgcaccatggctggagacggagtttcgctcttgatgcccagcaggctggagtgcaatggcgcgatttcagctcactgcaacctcctcctcccagaggtacttctcagccctctagctccaactgagaacccagccagtcaggaagtcgctacttcgggaacaccaaccaatcagggggccgtcacctgctgaaggagtccttcggcggctgttgtgtcgggagcctgatcgcgatggggacaaaggcgcaagtcgagaggaaactgttgtgcctcttcatattggcgatcctgttgtgctccctggcattgggcagtgttacagtgcactcttctgaacctgaagtcagaattcctgagaataatcctgtgaagttgtcctgtgcctactcgggcttttcttctccccgtgtggagtggaagtttgaccaaggagacaccaccagactcgtttgctataataacaagatcacagcttcctatgaggaccgggtgaccttcttgccaactggtatcaccttcaagtccgtgacacgggaagacactgggacatacacttgtatggtctctgaggaaggcggcaacagctatggggaggtcaaggtcaagctcatcgtgcttgtgcctccatccaagcctacagttaacatcccctcctctgccaccattgggaaccgggcagtgctgacatgctcagaacaagatggttccccaccttctgaatacacctggttcaaagatgggatagtgatgcctacgaatcccaaaagcacccgtgccttcagcaactcttcctatgtcctgaatcccacaacaggagagctggtctttgatcccctgtcagcctctgatactggagaatacagctgtgaggcacggaatgggtatgggacacccatgacttcaaatgctgtgcgcatggaagctgtggagcggaatgtgggggtcatcgtggcagccgtccttgtaaccctgattctcctgggaatcttggtttttggcatctggtttgcctatagccgaggccactttgacagaacaaagaaagggacttcgagtaagaaggtgatttacagccagcctagtgcccgaagtgaaggagaattcaaacagacctcgtcattcctggtgtgagcctggtcggctcaccgcctatcatctgcatttgccttactcaggtgctaccggactctggcccctgatgtctgtagtttcacaggatgccttatttgtcttctacaccccacagggccccctacttcttcggatgtgtttttaataatgtcagctatgtgccccatcctccttcatgccctccctccctttcctaccactgctgagtggcctggaacttgtttaaagtgtttattccccatttctttgagggatcaggaaggaatcctgggtatgccattgacttcccttctaagtagacagcaaaaatggcgggggtcgcaggaatctgcactcaactgcccacctggctggcagggatctttgaataggtatcttgagcttggttctgggctctttccttgtgtactgacgaccagggccagctgttctagagcgggaattagaggctagagcggctgaaatggttgtttggtgatgacactggggtccttccatctctggggcccactctcttctgtcttcccatgggaagtgccactgggatccctctgccctgtcctcctgaatacaagctgactgacattgactgtgtctgtggaaaatgggagctcttgttgtggagagcatagtaaattttcagagaacttgaagccaaaaggatttaaaaccgctgctctaaagaaaagaaaactggaggctgggcgcagtggctcacgcctataatcccagaggctgaggcaggcggatcacctgaggtcaggagttcaagatcagcctgaccaacatggagaaaccctactaaaaatacaaagttagccaggcatagtggtgcatgcctgtaatcccagctgctcaggagcctggcaacaagagcaaaactccagctcaaaaaaaaaaagaaagaaaagaaa

SEQ ID NO: 178326 - DNA, 813 bp, Homo sapiens
  Payload ID: 15080
  Gene Symbol:
  Gene Name: RP11-544M22.13
  ENST ID: ENST00000470694
  CDS Start-End: 74-181
acgggagatgttgcaggcgccgagagggcgggccagggccgcactccggagactcgcggttgctacgcgcaccatggctggagaggtacttctcagccctctagctccaactgagaacccagccagtcaggaagtcgctacttcgggaacaccaaccaatcagggggccgtcacctgctgaaggagtccttcggcggctgttgtgtcgggagcctgatcgcgatggggacaaaggcgcaagtcgagaggaaactgttgtgcctcttcatattggcgatcctgttgtgctccctggcattgggcagtgttacagtgcactcttctgaacctgaagtcagaattcctgagaataatcctgtgaagttgtcctgtgcctactcgggcttttcttctccccgtgtggagtggaagtttgaccaaggagacaccaccagactcgtttgctataataacaagatcacagcttcctatgaggaccgggtgaccttcttgccaactggtatcaccttcaagtccgtgacacgggaagacactgggacatacacttgtatggtctctgaggaaggcggcaacagctatggggaggtcaaggtcaagctcatcgtgcttgtgcctccatccaagcctacagttaacatcccctcctctgccaccattgggaaccgggcagtgctgacatgctcagaacaagatggttccccaccttctgaatacacctggttcaaagatgggatagtgatgcctacgaatcccaaaagcacccgtgccttcagcaactcttcctatgtcctgaatcccacaacaggagagctg

SEQ ID NO: 178327 - DNA, 2268 bp, Homo sapiens
  Payload ID: 15081
  Gene Symbol:
  Gene Name: RP11-545J16.1
  ENST ID: ENST00000381541
  CDS Start-End: 66-2129
gtgatcatttcaaaccaagcatcagcaacaattaaaaatattcacttggtatctgtagtttaataatggaccaacatcaacatttgaataaaacagcagagtcagcatcttcagagaaaaagaaaacaagacgctgcaatggattcaagatgttcttggcagccctgtcattcagctatattgctaaagcactaggtggaatcattatgaaaatttccatcactcaaatagaaaggagatttgacatatcctcttctcttgctggtttaattgatggaagctttgaaattggaaatttgcttgtgattgtatttgtaagttactttggatctaaactacacagaccgaagttaattggaattggttgtctccttatgggaactggaagtattttgacatctttaccacatttcttcatgggatattacaggtattctaaagaaaccaatattgatccatcagaaaattcaacatcaaacttaccaaactgtttaattaatcaaatgttatcactcaatagaacaccgtctgagataatagaaagaggttgtgtgaaggaatctgggtcacacatgtggatctatgtcttcatgggtaatatgcttcgtggcataggggaaacccccatagtaccattggggatttcttacattgatgattttgcaaaagaaggacattcttccttgtatttaggtactgtgaatgtaatgggaatgactggtctagtttttgcctttatgctgggatctctgtttgctaaaatgtatgtggatatcggatatgtggatctgagcactatcaggataactcctaaggactctcgttgggttggagcttggtggcttggtttccttgtgtctggaatagtatccattatttcttctataccattctttttcttgcctctaaatccaaataaaccacagaaagaaaggaaagtttcactatttttgcatgtgctaaaaactaatgataaaaggaatcaaatagctaatttgaccaaccgaagaaaatatattaccaaaaatgtgactggctttttccagtctttgaaaagcatccttaccaatcccctgtatgttatatttgtaatttttacattgttacacatgagcagctacattgcttctcttacttatatcattaaaatggtggagcaacagtatggttggtctgcatctaagactaactttttgttgggagtcctcgccctacctgctgttgcaattggcatgttttcaggaggatatatcattaaaaaattcaaattgtctttagttggacttgccaaattggcattttgttctgcaacagtgcatctcttatctcaagttttatatttctttctaatctgtgaaagcaaatcagttgccggcctaaccttgacctatgatggaaatagtccagtaagatctcatgtagatgtaccactttcttattgcaactcagagtgcaattgtgatgaaagtcaatgggaacccgtctgtggaaacaatggaataacttacctgtcaccttgtctagcaggatgcaaatcttcaagtggtaataaagagcccatagtgttttataactgtagctgtgtggaagtaattggtctccagaacaaaaattactcagcgcacttgggtgaatgcccaagagatgatgcttgtacaaggaaatcttacgtttattttgtaattcaagtcttagatgctttcctctgtgcagttggacttacctcatattccgtgctggtgattaggattgttcaacctgaattgaaagcacttgcaatcggcttccattcaatgattatgcgatcgctaggaggtattctagttccaatatattttggggctctgattgatacaacgtgtatgaagtggtccaccaacagctgtggagcacgaggggcttgtaggatatataattccacatatttgggaagagccttcttcggcttgaaggtagccctaatatttccagtacttgttttacttactgtatttatttttgttgtaaggaaaaaatcccatggaaaggataccaaagtattagaaaatgaaagacaagtaatggatgaagcaaacttagaattcttaaacgacagtgaacattttgtaccttctgctgaagaacagtaaagcatgtaattaagaggaggaaaaaaataattttgctgctgtttccaactaatgtattgattccataagacgttatttttgtggtgttctgagtcttttcactgagaattcccacattcttcacttatgatgcaacaat

SEQ ID NO: 178328 - DNA, 2451 bp, Homo sapiens
  Payload ID: 15081
  Gene Symbol:
  Gene Name: RP11-545J16.1
  ENST ID: ENST00000540229
  CDS Start-End: 66-2312
gtgatcatttcaaaccaagcatcagcaacaattaaaaatattcacttggtatctgtagtttaataatggaccaacatcaacatttgaataaaacagcagagtcagcatcttcagagaaaaagaaaacaagacgctgcaatggattcaagatgttcttggcagccctgtcattcagctatattgctaaagcactaggtggaatcattatgaaaatttccatcactcaaatagaaaggagatttgacatatcctcttctcttgctggtttaattgatggaagctttgaaattggaaatttgcttgtgattgtatttgtaagttactttggatctaaactacacagaccgaagttaattggaattggttgtctccttatgggaactggaagtattttgacatctttaccacatttcttcatgggatattataggtattctaaagaaacccatattaatccatcagaaaattcaacatcaagtttatcaacctgtttaattaatcaaaccttatcattcaatggaacatcacctgagatagtagaaaaagattgtgtaaaggaatctgggtcacacatgtggatctatgtcttcatggggaatatgcttcgtggcataggggaaacccccatagtaccattggggatttcatacattgatgattttgcaaaagaaggacattcttccttgtatttaggtagtttgaatgcaataggaatgattggtccagtcattggctttgcactgggatctctgtttgctaaaatgtacgtggatattggatatgtagatctgagcactatcagaataactcctaaggactctcgttgggttggagcttggtggcttggtttccttgtgtctggactattttccattatttcttccataccattttttttcttgccgaaaaatccaaataaaccacaaaaagaaagaaaaatttcactatcattgcatgtgctgaaaacaaatgatgatagaaatcaaacagctaatttgaccaaccaaggaaaaaatgttaccaaaaatgtgactggttttttccagtctttgaaaagcatccttaccaatcccctgtatgttatatttctgcttttgacattgttacaagtaagcagctttattggttcttttacttacgtctttaaatatatggagcaacagtacggtcagtctgcatctcatgctaactttttgttgggaatcataaccattcctacggttgcaactggaatgtttttaggaggatttatcattaaaaaattcaaattgtctttagttggaattgccaaattttcatttcttacttcgatgatatccttcttgtttcaacttctatatttccctctaatctgcgaaagcaaatcagttgccggcctaaccttgacctatgatggaaataattcagtggcatctcatgtagatgtaccactttcttattgcaactcagagtgcaattgtgatgaaagtcagtgggaaccagtctgtgggaacaatggaataacttacctgtcaccttgtctagcaggatgcaaatcctcaagtggtattaaaaagcatacagtgttttataactgtagttgtgtggaagtaactggtctccagaacagaaattactcagcacacttgggtgaatgcccaagagataatacttgtacaaggaaatttttcatctatgttgcaattcaagtcataaactctttgttctctgcaacaggaggtaccacatttatcttgttgactgtgaagattgttcaacctgaattgaaagcacttgcaatgggtttccagtcaatggttataagaacactaggaggaattctagctccaatatattttggggctctgattgataaaacatgtatgaagtggtccaccaacagctgtggagcacaaggggcttgtaggatatataattccgtattttttgggattgttcaacctgaattgaaagcacttgcaatcggcttccattcaatgattatgcgatcgctaggaggtattctagttccaatatattttggggctctgattgatacaacgtgtatgaagtggtccaccaacagctgtggagcacgaggggcttgtaggatatataattccacatatttgggaagagccttcttcggcttgaaggtagccctaatatttccagtacttgttttacttactgtatttatttttgttgtaaggaaaaaatcccatggaaaggataccaaagtattagaaaatgaaagacaagtaatggatgaagcaaacttagaattcttaaacgacagtgaacattttgtaccttctgctgaagaacagtaaagcatgtaattaagaggaggaaaaaaataattttgctgctgtttccaactaatgtattgattccataagacgttatttttgtggtgttctgagtcttttcactgagaattcccacattcttcacttatgatgcaacaat

SEQ ID NO: 178329 - DNA, 2775 bp, Homo sapiens
  Payload ID: 15082
  Gene Symbol:
  Gene Name: RP11-546B8.6
  ENST ID: ENST00000619056
  CDS Start-End: 126-401
aatccgcagaagccccttggacgctaccgccgccggaggaacgaaaggggcgcactacccggggcaggcttcgcgctgcctgcgcgcggggcgaggggagcaccgtagcgttctccgcgccccggatgacgccgacccgcgtggggagaattcgcccccgcccgggtttcggccgcggcctcgcggccactttggagacactccctggctccggccaggcggaccgaggcgtgactcgcaggtgcccacgcgtgccagctgcggctgggctagggacgcggggtcgcccggtggggagcggggacctgactctcgtaattcgttgcaggatggaagggggctgtggtcgcgcgtgggaacccgctcgcggctcggcgggtctagggacttcgggttcctgaatgtcaaaggcgcgggcagctcctagagcaaattgcgggatttctttgggaaacgcgactggtgagcccttcccggctccagtccactttgggcgctggaaccactccccgttctgctcgcgcctcagtgactgtctacccggcccagggcaccgtggacaggaccgcacacgaagtagtcaccttccgctgcagctttggggagacaagcggaatcattttcttccagcgaattctaaaatcgttaggtgcaaactctttgagtgtcgcacccctggcctgggttcttcctcccgctccttgtggtgtggacagtggtgagagctcggatgtgctgttgttggccagaagtgtgttcaaatttggactggccatttcctcgctgagtgaccttgagaaattgactctatatatttagatttcggttttctcgtttgcaaaaaaggaaaataatgcatgcatgcgggttgttcgtgagccgcgagtgagatattgagggagcgcagagcactgggcctggcacgtagtaggcactgggcagcgtggctcacctcccactctatccccccagagtaatggctgatgtattattgttgtgactcttgtttattttgttggcagtttaattttatttgcaggggctcagtacgttggagagaaaggtgtatttgtctaccagtagggtcagtttcagaggacggggaaagacaggaggtgcaggttggggattctttctctcttctcccaacaatccaaaggcgtcaggatttgcagggcctccaggcctgggtctggagttaggtcacttgcccgctgtgtgaccttgggcaaattcctggcccttgctaagccttcctggtgggtgtggagagggaggcccaacagtgaggagtgagagctgcaggatgtctggggtctgggcaagtgctccctcactcccttccagcgacaacgaccctcagatggggtagatgccattgccctggctccagggggcctcctgcttctaattcaggctctgccactggcagtgtgggtccctaaccgcccctcccagaaccgcattttccttatttgtaaaacaaaaagggcaccagctacccccagggtggctgtgagaacaaaatgagataacatctgtggcagtgcctgtgtgaaactctggcggttatatcataataactttaatgacaactataaagctactgtagctgagaccctagcctgtgccaggcagggaggtggacacttatttattcttcacaatgaccctgtgaggaaagggctgttagtggccccaatttctcactaatgagggaattgaggctttgagagttcaagggaagcacagctccccacttgggggctggagttggcacctcaccagctccacttcccttctggcttccagtgcccgggactcagggctgcccttgtcacttcagacactgttaaatcaggacaacaaggcccaccgcacagaggtttgtggcacagaattaaggcgtgggtggcacagcgctgctcccagcttgtgtgcttaagaatgggattcccacctcagtttaccagctgtggactcagggaattattcatcctctttatgcctcagttttctcatctggtaaataaacctcatgggattaaataagcgccccaggtaaagcctggcacgggtcagggctctgcttcactgcttggcttccggcttcctgagatccacggtccctcatcgtccagccctgtcatacagatgaaggagctttgggccactaattataagcctcctttcacttcctatccagatagctcttaggcagctcaggaatggggggaacttggttagtccctaggacagtggttctcagagtgtgtttccagagcagcagcatcagcatcactggagaatttgttagaaatgcaaattattggaccctcgccagacctacggcatcagacactctggggtaggactcggcagtctgtgcttaacaagccctccaggtgattctgatgcctgctcaactctggaagccagtgcccagaatatggtccattccatctgagttttcaaatgtgttgttgtaacattgtgggaagattctctcagaatttgcaactctcatacgaatctgtactaatgccttccacttctcattccccgtgtcgctcattcatgccttctcctgatcatacttgccaaaggtttgttattttgttggtttttaaaaaagcctttgatgtcattatccccttttaagatgccacctctttcgtgaatgttgcggtttaaaaaaagatttattccttctttgctgagttgaaaatttaatttgtcaattttctttctttttaaataaatgcactcaagggc

SEQ ID NO: 178330 - DNA, 1848 bp, Homo sapiens
  Payload ID: 15083
  Gene Symbol:
  Gene Name: RP11-548K23.11
  ENST ID: ENST00000370649
  CDS Start-End: 331-1680
gtgggaggagggcccagatcccactggagataccgaaggagatactctttagtattgggatcccagaaaccagtcctatatctggccagagggacactgggttgtggcatctctctagctgctacccagaaggaacagggccccctggggcctataggccttgcccctgaccctgggaacacccagctcaggcctgccccagtggccacaagtcagggaggccgcaaatttttaactagaaacattgatcattaatagggggttagaaagagttcaaactaagtctcactctgggacatagaccaattgtgcttcaggcctcctgcagagatgctgggtccccaagtctggtcttctgtgaggcaggggctaagcaggagcttgtccaggaatgtgggggtctgggcctcaggggaggggaagaaggtggacattgcgggtatctacccccctgtgaccacccccttcactgccactgcagaggtggactatgggaaactggaggagaatctgcacaaactgggcaccttccccttccgaggagctgtggggggcgtctgcgccctggccaatgtcctgggggctcaggtgtgccagctggagcgactgtgctgcacggggcaatgggaagatgcccagaaactgcagcaccgcctcattgagccaaacgctgcgaggatcattgctgtcttcaaacccaagaatgaagagccctatgggcatcttaatcctaagtggaccaagtggctgcagaagctgtgctgtccttgctgctttggccgtgactgccttgtccttaaccagggctatctctcagaagcaggggccagcctggtggaccaaaaactggaactcaacattgttccccgtacaaaggtagtatacctggccagtgagaccttcaactatagtgccattgaccgagtgaagtccaggggcaagcggcttgcactagagaaagtgccaaaagttggacagcggtttaaccgcatcgggctaccaccaaaggttggttcattccagctctttgttgaaggctacaaagatgcagactattggctgcggcgttttgaagcagaacctcttcctgagaacactaaccggcaactactgctccagtttgagcggttggtggtgctggattacatcatccgcaacactgatcgaggcaatgacaactggctgattaaatatgactgtccaatggatagttctagctctcgggacacagactgggtggtggtgaaggagcctgttatcaaggtggctgccatagacaatgggctggccttcccactgaagcatcctgactcctggagggcatatcctttttactgggcctggttgccccaggcgaaagtcccattttctcaggagatcaaagatctgatccttccaaagatatcggaccctaacttcgtcaaggacttggaagaggacctatatgaactcttcaagaaagatcctggtttcgacaggggccagttccataagcagattgctgtcatgcggggccagatcttaaatctgacccaggccttgaaagacaacaagagtcccctgcacctcgtccagatgccacctgtgattgtcgagacggcccgttcccaccagcggtcttctagcgagtcctacacacagagctttcagagccggaagcccttcttttcatggtggtagctccagaggcaggcagaggaaatattgtcagagactggtgggaggaagcctggggagtggggtgcaggaaaagccagagaagccggtggagagcagcacctttaagagccctctctctctgcttgccaccctgctcagagctttccacccacagggagaagcacaatc

SEQ ID NO: 178331 - DNA, 1886 bp, Homo sapiens
  Payload ID: 15084
  Gene Symbol:
  Gene Name: RP11-552F3.12
  ENST ID: ENST00000590947
  CDS Start-End: 1-228
aaaatgtttcctgttatttgctggacaagtcccaaagaacaggcagatgttcttattaaaagatcagcctataagattggtcaggaccaggcgcctctggccacgtgcctctcccctccagcacctgcggtctgcggtggcacctggcagctggaccacagccaggagaagggtactattagccctgcttcaaacatgcagaaactgaggcccggggagattaaataacctgcctgaaatgacagtgagtagctgcgcctggatttgagttctgctctggccaatccccaagctccacgctgtcagccaccccgctctcctacctcccagaggagcaggctacactcctgttccttttagagagagaaatattgcggccgggcgcggtggctcacgtctgtaatcccagcattttggcaggccaagggttttgccatgttcgtagggctggtctcaaactaattacctcagatgatccgcccacctcggcctcccaaagtgctgggattacagccgtcctgggccgccggacacccccgctggggccgatgcccaacagtgacatcgacttgagcaacctggagcggctggagaagtaccggagcttcgaccgctaccggcgccgagcagagcaggaggcgcaggccccgcactggtggcggacctaccgagagtatttcggggagaagacagagttccagctcctaaaatatttgctcctaaaatcttgaccacctgactttccggattgggatgccgttctgtgcgcctcaaatactctgtagatcccaaagagaagattgatattgggctgcctccacccaaagtctcccggacccaacagctactggaacggaaacaggccatccaggagcttcgggccaatgtggaagaggagcgggctgcccgcctccgcacagccagtgtcccgctggatgccgtgcgggccgagtgggagaggacctgtggcccctaccacaagcagcgtctggctgagtattacggcctctaccgagacctgttccacggtgccacctttgtgccccgagtccccctgcacgtggcctacgctgtgggtgaggatgacctgatgcctgtgtactgtggcaatgaggtgactccaaccgaggctgcccaagcgccagaggtgacctatgaggcagaagagggctccttgtggacgttgctactcactagcttggatgggcacctgctggagccagatgctgagtacctccactggctgctaaccaacatcccgggtaaccgggtggctgaaggacaggtgacgtgtccctacctcccccccttccctgcccgaggctccggcatccaccgtcttgccttcctgctcttcaagcaggaccagccgattgacttctctgaggacgcacgcccctcaccctgctatcagctggcccagcggaccttccgcacttttgatttctacaagaaacaccaagaaaccatgactccagccggcttgtccttcttccagtgccgctgggatgactccgtcacctacatcttccaccagcttctggacatgcgggagccggtgtttgagttcgtgcggccgcccccttaccaccccaagcagaagcgcttcccccaccggcagcccctgcgctacctggaccggtacagggacagtcatgagcccacctatggcatctactaaggagccagagtgtgcgcatttcagagcatgggattgatcggcagcaagagtaaagacacagctccagaggcccacactgtggggtctgggccctgccttaggcagcccccctctttggccccctcccgtcaggcccagggcttggagtgaaagtgactctcaggtggtggggtggggaatgtgaataaacatgatttcttgccgg

SEQ ID NO: 178332 - DNA, 550 bp, Homo sapiens
  Payload ID: 15084
  Gene Symbol:
  Gene Name: RP11-552F3.12
  ENST ID: ENST00000587556
  CDS Start-End: 1-372
cagggccctgcagcctccagccagagtgccctcatgcctcctgctcccaccacccgttggtgcagccagccgccaactggcctggaccccagccccttgcacctccatgccaggctggcactgctgaggcacatggcagagcagaaaatgtttcctgttatttgctggacaagtcccaaagaacaggcagatgttcttattaaaagatcagcctataagattggtcaggaccaggcgcctctggccacgtgcctctcccctccagcacctgcggtctgcggtggcacctggcagctggaccacagccaggagaagggtactattagccctgcttcaaacatgcagaaactgaggcccggggagattaaataacctgcctgaaatgacagtgagtagctgcgcctggatttgagttctgctctggccaatccccaagctccacgctgtcagccaccccgctctcctacctcccagaggagcaggctacactcctgccgtcctgggccgccggacacccccgctggggccgatgcccaacagtgacatcgac

SEQ ID NO: 178333 - DNA, 3857 bp, Homo sapiens
  Payload ID: 15085
  Gene Symbol:
  Gene Name: RP11-561B11.2
  ENST ID: ENST00000557565
  CDS Start-End: 382-2133
tgtagtttccgccgcgtttatggccgcgttaagtctgagtgccgctttgagttgttgaatgaagtgaacttcatttgtcagcgttcggttcatgaactggaatgtaagaggcaccagaggattcctgctctgtcccctggtttgcggcttgcgacgttggacatccccggattgttgtttaatagagaaaactcacctgccttcttgcttttaagtagccccaaaagcagaaccttgatttgtctgtaaggaagaaacacaaaccttttaaaaagttccacttcgactctgcaccgccgacccccaatctctttaattttgccatagaagaggggttttttcaacatctctctcactatctggtgctgatctcactgcataatgactttctatttgtttggtattcgaagctttccgaagctttggaagagcccataccttgggctaggcccagggcactcttatgtctcgctgtttctggcagaccgctgtggcatcaggaaccagcagaggttgttttctcttaaaacaatgtctccacagaataccaaagcaacgaatctgattgccaaggccagatatctcaggaaagatgagggcagtaataagcaagtttattctgttcctcatttttttttagctggagcagctaaggagagatcacagatgaattctcaaactgaagatcatgccttggcacctgtgaggaacactattcaactcccaacacaacctttgaattcagaggagtgggataaacttaaggaagatttaaaagaaaacaccggaaagaccagtttcgaaagttggatcatttcacagatggctggctgtcatagctctatagatgtggctaaatctctgctggcatgggtagcagccaaaaataatggtattgtaagttacgatttactggtcaagtatttgtatctctgtgtctttcatatgcagacatctgaagttattgatgtctttgaaattatgaaagccagatataagactttagaacctagaggttacagtcttctcatccggggattgatccattcagacagatggagagaagcattgttgctgttagaggacatcaaaaaagttataactccttcaaaaaagaactataatgactgtatccagggagctctccttcatcaagatgtaaacacagcttggaatttatatcaggaattgctaggtcatgatattgttcctatgttggaaactttaaaagctttctttgattttggaaaagacataaaggatgataactattcaaataaactactagatattctttcatatctaagaaataatcagctgtatccaggggagtcatttgcacacagtataaaaacatggtttgagagtgttcctggaaaacaatggaaaggacaattcaccacagtccgaaaaagtggccagtgttcgggctgtggaaaaaccatagagtctattcagctgagtccagaagaatatgaatgtcttaagggaaaaatcatgagggatgtgatagatggaggtgaccagtacagaaagacaacacctcaggaacttaagagatttgagaacttcataaaatctcgtcctccttttgatgttgtcattgatggtctcaatgttgccaaaatgtttcctaaagttcgtgaatctcaacttctcttgaatgtcgtctctcaactagccaaacggaatctgcgactgctggtcctaggccggaagcacatgctaagacggagttcccagtggagtcgggatgagatggaagaggtgcaaaagcaagccagctgtttttttgctgatgacatctcggaggatgatccattccttctgtatgccacactgcactccgggaatcactgcaggtttatcacaagagacctgatgcgggaccacaaggcctgtctgcctgatgccaagacccaacgcctgttttttaagtggcagcagggacatcagctggcaattgtaaataggtttccaggatcaaaactaacctttcagcgtattctcagctatgacacagtggtgcaaacaactggagactcgtggcacataccatatgatgaagacttggtagaaagatgttcctgtgaagtaccaaccaaatggctttgcctccaccaaaagacatagagattcttacctctatgctaagtttgtgtttgggtaccctctaggttggcatcagaggctcttgagctggtgtttgtttagggcattgcctctgtcctgaagataaaaggattctattaacagcattgacattgattttttaatgaaatgagatatatcttttcataaccagctgcgtttttttcccctaacatttgtttttggaggcttatcaagagttggagaacttagtgtagagcaaaacctgcatttctcctactgggccagctattccacttagcttgggtgactaatagtgcttttggtatccattttttgctacttctgaccttgccttccaggcctaccaatagcagaatcaatccatctgtccctgagatactcatgttgtttcaaatgcctcctcccatttctggcatagtctcattctctgtatgttatgccctatccacatggaatcatttatcgtcctctgtaataaactggccaagatactaaaggcttactattcatagcagtttttaattacttatcatccaattatttggattggagaagagggggcattcactcctctttttcttattttttttggaaatagagtctcaacttactctgtcgccagggctggagtgcagtgacgtgatcacagttcactgcagcctcaaactcccaggctcaagcaatcttcctacctcagccctcctgagtaattgggactacagaacagagaatgtcagtatccaataggatgccagtggaattccctgacgattccatccatgcggctctgctggagcagggtagtgtcctaggctgggagaatgggatggagcctccacctcatgaagtagcttcctttggaggtggctatggcaggtcttcggagagaatatgcttttaaggctattaaccagggtggccttacatcagtagctgtcagagggaaagactgtgcagtaattgtcacacagaagaaagtacctgacaaattattggattccagcacagtgactcacttattcaagataactgaaaacattggttgtgtgatgaccggaatgacagctgacagcagatcccaggtacagagggcacgctatgaggcagctaactggaaatacaagtatggctatgagattcctgtggacatgctgtgtaaaagaattgccgatatttctcaggtctacacacagaatgctgaaatgaggcctcttggttgttgtatgattttaattggtatagatgaagagcaaggccctcaggtatataagtgtgatcctgcaggttactactgtgggtttaaagccactgcagcgggagttaaacaaactgagtcaaccagcttccttgaaaaaaaagtgaagaagaaatttgattggacatttgaacagacagtggaaactgcaattacatgcctgtctactgttctatcaattgatttcaaaccttcagaaatagaagttggagtagtgacagttgaaaatcctaaattcaggattcttacagaagcagagattgatgctcaccttgttgctctagcagagagagactaaacattgtcgttagtttaccagatccgtgatgccacttacctgtgtgtttggtaacaacaaaccaacatcatggaggtccctggattgaaaaaggagcctctcccactcctcctaccaccgaagtggttaggactctatataaataaaaacaaggcttttggaaaataa

SEQ ID NO: 178334 - DNA, 830 bp, Homo sapiens
  Payload ID: 15086
  Gene Symbol:
  Gene Name: RP11-565P22.6
  ENST ID: ENST00000367932
  CDS Start-End: 1-156
aagttccgagagtcaggcatcgcctcggagtacgagtccaacacggacgagagcgaggagcgcgactcgtggtcccaggaggagctgccgcgcctgctgaatgtcctgcagaggcaggaactgggcgacggcctggatgatgagatcgccgtttgaccacggcatgtttgagaatttgaacacagccctcactccaaagctccaggccagccgctccttcccccacttgtccaagcccgtggcccccggctctgcccctctgggctctggtgagcctggggggccaggactctgggtgggcagcagccagcacctcaagaacctgggcaaagccatgggggccaaagtgaatgacttcctgaggagaaaggagccctccagcctgggcagtgtgggtgtgacagagatcaacaagactgcaggagcacagctggccagtgggactgacgcggctccagaggcttggctagaggatgaaaggtcagtcctgcaagaaacatttcctcggctggatcctccacctcccataaccagaaagcgaacccctcgggccctgaagaccacccaggacatgctgatttcatcacagcctgtcctcagcagtctggagtatgggacagagccatcacctgggcaggcccaggactccgctcccactgcccagcctgacgtcccagcagacgcttcacagccagaggccaccatggaaagagaagagagaggcaaagttctgcccaatggagaggtttccctgtcagtacctgacctaatccacaaggatagccaggacgaatccaagctaaagatgactgagtgcagaagggcctcct

SEQ ID NO: 178335 - DNA, 541 bp, Homo sapiens
  Payload ID: 15086
  Gene Symbol:
  Gene Name: RP11-565P22.6
  ENST ID: ENST00000431696
  CDS Start-End: 91-541
cacttgctgaaggaccagttggctgctgaggctgcggcgcggctggaggcccaggctcgcgtgcatcagcttttgctgcagaacaaggacatgctccagcacatctccctgctggtcaagcaggtgcaagagctggaactgaagctgtcaggacagaacgccatgggctcccaggacagcttgctggagatcaccttccgctccggagccctgcccgtgctctgtgaccccacgacccctaagccagaggacctgcattcgccgccgctgggcgcgggcttggctgactttgcccaccctgcgggcagccccttagttgaccacggcatgtttgagaatttgaacacagccctcactccaaagctccaggccagccgctccttcccccacttgtccaagcccgtggcccccggctctgcccctctgggctctggtgagcctggggggccaggactctgggtgggcagcagccagcacctcaagaacctgggcaaagccatgggggccaaagtgaatgacttcctgaggagaaaggagccct

SEQ ID NO: 178336 - DNA, 2776 bp, Homo sapiens
  Payload ID: 15087
  Gene Symbol:
  Gene Name: RP11-566K11.2
  ENST ID: ENST00000556922
  CDS Start-End: 95-2488
ggcagcaccatgaactaagcaggacacctggaggggaagaactgtggggacctggaggcctccaacgactccttcctgcttcctggacaggactatggctgtgcagggatcccagagaagacttctgggctccctcaactccacccccacagccatcccccagctggggctggctgccaaccagacaggagcccggtgcctggaggtgtccatctctgacgggctcttcctcagcctggggctggtgagcttggtggagaacgcgctggtggtggccaccatcgccaagaaccggaacctgcactcacccatgtactgcttcatctgctgcctggccttgtcggacctgctggtgagcgggagcaacgtgctggagacggccgtcatcctcctgctggaggccggtgcactggtggcccgggctgcggtgctgcagcagctggacaatgtcattgacgtgatcacctgcagctccatgctgtccagcctctgcttcctgggcgccatcgccgtggaccgctacatctccatcttctacgcactgcgctaccacagcatcgtgaccctgccgcgggcgcggcgagccgttgcggccatctgggtggccagtgtcgtcttcagcacgctcttcatcgcctactacgaccacgtggccgtcctgctgtgcctcgtggtcttcttcctggctatgctggtgctcatggccgtgctgtacgtccacatgctggcccgggcctgccagcacgcccagggcatcgcccggctccacaagaggcagcgcccggtccaccagggctttggccttaaaggcgctgtcaccctcaccatcctgctgggcattttcttcctctgctggggccccttcttcctgcatctcacactcatcgtcctctgccccgagcaccccacgtgcggctgcatcttcaagaacttcaacctctttctcgccctcatcatctgcaatgccatcatcgaccccctcatctacgccttccacagccaggagctccgcaggacgctcaaggaggtgctgacatgctcctgctctcaggaccgtgccctcgtcagctgggatgtgaagtctctgggtggaagtgtgtgccaagagctactcccacagcagccccaggagaaggggctttgtgaccagaaagcttcatccacagccttgcagcggctcctgcaaaaggagttctgggaagtcatcagtgatgagcatggcatcgaccccagcggcaactacgtgggcgactcggacttgcagctggagcggatcagcgtctactacaacgaggcctcttctcacaagtacgtgcctcgagccattctggtggacctggaacccggaaccatggacagtgtccgctcaggggcctttggacatctcttcaggcctgacaatttcatctttggtcagagtggggccggcaacaactgggccaagggtcactacacggagggggcggagctggtggattcggtcctggatgtggtgcggaaggagtgtgaaaactgcgactgcctgcagggcttccagctgacccactcgctggggggcggcacgggctccggcatgggcacgttgctcatcagcaaggtgcgtgaggagtatcccgaccgcatcatgaacaccttcagcgtcgtgccctcacccaaggtgtcagacacggtggtggagccctacaacgccacgctgtccatccaccagctggtggagaacacggatgagacctactgcatcgacaacgaggcgctctacgacatctgcttccgcaccctcaagctggccacgcccacctacggggacctcaaccacctggtatcggccaccatgagcggagtcaccacctccttgcgcttcccgggccagctcaacgctgacctgcgcaagctggccgtcaacatggtgcccttcccgcgcctgcacttcttcatgcccggcttcgcccccctcacagcccggggcagccagcagtaccgggccctgaccgtgcccgagctcacccagcagatgttcgatgccaagaacatgatggccgcctgcgacccgcgccacggccgctacctgacggtggccaccgtgttccggggccgcatgtccatgaaggaggtggacgagcagatgctggccatccagagcaagaacagcagctacttcgtggagtggatccccaacaacgtgaaggtggccgtgtgtgacatcccgccccgcggcctcaagatgtcctccaccttcatcgggaacagcacggccatccaggagctgttcaagcgcatctccgagcagttcacggccatgttccggcgcaaggccttcctgcactggtacacgggcgagggcatggacgagatggagttcaccgaggccgagagcaacatgaacgacctggtgtccgagtaccagcagtaccaggacgccacggccgaggaagagggcgagatgtacgaagacgacgaggaggagtcggaggcccagggccccaagtgaagctgctcgcagctggagtgagaggcaggtggcggccggggccgaagccagcagtgtctaaacccccggagccatcttgctgccgacaccctgctttcccctcgccctagggctcccttgccgccctcctgcagtatttatggcctcgtcctccccacctaggccacgtgtgagctgctcctgtctctgtcttattgcagctccaggcctgacgttttacggttttgttttttactggtttgtgtttatattttcggggatacttaataaatctattgctgtcagata

SEQ ID NO: 178337 - DNA, 679 bp, Homo sapiens
  Payload ID: 15088
  Gene Symbol:
  Gene Name: RP11-571M6.15
  ENST ID: ENST00000471530
  CDS Start-End: 1-484
gtgcaattatttcgagagtcaaaatgtggatttccgaggcaagaaggtgatcgaactgggtgcggggacaggcatcgtggggatcttggcagcgctgcagggctgggtctcttctgcgtcagtcgccccagccaaggcacacattttatgctgggccccgtctgtctgcctcggcctccagcaaggagctcctcatgaagctgcggcggaaaacaggctactcctttgtaaattgcaagaaagctctggagacttgtggcggggacctcaaacagacggagtcttgctctgtggcccaggccggcgtgcaatgagttgtgtagtttttgcctgtacggtcatgcgtctcttaataggaagatacattctgagaaatggcgtcgttaggagattttggcttatgcacatcatagagtacctacacaaacctagatggtatattgtactacaacctgggctatatggaattgccagctgctcctaggctacaaaccgttacaaaatgttactggactgaatactgtaggcagttgtaacacagtggcagagatctggctccacaaggaggcccagaaggagggctggagcaaagctgccaagctccaagggaggaagaccaaagaaggcctgattgggctgttgcaggaaggaaacacaactgtattagtagaggtaaact

SEQ ID NO: 178338 - DNA, 373 bp, Homo sapiens
  Payload ID: 15088
  Gene Symbol:
  Gene Name: RP11-571M6.15
  ENST ID: ENST00000546504
  CDS Start-End: 1-373
gtggatttccgaggcaagaaggtgatcgaactgggtgcggggacaggcatcgtggggatcttggcagcgctgcagggctgggtctcttctgcgtcagtcgccccagccaaggcacacattttatgctgggccccgtctgtctgcctcggcctccagcaaggagctcctcatgaagctgcggcggaaaacaggctactcctttgtaaattgcaagaaagctctggagacttgtggcggggacctcaaacagacggagtcttgctctgtggcccaggccggcgtgcaatggcagagatctggctccacaaggaggcccagaaggagggctggagcaaagctgccaagctccaagggaggaagaccaaagaaggcc

SEQ ID NO: 178339 - DNA, 914 bp, Homo sapiens
  Payload ID: 15089
  Gene Symbol:
  Gene Name: RP11-574F21.3
  ENST ID: ENST00000485079
  CDS Start-End: 1-914
gaaacactaagtggattagccaaaaatgccactgaccttcagaactccagcatgtcggaagaagagctgaccaaggccatggaggggctaggcatggacgaaggggatggggaagggaacatcctccccatcatgcagagtattatgcagaacctactctccaaggatgtgctgtacccatcactgaaggagatcacagaaaagtatccagaatggttgcagagtcatcgggaatctctacctccagagcagtttgaaaaatatcaggagcagcacagcgtcatgtgcaaaatatgtgagcagtttgaggcagagacccccacagacagtgaaaccactcaaaaggctcgttttgagatggtgctggatcttatgcagcagctacaagatttaggccatcctccaaaagagctggctggagagatgctgacgtggctttttttctgtggctcccagtgggtctacggaccttggctgacatatgttgagacgggtttcaccatgttggcctggtttcaaacgagtttcgaactcctgacctcaagtgatccgcccacatccgcctcccaaagtgctaggattacaggcatgagccaccgcgcccggccagaccttacatttttaaaaagcactctggctgccttatgtttaactgtaatggcaataatggaagtagacaaacgaggaagcctgtctagcagtccagaggagatgtctggagctgaagaggggagggagacatcctcaggcattgaagtggaggcctcagacctgagtttgagcttgactggggatgatggtggccccaaccgcaccagcacagaaagtcgaggcacagacacagagagctcaggtgaagataaggactctgacagcatggaggacactggtcattactccattaatgatgaaaa

SEQ ID NO: 178340 - DNA, 2635 bp, Homo sapiens
  Payload ID: 15089
  Gene Symbol:
  Gene Name: RP11-574F21.3
  ENST ID: ENST00000556710
  CDS Start-End: 252-2507
agcaagatggccgccgctgaggaaggctgtagtgtcggggccgaagcggacagggaattggaggagcttctggaaagatgccctcttcgcttcccaagagaagtttttccaggaactattcgacagtgaactggcttcccaagccactgcggagttcgagaaggcaatgaaggagttggctgaggaagaaccccacctggtggagcagttccaaaagctctcagaggctgcagggagagtggaactccagcatgtcggaagaagagctgaccaaggccatggaggggctaggcatggacgaaggggatggggaagggaacatcctccccatcatgcagagtattatgcagaacctactctccaaggatgtgctgtacccatcactgaaggagatcacagaaaagtatccagaatggttgcagagtcatcgggaatctctacctccagagcagtttgaaaaatatcaggagcagcacagcgtcatgtgcaaaatatgtgagcagtttgaggcagagacccccacagacagtgaaaccactcaaaaggctcgttttgagatggtgctggatcttatgcagcagctacaagatttaggccatcctccaaaagagctggctggagagatgctgacgtggctttttttctgtggctcccagtgggtctacggaccttggctgacatatgttggctggctacagcaaacatcattcaagatgtccagcaaagggagcagcacagatggcagaacagacttagctaatggaagcctgtctagcagtccagaggagatgtctggagctgaagaggggagggagacatcctcaggcattgaagtggaggcctcagacctgagtttgagcttgactggggatgatggtggccccaaccgcaccagcacagaaagtcgaggcacagacacagagagctcaggtgaagataaggactctgacagcatggaggacactggtcattactccattaatgatgaaaatcgagtccatgaccgctcagaggaagaggaagaggaggaagaagaggaggaagaagagcagcctcggcgccgtgtacagcgcaagcgggctaaccgtgaccaggactcatcagatgatgagcgggccctagaggactgggtgtcctcagaaacatcagctctaccccgacctcgctggcaagccctccctgcccttcgggagcgggagctgggttcaagtgcccgctttgtctatgaggcctgtggggcaagagtctttgtgcagcgtttccgcctgcagcatgggcttgagggccatactggttgtgtcaataccctgcactttaaccagcgcggcacctggctggccagtggcagcgatgacctgaaggtggtggtgtgggattgggtacggcggcagccagtactggactttgagagtggccacaaaagtaatgtgttccaggccaagtttcttcctaacagtggtgattctactctggccatgtgtgcccgtgacgggcaggttcgagtagcagaactgtctgccacacagtgttgcaagaatacaaaacgtgtggcccagcacaagggagcgtcccacaagttggcactggaaccagactctccctgtacgttcttatctgcaggtgaagatgcagttgttttcaccattgacctgagacaagaccgcccagcgtcgaaactggtggtgacaaaagagaaagagaagaaagtggggctgtatacgatctatgtgaatcctgccaatacccaccagtttgcagtgggtggacgagatcagtttgtaaggatttatgaccagaggaaaattgatgagaatgagaacaatggagtactcaagaagttctgtcctcatcacctggtgaacagtgagtccaaagcaaacatcacctgtcttgtgtacagccacgacggcacagagctcctggccagttacaatgatgaagacatttacctcttcaactcctctcacagtgatggggcccagtatgttaagagatacaagggccacagaaataatgccacagtaaaaggcgtcaatttctatggccccaagagtgagtttgtggtgagcggtagtgactgtgggcacatcttcctctgggagaaatcatcctgccagattattcagttcatggagggggacaagggaggcgtggtaaactgtcttgagccccaccctcacctgcctgtgctggcaaccagtggcctagaccatgatgtgaagatctgggcacccacagctgaagcttccactgagctgacagggttaaaagatgtgattaagaagaacaagcgggagcgggatgaagatagcttgcaccaaactgacctgtttgatagtcacatgctgtggttccttatgcatcacctgagacagagacgccatcaccggcgctggcgagaacctggggttggggccacagacgcggactctgatgagtctcccagctcctcagacacatcggacgaggaggagggccctgaccgggtgcagtgcatgccatcttgaggcctcatacctaggtggggcaggctggggctgccaacctgatcctgcctgggcaaccctttcctgtcccaggccctacattcagcagaaacgcactttggactttttgctttagataaaagaaagac

SEQ ID NO: 178341 - DNA, 5818 bp, Homo sapiens
  Payload ID: 15090
  Gene Symbol:
  Gene Name: RP11-574K11.31
  ENST ID: ENST00000603027
  CDS Start-End: 625-3072
gcggcggcgcgccgcctcccccggtgggagcggtggttgggccaggctgcggcagagcgttcgctcggagatggcggagcagccgcgacgcggcccgtggccccgaaagcagggaagccgggcagccccgggacgcggcggagcccggggacagcggggacgccgcccagtcctccgggtatgaagctaaaatgcagcggctaagaacgcggctctggagcttgacaggcctgacgtcgaatcccagccctcccaccaactgagctgtgtgatcctgggcaaggtagaggggaagagattgaactttgctgacctttgatgtgaggcgctcagccagggccaaggggagagcctggcaagatttgcagcctgaagccatgggccagggggccatggtgacctgagacaagtggactctgtatagttgccccctgcttccccttctacctcccctaccctatgctaaggggactcgtctccacctcgtaaaggaaactccccaagggaatccctgtcccctattttcctatccttctacccttccaagacagtcctagcctatagaactcctacctcccatcccctgaggtggtccccattcctccctcccttcctccccccgccatgctccagttgtggaaggtggtacgcccagctcggcagctggaactgcaccgcctcatactgctgctgatcgctttcagcctgggctccatgggcttcctggcttattatgtgtccaccagccctaaggccaaggaacccttgcccctgcccttgggagactgcagcagcggtggggcagctggtcctggccctgcacggcctccagttccacctcggccccccaggcctccagagacagctcgaactgaacccgtggtccttgtgtttgtggagagtgcatactcacagctggggcaggaaattgtggccatcctggagtctagtcgttttcgttatagcactgagttggcacctggccgaggggacatgcccacattgactgataatacccatggccgctatgtcttggtcatttatgagaacctgctcaagtatgtcaacctggatgcctggagtcgggaactgctagaccggtactgcgtggagtatggtgtgggcatcattggctttttccgagcccacgagcacagcctactgagcgcccagctcaagggctttcccctttttttacactcaaacttggggctccgggactaccaagtgaatccttctgccccgctactgcatctcacacgccccagccgcctagaaccagggccactgcctggtgatgactggaccatcttccaatccaatcatagtacatatgaaccagtgcttcttgccagccttcggccagctgagcccgcagtgccaggaccagttcttcgtcgggcccggcttcccactgtggtacaggacctggggcttcatgatggcatccagcgggtgctctttggacatggcctttccttctggctccacaaacttatcttcgttgatgctgttgcatacctcactggcaagcgcctctgcctggaccttgaccgctacatcttggtagacatcgatgacatctttgtgggcaaggaagggacccgcatgaaggtggctgatgttgaggctctgttgaccacccagaacaaactcaggaccttagttcccaacttcaccttcaacttgggcttctcgggcaagttctatcatactgggacagaggaggaggatgcaggggacgacatgctgctgaagcaccgcaaagagttctggtggttcccccacatgtggagccacatgcagccacacctgttccacaatcgctccgtgctggctgaccagatgaggctcaacaaacagtttgctctggagcatgggattcccacggacctggggtatgctgtggccccccaccactcgggtgtgtaccccatccacacgcagctctatgaggcctggaaatccgtgtggggcatccaggtgaccagcactgaggagtatccccatctccgccctgcccgctaccgccgtggcttcattcacaatggcattatggtgctgccccggcagacatgtggcctcttcactcacacaatcttctataatgagtatcctggaggctctcgtgaactagaccggagcatccgaggtggagagctctttctgacagtgctgcttaatccgatcagcatctttatgacccatctgtccaattatggaaatgaccggctgggcctatacacctttgagagcttggtgcgcttcctccagtgttggacacggctgcgcctacagacccttcctcctgtcccacttgcacagaagtactttgaacttttccctcaggagcgaagccccctttggcagaatccctgtgatgacaagaggcacaaagatatctggtccaaggagaaaacctgtgatcgtctcccgaagttcctcattgtgggaccccagaaaacagggactacagctattcacttcttcctgagcctgcacccagctgtaactagcagcttccctagccccagcacatttgaggagattcagttcttcaacagccctaattaccacaagggtattgactggtacatggatttcttccctgttccttccaatgccagcactgatttcctatttgaaaaaagtgccacctactttgactctgaagttgtaccacggcggggggctgccctcctgccacgagccaagatcatcacagtgctcaccaaccctgctgacagggcctactcctggtaccagcatcagcgagcccatggagacccagttgctctgaactataccttctatcaggtgatttcagcctcctcccagacccctctggcactacgctccctgcagaaccgctgtcttgtccctggctactattctacccatctacaacgctggctgacttactacccctctggacagttgctgattgtggatgggcaagagctgcgtaccaacccagcagcctcaatggagagcatccagaagttcctgggtttgatgatgataagggattttggtgccagggacttgaaggtggtaagactcgctgtctaggccggagcaaaggccggaggtatccagatatggacactgaggtaagtaaagccaggggcaggggaatccctctccacttccaggatctgattctgtgtcccacttcttaccatttctgccttcattttctcctgtcagtcccgtcttttccttacggattttttccggaaccataatttggagttgtcgaagctgctgagccggcttggacagccagtgccctcgtggcttcgggaagaactgcagcattccagtctgggctgatgtcccagcctcccataccagcaaaatgccccctgcttccctaaggggcaggtccagagcagggcccacaagggggattagagtggcctggcccctccccctctacctcagtagcccccaggcctgagatggctgagaagggaagggtatccttttcccacagttctgggacaaataaaggggcttcctttggtaccccacataatagtgctaggtacctttgacccatcatcttgggaggtggggaggaatgagagggtccaggcagggtgtaggggaatgtattagtccaatgagatttccctcttcatccgcagcagtgtatctattctatacctggctatgggagagaccccttgcatgggagggaccccttgctatggcccctttagccaggcagtgggatctacctgtggcccggcctccctaatgtcattcacattgaatggggatgaggtcggacagtggctcatagagccgagtatgagccctagctgtgggctagaaatgtccttaataaacatccttatttttctgttttgtctgcctccctggagtgggaaaaacctagactaaagcaagtgtcagaagtttcctccccagttgaaggttcatctgcacatggaatttggaaagaagggaaaggcccaggtcgactagagtaaaaaaggagtttatatatttataaatgccaaataaataccagaggccacccaacgccccctcccagacagggctgtctcccccagccctaggcttctagggtgtgagacatcttggccccaagctatagcccaagagcagctgtcagtctgtgctaccagggaactgagtgaggatgatctgtccagccaagtttcactccccctgtgtgaggggcccccatagccacaggcctgggtccctgtataggaccctaagggtgaaagactcagggggagaaggtggccatctcgagtgagacccgctgccacagctccttggtctgtttgctgcgcttgaggttctgtaggatgtcgttgaactgcatcatgcccatgggcgtcaggcagaaggcgctgcgggcactccggatcgcattcacaaagtcgtcgtagtccgcaggagtcagtaaacaaatgaagagctagaggaagggtcctctgaagagccactggcacaactgcaggaaacgtgggaagaataagtacgtgagagccagttgggagaaacaaagttgtgcaggccaagggcataaagcccaatctcgaaggcgcaaaggtgcaggttgcggtgaggaccctggtggccccctgaggaagatggatgtgtgaaaatggaagtgctgctgttgccccctgccttgatcagcactgtcttcgccagctcgaagtagaagtgtgcagctgcctctgatggctgattggtcttcgcccgggctcctccactggcactggcccggcgacttccactggaggatgaggagcccagggagtccgaagaagagctgctaatgctgtcactgtcctgacctcgaccccaggaggtgggggcccagccccctcgaagtggtctccggcttaaggtgggggaactatccgatgttgtttcaggggcactgctgtcaatgctggccatgcctaacccccaagagaagtcagtctcagaagtcaggagtcccagatgttaagactccaaccttcaggattatccttccctctatgctagcccacaggctatcctacctgtgtgcttcttcttaggccgtcctggggacccccatccccgtccattatagcctccacgactgccaagtgccaagcggctaggaaccttcccttctggccttggggtcaaagctgcctcagatggaagaccctcacagggggaatgtggggaactctctaggtgaggaaaacaggacgctgggatgagcccaggaaaggggacctcaacataggtccacaccattcatcccccctgcccagtgcccccacctcaccaggcacattcttctctgtgaagccctcagtggggcctggcccagcccctgccacactccctggttgagcaggccctgcagagcctgaggtcagtggttgcagggcccctggggcagatgggcccccgtgctttgaaggagacctctggctggctgtggttgggcggctagatgagtagaaagaactcagcgtctgtggcttatgtgtctggctctctcggtccaagagtttgtctaagatctggaagacagaagcagtgacctccagagaagcagtgacaggatgccctttagctcctgacttctattaccttcctttctccttgaaacagccaattgctacatcctcagggagccttccccacttacaaccacaggatgacctcctggtttacatgtctttttgtaacttatttaaccccaacatatcttggtatcctccattaacaccacagggcagaatatactgatagtcaataaatactgaaataagtgaatgaa

SEQ ID NO: 178342 - DNA, 871 bp, Homo sapiens
  Payload ID: 15090
  Gene Symbol:
  Gene Name: RP11-574K11.31
  ENST ID: ENST00000603706
  CDS Start-End: 1-131
tgattgtggatgggcaagagctgcgtaccaacccagcagcctcaatggagagcatccagaagttcctgggtttgatgatgataagggattttggtgccagggacttgaaggtggtaagactcgctgtctaggccggagcaaaggccggaggtatccagatatggacactgaggaaacgtgggaagaataagtacgtgagagccagttgggagaaacaaagttgtgcaggccaagggcataaagcccaatctcgaaggcgcaaaggtgcaggttgcggtgaggaccctggtggccccctgaggaagatggatgtgtgaaaatggaagtgctgctgttgccccctgccttgatcagcactgtcttcgccagctcgaagtagaagtgtgcagctgcctctgatggctgattggtcttcgcccgggctcctccactggcactggcccggcgacttccactggaggatgaggagcccagggagtccgaagaagagctgctaatgctgtcactgtcctgacctcgaccccaggaggtgggggcccagccccctcgaagtggtctccggcttaaggtgggggaactatccgatgttgtttcaggggcactgctgtcaatgctggccatgcctaacccccaagagaagtcagtctcagaagtcaggagtcccagatgttaagactccaaccttcaggattatccttccctctatgctagcccacaggctatcctacctgtgtgcttcttcttaggccgtcctggggacccccatccccgtccattatagcctccacgactgccaagtgccaagcggctaggaaccttcccttctggccttggggtcaaagctgcctcagatggaagaccctcacagggg

SEQ ID NO: 178343 - DNA, 323 bp, Homo sapiens
  Payload ID: 15091
  Gene Symbol:
  Gene Name: RP11-58C22.1
  ENST ID: ENST00000563764
  CDS Start-End: 1-162
gttacaggacacgtgactgagtccagctgtatggcccagcctggcactgatgccacatcaagggaaaggacacactcgtttgcagatcattctggaacaatagatgacagagagccccttgctaatgcaatcaaaagtgactctgcagtaattggaggttaaaacaaagtcacaagtctgacccacactcaaagggagaagattatgcaagagcaaaagcacgagatggaaaccatggggccatcttatagtctgtctgccggagaaagatgaacacaaatcctgaaatttcagcattcctgataccgtgtgtaccagcaaaa

SEQ ID NO: 178344 - DNA, 623 bp, Homo sapiens
  Payload ID: 15092
  Gene Symbol:
  Gene Name: RP11-598P20.5
  ENST ID: ENST00000534420
  CDS Start-End: 1-97
ctggcgaggcagaggcaagcgaccagcagcagaagatcatacccaggccacgtgcagccggccacagcaagggacagagcagaatgggctgatatagatccggtgccgcagaatgatggccccaatcccgtggtccagatcatttatagtgacaaatttagagatgtttatgattacttccgagctgtcctgcagcgtgatgaaagaagtgaacgagcttttaagctaacccgggatgctattgagttaaatgcagccaattatacagtgtggcatttccggagagttcttttgaagtcacttcagaaggatctacatgaggaaatgaactacatcactgcaataattgaggagcagcccaaaaactatcaagtttggcatcataggcgagtattagtggaatggctaagagatccatctcaggagcttgaatttattgctgatattcttaatcaggatgcaaagaattatcatgcctggcagcatcgacaatgggttattcaggaatttaaactttgggataatgagctgcagtatgtggaccaacttctgaaagaggatgtgagaaataactctgtctggaaccaaagatacttcgttatttctaacaccactggctacaa

SEQ ID NO: 178345 - DNA, 460 bp, Homo sapiens
  Payload ID: 15093
  Gene Symbol:
  Gene Name: RP11-599B13.6
  ENST ID: ENST00000498285
  CDS Start-End: 97-460
atctttccgtcccgggcagccagcgccagtcggagccagcgcgagccgccgccgccatcactgccgctgccaagtcctccacccgctgcccccgccatgtctgctaccgctgccacggccccccctgctgccccggctggggagggtggtccccctgcaccccctccaaacctcaccagtaacaggagactgcagcagacccaggcccaggtggatgaggtggtggacatcatgagggtgaacgtggacaaggtcctggagcgagaccagaagctgtcggagctggacgaccgtgcagatgcactccaggcgggggcctcccagtttgaaacaagcgcagccaagctcaagcgcaaatactggtggaaaaacctcaagatgatgatcatcttgggagtgatttgcgccatcatcctcatcatcatcataggtactggctgtgatcgaacttctcaaccct

SEQ ID NO: 178346 - DNA, 1287 bp, Homo sapiens
  Payload ID: 15094
  Gene Symbol:
  Gene Name: RP11-5A19.5
  ENST ID: ENST00000580114
  CDS Start-End: 1-436
agatgcacgcgcgtccccgctgcccaacgaagcctgggtcgcgttgcgccgccgccaccctgggctggcagtggagctggagctggagcccgcgctgcccgctgagagcgtgacgcgcgtcctgcagccagccgtccccgtggctgcgctgcgcctcaacctctcaggcgacaccgtaggcccagtgcgcttcgcagcacaccactacgccgcaaccctgtgcgcgctcgaggtgcgcgcagccgcttcggccgagctgaacgccgcgctggaggagctggcggcgcgctgcgcggccctgcgcgaggtgcattgtttctgcgtggtgagccactcggtgctggacgccttccgcgcgcactgcccgcgcctgcgcacctataccctcaagctcacgcgcgagccgcatccctggaggcctacgctcgtggcgtgattgggcgacttctctcccccgtccccgtggacacgccccacccgctcggtcctggacacactgcccccctctcttgcctccacccctctgcggactctgcagctccgcggccccggcgcagggagagggagggcacgggcgcgggccgggcctcaagggacttgcccagcccacaccaggtcgcgcaccggcgatttctcctgtagaacaaagaaggaaatagagggaccgagaggggtgggactcgaacccaagtctcccactcatctcaccccaccccaccccactccaccccaccccacccctccactccactccactccacacatcccatccagccagccttttctgcctgctggtgcctcggccgctgtccgagccccgccccgcgggcttgcacgtggcccccgcctgacccggcgccccggggcggagtagggcggagcgggcggcaaacgcagcactttccgcggctttgacgagcccgcagcggccgggcccgagcgcagagccgggccgagactgcaccatgcaggaagcgccagctgcgctgcccacggagccaggccccagccccgtgcctgccttcctcggcaagctatgggcgctggtgggggacccaggcacagaccacctgatccgctggagcccgagcgggaccagtttcctcgtaagcgaccagagccgtttcgccaaggaagtgctgccccagtatttcaagcatagcaacatggcgagcttcgtgcgccaactcaacatgtacggttttcggaaggtggtgagcatcgagcagggcggcctgcttaggccggagcgcgaccacgtcgagttccagcacccgagcttcgtgc

SEQ ID NO: 178347 - DNA, 1473 bp, Homo sapiens
  Payload ID: 15094
  Gene Symbol:
  Gene Name: RP11-5A19.5
  ENST ID: ENST00000518227
  CDS Start-End: 1-113
tggtgagccactcggtgctggacgccttccgcgcgcactgcccgcgcctgcgcacctataccctcaagctcacgcgcgagccgcatccctggaggcctacgctcgtggcgtgattgggcgacttctctcccccgtccccgtggacacgccccacccgctcggtcctggacacactgcccccctctcttgcctccacccctctgcggactctgcagctccgcggccccggcgcagggagagggagggcacgggcgcgggccgggcctcaagggacttgcccagcccacaccaggtcgcgcaccggcgatttctcctgtagaacaaagaaggaaatagagggaccgagaggggtgggactcgaacccaagtctcccactcatctcaccccaccccaccccactccaccccaccccacccctccactccactccactccacacatcccatccagccagccttttctgcctgctggtgcctcggccgctgtccgagccccgccccgcgggcttgcacgtggcccccgcctgacccggcgccccggggcggagtagggcggagcgggcggcaaacgcagcactttccgcggctttgacgagcccgcagcggccgggcccgagcgcagagccgggccgagactgcaccatgcaggaagcgccagctgcgctgcccacggagccaggccccagccccgtgcctgccttcctcggcaagctatgggcgctggtgggggacccaggcacagaccacctgatccgctggagcccggtgagggccggggcccctcgattccccctgtggtcccggggtccctccacgtcagtgaacacccatgcccgcccaaccccctcctgagactgggccgtggatccccggatttggccattcagagaagttcaccttggagggggtgtgcgagaggggggtttcctctgcggccgaagaagggttaggagcctgccttctgaagacctagagtccgagggaccttcgaggccatttagttcccaccctaccccatccgacagatgggaaaacagaggccgggagatgggaagggctggtctagctcagggtcacattgcggggctgggaaccccgtcagcctctcctttctgagaactgagtatggagtcagggtctggctgggggtagggactcactgtggtcgctccaggctaggcctcggagcccgttctggcctggcctcgacccatatccccgtaagcggcaggcctggacccaagagtgagcatgagtgtgtgcgcgcgctggagcgcaggactggccgtgagcgggcaccgctcaccctcctggtctccgcccgcacggtgggcgggcggcgttcttggtagagcgggaccagtttcctcgtaagcgaccagagccgtttcgccaaggaagtgctgccccagtatttcaagcatagcaacatggcgagcttcgtgcgccaactcaacatgtgtgagtccctac

SEQ ID NO: 178348 - DNA, 501 bp, Homo sapiens
  Payload ID: 15094
  Gene Symbol:
  Gene Name: RP11-5A19.5
  ENST ID: ENST00000518753
  CDS Start-End: 1-137
tgcgcgaggtgcattgtttctgcgtggtgagccactcggtgctggacgccttccgcgcgcactgcccgcgcctgcgcacctataccctcaagctcacgcgcgagccgcatccctggaggcctacgctcgtggcgtgattgggcgacttctctcccccgtccccgtggacacgccccacccgctcggtcctggacacactgcccccctctcttgcctccacccctctgcggactctgcagctccgcggccccggcgcagggagagggagggcacgggcgcgggccgggcctcaaggagcgggaccagtttcctcgtaagcgaccagagccgtttcgccaaggaagtgctgccccagtatttcaagcatagcaacatggcgagcttcgtgcgccaactcaacatgtacggttttcggaaggtggtgagcatcgagcagggcggcctgcttaggccggagcgcgaccacgtcgagttccagcacccgagcttcgtgcgcggccg

SEQ ID NO: 178349 - DNA, 489 bp, Homo sapiens
  Payload ID: 15095
  Gene Symbol:
  Gene Name: RP11-603J24.9
  ENST ID: ENST00000548861
  CDS Start-End: 10-489
ggttatgtcatgccagatacacacctcaaaggggtacttcggtccttggtggaagcatctagctcaggtgtgtcggtactgagcctgtgtgagaaaggtgatgccatgattatggaagaaacagggaaaatcttcaagaaagaaaaggaaatgaagaaaggtattgcttttcccaccagcatttcggtaaataactgtgtatgtcacttctcccctttgaagagcgaccaggattatattctcaaggaaggtgacttggtaaaaattgaccttggggtccatgtggatggcttcatcgctaatgtagctcacacttttgtggttgatgtagctcaggggacccaagtaacagggaggaaagcagatgttattaaggcagctcacctttgtgctgaagctgccctacgcctggtcaaacctggaaatcagaacacacaagtgacagaagcctggaacaaagttgcccactcatttaactgcacgccaata

SEQ ID NO: 178350 - DNA, 717 bp, Homo sapiens
  Payload ID: 15096
  Gene Symbol:
  Gene Name: RP11-613M10.8
  ENST ID: ENST00000537239
  CDS Start-End: 1-195
gaggatgtgatctcctccatacggaactttctcatctacgtggccctcctgcgagtcagtgagtgtctcccgggctgtgactgtgagaccagcggggagctcaccgacgggcaccccttaactctaaggggtcatcggggccttcgaactgagctgaacgctccatttatcttaaagaaattggacagcatatgaagacaggacatcacatatgaatgcacgatatgaagagcctggttacagtttcgactcctctctgcaagtgaataggcccagaaaggtgtgaccatggaggctggtggcctccccttggagctgtggcgcatgatcttagcctacttgcaccttcccgacctgggccgctgcagcctggtatgcagggcctggtatgaactgatcctcagtctcgacagcacccgctggcggcagctgtgtctgggttgcaccgagtgccgccatcccaattggcccaaccagccagatgtggagcctgagtcttggagagaagccttcaagcagcattaccttgcatccaagacatggaccaagaatgccttggacttggagtcttccatctgcttttctctattccgccggaggagggaacgacgtaccctgagtgttgggccaggccgtgagtttgacagcctgggcagtgccttggccatggccagcctgtatgaccgaattgtgctcttcccaggtgtgtacgaagag

SEQ ID NO: 178351 - DNA, 2591 bp, Homo sapiens
  Payload ID: 15097
  Gene Symbol:
  Gene Name: RP11-613M10.9
  ENST ID: ENST00000540557
  CDS Start-End: 43-936
cggaccgggctcccgcgccgcggccctaggcggcctctcgccatggccaagtggctaaacaagtacttcagcttgggcaacagcaagaccaagagccccccgcagccgccgcggccagactaccgcgagcagcggcgccgaggcgagcggccttcgcagcccccccaggccgtgccgcaggcctcctccgccgcctcggcgtcctgcggtccggccaccgcctcctgcttctcagcctcttcgggctcgctgcccgacgacagcggcagcaccagcgacctcatccgcgcctaccgcgcgcagaaggagcgagacttcgaggacccctacaacgggcctggctcgtcgctgcgcaaactgcgcgccatgtgccgcctggactactgcggcggcagcggggagccaggcggggtccagcgcgccttctcggcctcgtccgcgtcgggcgccgcgggctgttgctgcgcctcctcgggcgcgggggccgccgcgtcctcgtcctcgtcctccggctctccgcatctctaccgcagcagcagcgagcggcggcccgccacgccggccgaggtgcgctacatctcccccaagcaccgcctcatcaaagtggagagcgccgcgggcggtggggccggggaccccctggggggcgcctgcgcgggcggccgcacctggagcccgacggcctgcggaggcaagaaactgctcaacaagtgcgccgcctcagccgcggaggagagcggggccggcaagaaggacaaggtgaccatagccgatgactactcagatccctttgatgccaagaatgatctcaagagcaaagcaggaaagggggagagtgctggctacatggagccctatgaggcacagaggatcatgacaggtttacaggaagcatggagacattcccccagtggctgttttcctgttggcccttgatgacaaaaccttgtcaaagcaattgtgtggagtcaagaagaatgtggctggaatttcagaggcaggaaagtgtccggtcccagcataaaggtatccagttatatgacaccccttacgaacctgaaggccaaagtgttgactcagactcggagagcacagtcagcccccgactgcgggagagcaagctgccccaggatgacgacaggcccgccgatgagtacgaccagccttgggagtggaaccgggtcaccatcccagccctggcagcacagtttaatggcaacgagaagcggcagtcatccccctcaccttcgcgggaccggcggcgccagcttcgtgcccctggagggggctttaagcctatcaaacatgggagccctgagttctgcgggatcctaggagaaagggtggatcctgccgtccccctggagaagcaaatatggtatcacggagccatcagcagaggagacgccgagaacctgctgcgactctgcaaggagtgtagctaccttgtccggaacagccagaccagcaagcatgactactccctctccctgaggaaatccagttatcaaaattgactcaagaagagagaacctaacagaacaataacaatggaagaaattgggaacattatcacaaagctatcatcctgccaaactccaggctcagatgtcacagatggttcaagcgattctcctgcctcagcctcctgagtagctgggattacaggcacccgccaccatgcccgactaaatagtatgttccagtaaaaggagaccatgtgattggcatagtgacagctaaatctggagatatattcaaagttgatgttggagggagtgagccagcttctttgtcttacttgtcatttgaaggtgcaactaaaagaaacagaccaaatgtgcagatgttaaactctctgaggatgtgggccttgcctgtgctgtgctctgttatgcagtatatccagtgcttggcacataatagatgcacacaaactttcacttgaatgacatagggactgcaaggaaggaacagctgctggaaacgaagacacagaaagacacagaagacacagaaagaatataaacggcagattacctgaccttcatgtcaagtactaagacaagagctccatttatcttaaagaaattggacagcatatgaagacaggacatcacatatgaatgcacgatatgaagagcctggttacagtttcgactcctctctgcaagtgaataggcccagaaaggtgtaagagactctttgaatggacataaaattctgcttgttaagaacaagtttggctctggtaactgaccttcaaagctaaaatataaaactatttgggaagtatgaaacgatgtctcgtgatctggtgtacccttatccctgtgacgtttggcctctgacaatactggtataattgtaaataatgtcaaactccgttttctagcaagtattaagggagctgtgtctgaaatggcactgtcttgtcagtcatttctgtttacctttttcttctgcccagagtgtatttgtgaagagtctcttatattatgttttgtggaaatcagcacacaaccacaatgacatttaagcacaggatcattattagtctatgtttttaataaacatatcaattaagaaaa

SEQ ID NO: 178352 - DNA, 625 bp, Homo sapiens
  Payload ID: 15098
  Gene Symbol:
  Gene Name: RP11-618P17.4
  ENST ID: ENST00000592740
  CDS Start-End: 1-625
caatgggaaatacatcaccaaatctggaacccgtgtggaccaccagacaggccccattgtgtggggggagccagggaccaatggccagcatgctttttaccagctcatccaccaaggcaccaagatgataccctgtgacttcctcatcccggtccagacccagcaccccatacggaagggtctgcatcacaaggatgctctgcccaccgtggctgcgcccaggcccgtgtgtcagcgctgcgggcagccgctcgctctggtcgtgcaggtgtattgcccgctggaaggctccccgtttcaccgtctgctgcacgtgttcgcgtgcgcctgccccggctgtagcaccggcggtgcgcgcagctggaaggtgttccgctcccagtgcctgcaggtgccagagagagaggcgcaggacgctcagaaacagggaaacagccttgcagctgaggactggtgtgaaggtgctgatgactggggaagtgatactgaggaggggccttcaccacagtttaccttggattttgggaatgatgccagcagtgccaaagacgtagactggactgctcggctccaagacctccgcctgcaggatgctgtcctgggtgctgcccatcctgtgcctcct

SEQ ID NO: 178353 - DNA, 653 bp, Homo sapiens
  Payload ID: 15098
  Gene Symbol:
  Gene Name: RP11-618P17.4
  ENST ID: ENST00000606020
  CDS Start-End: 257-653
tgattttttttttcctgtgatggtgctttatgtagcagagggcaggagcgctcagcaggacgcaggctgtgcctctgcggacacttaacactaagtggtgagcgggtctagagtggagcaaggtgccctgagaagacaatagtggggtgggggcacaatcagtcaggacggcaacttggcctgtgtcaccaaatcccaagactgttttccactcctcacctctgtgactgcagaaattggatactctgttcactcgatggttctaaaaactgcattgagattatgtttgtttcgggtgaattcctggacaagaccgaggatgactgccatctcctggcaagacgctcaggatgctctgcccaccgtggctgcgcccaggcccgtgtgtcagcgctgcgggcagccgctcgctctggtcgtgcaggtgtattgcccgctggaaggctccccgtttcaccgtctgctgcacgtgttcgcgtgcgcctgccccggctgtagcaccggcggtgcgcgcagctggaaggtgttccgctcccagtgcctgcaggtgccagagagagaggcgcaggacgctcagaaacagggaaacagccttgcagctgaggactggtgtgaaggtgctgatgactggggaagtgatactgaggaggggc

SEQ ID NO: 178354 - DNA, 2188 bp, Homo sapiens
  Payload ID: 15099
  Gene Symbol:
  Gene Name: RP11-619A10.1
  ENST ID: ENST00000614930
  CDS Start-End: 140-406
gggtgattggttggttgctgttcctgcccccacgcctgtcgtggtttagctgaactgagctgaaatcctaaaggccgcggagtcggcggtgttgtaggtagcggtaccttgagtggcaacagaattcgattaaattacaatgggaaacatttttgaaaagctctttaaaagtctacttgggaaaaaaaagatgcggattcttatattgagtttggatacagctggaaaaaccaccatcttgtataaattgaagctgggggagactgtgcctgccgtccctacagtaggtttctgtgtggagacagtagaatataaaaataacaccttcggtgtctgggatgttggcagccacttcaaaatcagacctctgtggcagcattttttccagaacacaaaaggttcgtgagccacacatctccccacaccaagctcctccatacaagacctcggactgcatcaggtaaatgctttttcaggggcaaaatctagagaatctgaaacggtgagccttttttcttttctttctttctttttttttttttttttttttttttgagatgaagtctcactctgttgcccaggctggagtgcagtgcagtggtgtgatcttggctcactgcaaactccacctcctggagtcaagtgattctcctgcctcagccttcagagtagctgggatcataggtacccgtccccatgcctggttaatttttgtatttttagtagagacagggtttcaccatgttggccaggctggtctcgaaattctgagctcaagtgatgcacccaccttggcctcccaaagtgctgggattacagcatgagccaccatgcccagctgtgagcctgtatcttaatcaaagtcctgagaataaccttgaagaagactcccttgcaatgaggaacaacagaagaagcaagggacctggaatctggcagacctgggtttgaattctggctctgtcactttctggtgaagtgacttgagtaatgaacatgagcctttctgggtagcatttacagcacaaagcaatttgaggaataaatgaaagagcacgtgtctagtgcctagcaatgcgctggacacagtgccggtgctcagccatcatgtcacaccagcactgaccggtgagcataaaccctggggatgcccagagctggtacagccaggagctccagaagcgtgggattctcagagggaagtggagctcactgctctacaggtcctgttcaagttagaaagtaagatacaatgcacacaaagccaaattgtcatcattcagctcctattacaggagaactaagagctgcattgaaaattacttgcaaagcttgtaagtggttctgccacttattagccgtgtgaaccttagcaaattacctagcgtctctgagtttcaacttcctcatctgcaaaatagaaatgataataataaccgcatcgcaagagttgttggaaaaatgaaaatgaggtatcataggaggtaacatgtatggagcatttaccataggccaagcactgttctaagaacttcggacatgttatctcacttgtataagtacttaggtgcctacaacataaacagcacctggtaaattaagtattgaaaaaatgctatggggcagaggaagaaatgctaagcttctgtgagaagagaagacagcttgttacacaggtgaaaagaacaagctgcagctgagagaagaaaagtataagagttgctaggtgtgacaatctcaagacttttcaaccactacaaatttaaacagccaccctaaatcaccccaaaggacagactcgagttgttctttttgtctttaatgtttgcgcctctccgaatcagagaagaagctgccaggattccagtacataccaaaacatgatgacaataccctcaactgtgcaagcttttgtgcatctaccgctatgtaaaggaagctgatgtcagtagactggggggaacagtaaggcatgtttgtgaccgaagctcaatttgccatcacagtgtggccacacctacctcactaatattctaatagtgggataaataattcaatagggataaagcctggattttcctcttattctctcttagtgcttacattcttggcatgatatcgatatgccatagacaagccaatatgtgagtgtactctatctgaataaagtatagcctttctacattgc

SEQ ID NO: 178355 - DNA, 3942 bp, Homo sapiens
  Payload ID: 15099
  Gene Symbol:
  Gene Name: RP11-619A10.1
  ENST ID: ENST00000253803
  CDS Start-End: 111-644
ccacgcctgtcgtggtttagctgaactgagctgaaatcctaaaggccgcggagtcggcggtgttgtaggtagcggtaccttgagtggcaacagaattcgattaaattacaatgggaaacatttttgaaaagctctttaaaagtctacttgggaaaaaaaagatgcggattcttatattgagtttggatacagctggaaaaaccaccatcttgtataaattgaagctgggggagactgtgcctgccgtccctacagtaggtttctgtgtggagacagtagaatataaaaataacaccttcggtgtctgggatgttggcagccacttcaaaatcagacctctgtggcagcattttttccagaacacaaaaggtgccagaagcccaggaagcacacatcaaggctcacttgccagcggggtgctgccaataaaatgtagtcacgtggaatttggaatgtggaaaggaggtagaagtcatcctttcctcccccatagcagcaggtgtgcaggctctggtggtcagctggactccatactcccccaccagtcaccagcctggggaccgtggggctgcaaggacctcagcagcggtttcccaagtttcctgacttcttccatcctctggaaatcagctgtggtaaagtagcctgaaagccagtggtgcaaccccatccccacaaccttcaccacctctggcacctccagtgataagcactaattgcctgtatacaacccttttttgtttgaaatatctagagtaatttctgttttcctatctggggtagtgtaacataagaagaaatatatatttggtctctgcccccagttcctaacacaaagctcctaaaacccttggaaattcctgaatgatggcggtgctaagagcattgtcctttgttaatttatcatttttcttttctcctaggtgttttttcctttttaaacttttcttttaggttagggggtacatatgcacgttcgttatatagctaaacttgtgtcatgggggtttgttgtacagattatttcatcacccaggtaccaagcctagtacccaatagttttttctgctcctctccctcctcccaccctccaccctcaggtagggcccagtgtctgttgtttatgagttctcatcattttgctcccacttaaaagaacatacagtatttggttttctgttcctgtcttagtttgctgaggataatggcctctagctccatctgtgttcctgcaaaagacatgatctcgctgttttttatggttgcacatcttttgttctaacatttggtccttaaacctggttcctgacacagagctcctaaatcccttggaattttctgggtgatagaagcgtcctttgttctcatgaggtgactcttggtgggctccttatttggggactggtcaccaaaaagacctatggttggaagcgttgtgctgtcagccccattccccatcctctggcgtggggagtagagctggagctcaatcatgcctatgtgataaagcctccagaaaactccttaaaagacaggacttggagagcttccgggttggcgaacacatccatgttccaggagagtggtgcaccccaactccacaaggacccttccaaacctcaccctgtgtatctcttcaactggcttcatcatttgtgtcctttaaaatatcctttgtaataaatcagcactagtaagaaaactgttttcctgggttccatgagctgttctagcaaatgttcaaacctgaggagggagttgtggggacctccaatttacagccagttggtcagatgcataggtgatgcttggccttgcacctggggtctgacatgcggatggtcctgtgtgactgagcccttaacctgtggagtctggtgctcactctgcttagggcttctcttgcctttttagtgtccttctaggcggcctttccttcctcttgtcagctcagaaaacttttcttccacttcccttcttctaaaccatcccttacatctactcctttccagccgaccaagagcagaaccacggctggttccactgccaccatgctgtcccacactgtctcctcaggatgtattcagatgtccagccctccccccagtctaggagccccccctttgaggaaagggatgctggcctagtcaactctttcccagcaccaggtacagcatctggcacgttccatctttttcatggactctccccaggcggcctgaccttccctcctctgaaccggtgcatttcttgtctgcatcatgtttgccctaatcagatatcaccttatttcctcttttaaaaaatgctttttttctctggcaggcttcatcggaatcacaattttcattcatttagtaactgttgttgtttattctatgtatttttgcaggaggcctgaggtgggctgtgttctcctcctatggcagggcttcactctcctcctcctccgttggggcttcgctgtccctgggataagaataacaatgccaaggttttcattcttgaaaggagcaattaagcttctcaccccctcctcattttagatgggaactgtgagggccccatcatttacccagggtccctgttgaggatcttgtcctcattagatgacttcttgtgcagcttccatgcatgattatttattcttgtggcactgagaggtttgtacatatctttaaaccagagcggctgtccaaatgaggaaagtccatcctagaagatagaaagggaaatattaattttgcatgtcctctgctttccctggccacagcaatgaatcctccaatgtacctgactctcccttcgcgaagagcatcccctccgtggcagaaatctgaaaatgcccctggggagacacatgcacaagacagtgagtgatgcagccgtttcccacgtatctcacaatgtacttctctggtcttattaggactaaatgagtatctcagtccataatcacagggagaaccaccaccacagaccacatacccggggtcttgaaaataattccatgcatgtgggactttcagaagctctccatgtctgcccagaagggccccacaatatactggggggactttgtatgtggctcagcatggagcaggggcaggattttcagtcccactcactcccttggccaagtgcccttgtgcagtgaacaaactgcacaaccatgctgggcagaagcattttatatcagtccccttcggacttagtctcacaggcatcatttgatgggggatgggagatgaagtggttcttcgttttctagatactttattctataagttggatcacctcaagcaaatgcgtgagtgcagctagccaagttctctatctcacagtcttcatatggctggctgtcgctgatgagtgagtgagctacgaaatcagcttaaagcacaacatgttatttttgaatttgaataaaataggaaaaggcagagtgcattgtgtgaccatggggtaagtaagacactctccctttctccttctcagttttcctgtcataaaaggacaaactactatctaaggtctccgtagttaaaattcttttttgttgttttttttttatttgagacagtttggctcattccccaggctggagtgcaatggtgctatcttggctccctgcaacctgcgcctcctgggctcaagcagttctcctgcctcagcctcccaagtagctgggattacacgcctgcgccaccacacccagctaatttagtatttttagtagagatggggtttcaccatgttggtcaggctggtcacgagctcctaacctcaagtgatcccaaagtgctgtgattacaggcgtgagccatcctgcctggcctttctggttaaaattctgtgaggtttgcataaaaggaatagagtaggggcccaaaaaccagtaagatgagaaaatagtgtttcctcagttctaggatccagggg

SEQ ID NO: 178356 - DNA, 491 bp, Homo sapiens
  Payload ID: 15099
  Gene Symbol:
  Gene Name: RP11-619A10.1
  ENST ID: ENST00000619860
  CDS Start-End: 75-338
tcctaaaggccgcggagtcggcggtgttgtaggtagcggtaccttgagtggcaacagaattcgattaaattacaatgggaaacatttttgaaaagctctttaaaagtctacttgggaaaaaaaagatgcggattcttatattgagtttggatacagctggaaaaaccaccatcttgtataaattgaagctgggggagactgtgcctgccgtccctacagtaggtttctgtgtggagacagtagaatataaaaataacaccttcggtgtctgggatgttggcagccacttcaaaatcagacctctgtggcagcattttttccagaacacaaaagcctgatctagttgaatctgaagatgtggacctgctgatgaagagggctgactgtatctaacttagggtcttgcatgcagctggcacttaatacattttattgactgttttagataacattcaacagataattcctaataaaaactcttaaaagtagga

SEQ ID NO: 178357 - DNA, 798 bp, Homo sapiens
  Payload ID: 15099
  Gene Symbol:
  Gene Name: RP11-619A10.1
  ENST ID: ENST00000620742
  CDS Start-End: 88-465
aactgagctgaaatcctaaaggccgcggagtcggcggtgttgtaggtagcggtaccttgagtggcaacagaattcgattaaattacaatgggaaacatttttgaaaagctctttaaaagtctacttgggaaaaaaaagatgcggattcttatattgagtttggatacagctggaaaaaccaccatcttgtataaattgaagctgggggagactgtgcctgccgtccctacagtaggtttctgtgtggagacagtagaatataaaaataacaccttcggtgtctgggatgttggcagccacttcaaaatcagacctctgtggcagcattttttccagaacacaaaagagctatcagcttcccagtttgcacaattcatcaagaaattatgcggggtcactggcacaaatgatgaggcatctcctggaagcttaacttcttatccatcccatctcttggacagatgatgccagttaattactttgaataaatatgggcaaaagcttatcattatcaacaaatgagaagaaagaaaccctatgccaggtaacaccaaagctttggcccagtgccctctgttgaaacatcctaggctttttctttccactcctattacaactgatctgatttggccccttcacacctcactcctagattttgctagacctttctattttgtctccctgaattaagcttttccttttggacactttacatatggattctaaaacaatcctctgcatgtctacacttgcacataatgcaaaaaacaaaataaaataatcttcctgttttgatca

SEQ ID NO: 178358 - DNA, 581 bp, Homo sapiens
  Payload ID: 15099
  Gene Symbol:
  Gene Name: RP11-619A10.1
  ENST ID: ENST00000630266
  CDS Start-End: 69-356
aggccgcggagtcggcggtgttgtaggtagcggtaccttgagtggcaacagaattcgattaaattacaatgggaaacatttttgaaaagctctttaaaagtctacttgggaaaaaaaagatgcggattcttatattgagtttggatacagctggaaaaaccaccatcttgtataaattgaagctgggggagactgtgcctgccgtccctacagtaggtttctgtgtggagacagtagaatataaaaataacaccttcggtgtctgggatgttggcagccacttcaaaatcagacctctgtggcagcattttttccagaacacaaaagctgctcactcccaaagcctgacaagttgatgccactgctgtctgagggctcctctggctcaacaatcagctcagtgcttgtgtagttcttccgggcttgtaacaccttcatgaacgctccttctggattccctaccgatgcttcttcagctgtcaaaaaagaagagactgctttgatcatgaaagatgatgggatgggatgcatcagtccatagctgtacaccccagtcacacagagtaggagtcagcaaacat

SEQ ID NO: 178359 - DNA, 1589 bp, Homo sapiens
  Payload ID: 15100
  Gene Symbol:
  Gene Name: RP11-637O19.3
  ENST ID: ENST00000480294
  CDS Start-End: 133-261
agcgcgcacgcaatcgcgtttccggagagacctggctgctgtgtcccgcggcttgcgctccgtagtggactccgcgggccttcggcagatgcaggcctggggtagtctcctttctggactgagaagagaagaatggagaagcccctcttcccattagtgcctttgcattggtttggctttggctacacagcactggttgtttctggtgggatcgttggctatgtaaaaacagaaaaacaaagatgctttgcagcctattaaggaagacaggactgggaaggcccaggatgatgctttctggcttcaatcacttattacggatgcattccatgataaaggatttcagaaaataaaagaatactttcaacagaaagagagccactttcctcaaaaatataatcgtcttctattataccgtcttgacagatcaataaataaggaactagataaaaatgaatttcagtctgtgtcactgttgctgaaatgtattcagcgattcctcgtagatggcctgaaagaagatgaacctctgctaattcggcagggactgatcccaaagctagtttcctggtttgaaagaacaacaggaattctgacctcggaaggcctagcctcagacacgtcgctgatttgtgttatagaagatttctttgacactgcattgattatttccaggagtagtagtgaagggaaaattcagatgttggattccttcctacttagcttaggattcctggtgacagaaaagactgtaaatcatttgcttcaacaggagggcttgaagacttttaactgcattttgcacgctgtccctcgagaagagagaaaaaaattccctttgtcagaaggcatgtgtcatcttatgaaagaccttgcaaggacactcttgactgtgggtgattatgaccagcaggttgctatttctgaagcgctgtgtagactgacgattaaaaaatcaagggatgaacttgtccataaatggtttgatgatgaagtcattgctgaagctttcaaagaaattaaggatcgagaatttgagacggacagtagacgttttctcaatcacctaaacaacagacttggtgaccaaagaagggtgtattcatttccgtgtattgctgcttttgctgatgagcatgagatgagaaaaccagcggatgaaaaattagagaaattttggatcgacttcaacctaggaagtcagagtgtcactttttatatagacaatgctgagaatactctatgggactcagtgacacttccgaaggaagcggtgatgaatttcagcataacagaaacggagaagataaagatatttatcatttacctgaagaagcccatgattatcagctacaaagaagtcatgaaaatagaaatccattttgatttgcagttcaacatatcacaagtttccattcaagctttaggagaagacaaacagatgttgcctgaccagacgaaaatctcctcagaactttttagtaagtctgataaagaagacagggagagtcccagtggccttgaaagagaaacagaagtctcattacagaaaacatctcttctctgagagtaatcaagattcaagtacc

SEQ ID NO: 178360 - DNA, 745 bp, Homo sapiens
  Payload ID: 15101
  Gene Symbol:
  Gene Name: RP11-644F5.10
  ENST ID: ENST00000257899
  CDS Start-End: 1-343
ttccagcttccggagccggagggggcccggcgtacccagcccccagcccgacgtgaccatgctgtcccgcctcctaaaagaacaccaggccaagcagaatgaacgcaaggagctgcaggaaaagaggaggcgagaggctatcactgcagcgacctgcctgacagaagctttggtggatcacctcaatgtgggtgtggcccaggcctacatgaaccagagaaagctggaccatgaggtgaagaccctacaggtccaggctgcccaatttgccaagcagacaggccagtggatcggaatggtggagaacttcaaccaggcactcaagggctttttggtctggtgaataatgctggtgtggctggtatcatcggacccacaccatggctgacccgggacgatttccagcgggtgctgaatgtgaacacaatgggtcccatcggggtcacccttgccctgctgcctctgctgcagcaagcccggggccgggtgatcaacatcaccagcgtcctgggtcgcctggcagccaatggtgggggctactgtgtctccaaatttggcctggaggccttctctgacagcctgaggtgagggtctactgaatccagccttccagcaagagattgtttttcaaggacaaggactttgatttatttctgcccccaccctggtactgcctggtgcctgccacaaaataagcactaacaaaagtgtattgtttaaaaaataaaaagaaggtgggcagaaa

SEQ ID NO: 178361 - DNA, 367 bp, Homo sapiens
  Payload ID: 15101
  Gene Symbol:
  Gene Name: RP11-644F5.10
  ENST ID: ENST00000549424
  CDS Start-End: 145-279
tggggcacttgtttcctgagtccgggctggaaatctcggagttaccgattctgcggccgagtagtggagaaagagtgcctgggagtcaggagtcctgggcgctgccgctgacttcctggcgtccctgatgtggcccaggcctacatgaaccagagaaagctggaccatgaggtgaagaccctacaggtccaggctgcccaatttgccaagcagacaggccagtggatcggaatggtggagaacttcaaccaggcactcaagggctttttggtctggtgaataatgctggtgtggctggtatcatcggacccacaccatggctgacccgggacgatttccagcgggtgctgaatgtgaacacaatggg

SEQ ID NO: 178362 - DNA, 3382 bp, Homo sapiens
  Payload ID: 15101
  Gene Symbol:
  Gene Name: RP11-644F5.10
  ENST ID: ENST00000550412
  CDS Start-End: 17-385
acagcggtcacgtgacatggccccggggagccgaggtgagcgttccagcttccggagccggagggggcccggcgtacccagcccccagcccgacgtgaccatgctgtcccgcctcctaaaagaacaccaggccaagcagaatgaacgcaaggagctgcaggaaaagaggaggcgagaggctatcactgcagcgacctgcctgacagaagctttggtggatcacctcaatgtgggtgtggcccaggcctacatgaaccagagaaagctggaccatgaggtgaagaccctacaggtccaggctgcccaatttgccaagcagacaggccagtggatcggaatggtggagaacttcaaccaggcactcaagggctttttggtctggtgaataatgctggtgtggctggtatcatcggacccacaccatggctgacccgggacgatttccagcgggtgctgaatgtgaacacaatgggtcccatcggggtcacccttgccctgctgcctctgctgcagcaagcccggggccgggtgatcaacatcaccagcgtcctgggtcgcctggcagccaatggtgggggctactgtgtctccaaatttggcctggaggccttctctgacagcctgaggtgaggggtacagggctctgggttccaggactaacagcagcccactcaacaaacgtgggccagcagaggtggttaagatacagcacattggaatagttaagaagagacagtttagggctagacttcatgggttcaatgaagtctacccttatgtaagctttgtgaccataagtagattacttctctttacccatttttaacgtgtttgttttttgttttttgagatggagtcttgctctgtcgccaggctggagtgcagtggcgcgatcttggctcaccacaatttccacccccggggttcaagcgattctcctgcctcagcctcccgagtagctgggactacaggcatgcgccaccatgcctggcttatttttgtatttttagtagagacagggtttcactatgttggccaggttggtctcaaactcctgacctcgtgatccgcccacctcagcctcccaaagtgctgggattacaggtgtgagccaccacgcccggccttgcctctcgtctttaaacaataaggttcaaagttccgtgggagcacaaaggagacatgatgaggacaacgggagtagggcctgagtttttttttgtttttttttttttaagcgttttgctcttgttgcctaggctggagtgcaatggcgagatctcagctcactgcaacccctgcctctcaggttcatgtgattctcctgcctcagcctcccgattagctgggcttacaggcacgtgccaccactcccagctaatttttttgtatttttagtagagatggagttataccatgttggccaggctggttttgaactcctgacctcaggtgatccacccgacccggcctcccaaagtgctgggattacaggcatgagccaccacacacggcccaaggcctgagttcttagcaggagtataaggcgcctaagcttagtctaccttctaaggaagcctgcgtttgtcaccatcactcagcaaataacctgaatgtctcctgtctctcagccttaatttttcaggcagcatcatgggacacatacttttagttttgagacaaggccttgctctcacccagggtggagtgcagtggtgcagtcacggcccactgaacttcaaactcctaggctcaagcagctcaagcgatatccgcctcagcctcctgagtagctgagaccacaggcgcgtgccagcatgcctggctagtatttttttacagatggggtcttgctgtggtgaccagacttgtctccaactcccggcctcaagcgatgcttccgcctgggcctcccaaagtgttgggattataggtgtgagccactgcatactggaacacatactttatacttgaatttttttttatccccttccctcctgctccttacctatacttggatttctacatctgtgccagggcagtgggatgtatccccactttccccatcagcttaccctccagcaaatacgagactatacccttcaatatccagcactcagggctcaaccatgtgttttgggagcaagggaatggggttcctctaggtcaggaatcggcaaactcagtactcaagccagatctggccagctgcctacaagctgataatggttttttttatttttaaatggttacattgtaaactgttatataagtacctgataatatcattaattttgtttcttggcctgccatgcttaaaatattaactctctggccctttaagaaaaaaacgtgctgacccctgctctagatcaaagaaaacaaacctcaaaaatactttcctccctctaccccacttgacccttgtcccggggcagtaggcatctccgtcaaaactcttgtccctggtctgtggtaactttctcagctccccaacccatgtccctcaaagtcccctccctatagggcaagaacccagcaacttcgctctgccccgactctaggcgggatgtagctcattttgggatacgagtctccatcgtggagcctggcttcttccgaacccctgtgaccaacctggagagtctggagaaaaccctgcaggcctgctgggcacggctgcctcctgccacacaggcccactatgggggggccttcctcaccaagtgtgagtagccaggcccacacaggggcacatgaagggaaacaagtaccagaaaggccagtcctgcataagcctgctaggaggtgggtggggcacccagggcagggttgagggtgaacaggatgttacaagagtgcccaggccatgtggaacctgcccactccccacactgaggaggggactgagggtgacaagcccagggccccagaagacagtacctaagatgggctggagtgaggaagggaaactgattgcaaccacctatggggctgcagacctgaaaatgcaacagcgcatcatgaacctgatctgtgacccggacctaaccaaggtgagccgatgcctggagcatgccctgactgctcgacacccccgaacccgctacagcccaggttgggatgccaagctgctctggctgcctgcctcctacctgccagccagcctggtggatgctgtgctcacctgggtccttcccaagcctgcccaagcagtctactgaatccagccttccagcaagagattgtttttcaaggacaaggactttgatttatttctgcccccaccctggtactgcctggtgcctgccacaaaataagcactaacaaaagtgtattgtttaaaaaataaaaagaaggtgggcagaaatgtgcccagtgg

SEQ ID NO: 178363 - DNA, 1024 bp, Homo sapiens
  Payload ID: 15101
  Gene Symbol:
  Gene Name: RP11-644F5.10
  ENST ID: ENST00000551946
  CDS Start-End: 17-181
acagcggtcacgtgacatggccccggggagccgaggtgagcgttccagcttccggagccggagggggcccggcgtacccagcccccagcccgacgtgaccatgctgtcccgcctcctaaaagaacaccaggccaagcagaatgaacgcaaggagctgcaggtgtggcccaggcctacatgaaccagagaaagctggaccatgaggtgaagaccctacaggtccaggctgcccaatttgccaagcagacaggccagtggatcggaatggtggagaacttcaaccaggcactcaagggctttttggtctggtgaataatgctggtgtggctggtatcatcggacccacaccatggctgacccgggacgatttccagcgggtgctgaatgtgaacacaatgggtcccatcggggtcacccttgccctgctgcctctgctgcagcaagcccggggccgggtgatcaacatcaccagcgtcctgggtcgcctggcagccaatggtgggggctactgtgtctccaaatttggcctggaggccttctctgacagcctgaggtgaggggtacagggctctgggttccaggactaacagcagcccactcaacaaacgtgggccagcagaggtggttaagatacagcacattggaatagttaagaagagacagtttagggctagacttcatgggttcaatgaagtctacccttatgtaagctttgtgaccataagtagattacttctctttacccatttttaacgtgtttgttttttgttttttgagatggagtcttgctctgtcgccaggctggagtgcagtggcgcgatcttggctcaccacaatttccacccccggggttcaagcgattctcctgcctcagcctcccgagtagctgggactacaggcatgcgccaccatgcctggcttatttttgtatttttagtagagacagggtttcactatgttggccaggttggtctcaaactcctgacctcgtgatccgcccacctcagcctcccaaagtgctggg

SEQ ID NO: 178364 - DNA, 1792 bp, Homo sapiens
  Payload ID: 15102
  Gene Symbol:
  Gene Name: RP11-65B7.2
  ENST ID: ENST00000627615
  CDS Start-End: 1-472
gggaagaaaggagcctgactcttatgatggaataaccacaaatcagagaggagtcacaatagcagctcttggtgcagactgtataccgatagtttttgcagatccagtcaaaaaagcatgtggggttgctcacgctggttggaaaggtactttgttgggtgttgctatggctacagtgaatgctatgatagcagaatatggctgcagtttggaagacattgttgttgtacttggaccttcagtaggaccttgctgttttactcttccaagggaatcagcagaggcatttcataatcttcatcctgcatgtgtacaactatttgattcaccaaatccctgtatcgacatccgtaaagccacaaggtacatctttcctggaactttttcatgccaacatccatactttttttcatattgctttggctattgggaaaataaactcttgctctcttttgaaaaatatttttcctaaggattcttctagaacagggaggaattcttccacagaatattcaggaccagaaccaagatctcaacctctgtacatcttgccatcctgacaagtttttctcccatgtccgagatggccttaattttggtacacagattggcttcatatcaattaaagaatgagatacttgactggatttttgtataactgcttcctgcctccttccaaactgactgcaagagagaaatttagctgtttgatttacttaaaaccaaatggattacaatggataattcatcttttggattcttcttggctatcacagtttctcagactttatttttcatgaccttggcagctttgaggagcactggccagatggtgagaactggtctgaatgtacaattcagtcttactgttttccatcaaggtgtcaccaatcttccagtctcccaggcagaagtttttgagagacaaatggatggaaaaactttttggccctcttccttaggatcagaagccctttggacttagactgaagcaagttaccagcttccctggttctccagcttgcaaatgacctatcatgaaacttctcagcttcaataatcatagcttcaaccagcactactacttgaggacctatgcagtgtttgtccatgagcatggaatgactcatactggcctcagagttagggactcactttaaaggaaaggggatgcagtagtgggcacatgactaagaaatccaccgatcctctcatatactgcaccaccagaagctgctggattagcagagcaaaggcaaagattgaccagaccaagccctgagacacagtgttgagagccaagacataaagttgtgaagattcagacccagagcccagcagggcacaggctggaggggtgatgtgagtgatcagtaacaccatgaagactctgctcctgggtcaggaatgcttttttgtccctgtttttggattttccaccatgatcagaaagaaatctaaaggtgaaggaaaggcagcgttcagcactgagcaagtccatgttggagaaaggataaatattctcaaagattcaagctatgaagaccaaatctacagaagatagcaactcattcacagggaattggaaatccttgtcttcgtggttcctggctcagcaggacccctgtggggcctctccctctcttgggaaagagattgctctagaaggtttactacaccagtgaggagaagatgagcgcaagggggattggccggctgagggcgaaatcaagactggagccaagtgcgctgagctctcacatgaggtcctttgctcctgttccctggaggc

SEQ ID NO: 178365 - DNA, 580 bp, Homo sapiens
  Payload ID: 15103
  Gene Symbol:
  Gene Name: RP11-691N7.6
  ENST ID: ENST00000531074
  CDS Start-End: 1-55
caaattccctgagcctcaagaggtggtggaagagttgaagaagtacctgtcgtagggagatttgggtagaagccctcatgctgagctttgtgtccctggtgatgttggaacattaatgatggaacatggccaaacttcagtcatgatcctgaagccatggtttcttccctgccagaaatgaaggttcagttatgaggcaaccctctatgtgaagtgagggggtctctctccctccttctccttcctctgtgattcaccttcctttttaccctgccctgcggcggctccgccccttaccttcatggacgactcagaggtggagtcgaccgccagcatcttggcctctgtgaaggaacaagaggcccagtttgagaagctgacccgggcgctggaggaggaacggcgccacgtctcggcgcagctggaacgcgtccgggtctcaccacaagatgccaacccactcatggccaacggcacactcacccgccggcatcagcattacactctatgtaatgggagtggggtggaggaagagtctcccaaggtggttggatctcactattctactggaagaggagca

SEQ ID NO: 178366 - DNA, 518 bp, Homo sapiens
  Payload ID: 15104
  Gene Symbol:
  Gene Name: RP11-697E2.12
  ENST ID: ENST00000622269
  CDS Start-End: 1-314
gattccagaaaattcggaggcaaatggaggcgcctggtgccccgcccaggaccctgacgtgggaagccatggagcagatacggtggcatttttcaactccgctggaaccagtgcccaggaggagcaaaggatgtgctgccagcccctggctcacccagtggcctcgtcccagaagaagccagaagcagcagccccagccccagggactgggggaaagtacatcaccccatatgggagccaggggacagtgccaaagatgcggcaccgggaggaggaggagatcgtcaggctggcccaggaccgggaggagatgaaggtactctgcataacaactggttatgatcagggccaatgactccccaccacttcccagcagataaggctcaggcattgaagcagagagtccctttgggccctgaggatgcaggaagtacctgcacccacctaagacctccatcattggttcatccaaactacttcctaatgtcagaataagaaacaagtctcttttgggctca

SEQ ID NO: 178367 - DNA, 3838 bp, Homo sapiens
  Payload ID: 15105
  Gene Symbol:
  Gene Name: RP11-697E2.6
  ENST ID: ENST00000561573
  CDS Start-End: 265-918
agaggaagcgctgccccggcagccgcagccacggccaccgggagctaggagtgaacccctgcgggggagcagcttccccctcgcgatcgtggggacagccagtcctgtgaaacgaggaggcggttccggacgcccagaaacgcccagggagacctggagccgggggaagaggggacatgagcggccagctgagtccatccccaggcggctaggggcggacccagcagcccctcagctctcctcgtaaccacggaatctgagagaatggagccgagtacctgtaggaccatggaatcagaggaagactatgttgaggaaaaggaatctgagaagtgtgttaaagagggagttaccaacccctctaactcttcacagcaggctctcttaaaagctgactataaggcattaaaaaatggggttccctcacccattatggccacaaaaattccgaagaaagtcatagccccagttgacacaggcgacttagaagctgggaggaggaagagaaggcggaaacgcagatcactggccatcaacctgaccaactgcaagtatgagagtgtgcgtcgggcagcccaaatgtgtggcctgaaggaggtgggggaggatgaagagtggactctgtactggacagactgcgctgtctcactggaacgagtcatggacatgaagaggtttcagcccctcctcattgatggcttcaagtttgatatgcgagtctacgtcctgatcacatcctgtgaccctctccggatcttcacatatgaggagggcctagcccgttttgccaccacgccctatatggagcccagccataacaacctggacaatgtctgcatgcacctgaccaactatgctatcaacaaacacaatgagaattttgtccgggatggcgctgtgggcagtaagagtatctgaatggaggtacatgtgcctgttttgaaatccttggttttgacatcttgctggaccacaagttgaagccctggctgctagaggtaaaccactctccaagctttaccacggactcatgccttgatcaagaagtaaaggatgcacttctctgtgatgctatgacccttgtcaacctccggggctgtgacaaaaggaaggtgatggaggaggataagcggcgagtcaaggaacggcttttccagtgctaccgacagccacgagaatctaggaaagaaaaaactgagtcatcccatgtggcaatgctggaccaggaacgatatgaggattctcacctgggaaaataccggcggatctaccctgggcctgacacagagaagtatgcccgcttcttcaagcacaatggctccctcttccaagagactgctgcttccaaggccagagaggagtgtgccagctgctgccgggacagctggacaccatgaggcctcaagaaattgtggaagaggaggagctggagcggatgaaggccctgctacaaagggagactctcatccgaagcctgggtattgtagagcagctcacccgtctgcagcaccctggcccccagggccagaaaaaacttcatgagagtcgggtgagggtccctgtgaagtctcccagaggaaaagggaacaagggctgtcattccaggacatggtgttggtctcaacaaaggaggcttgtgtgatggtatctgtcagtggagcctgggaaagcagagtgcgctagctggaccttgggagagggtctgttgattccttttgcgtctgttcccaagctcctttgttttagatatgacatccagcaagttgcagctccaaaccttctcatttacaggaaacttgctctctatattcctgtcccaaaataaccccacactcatgactgacaaataacaagcccaccaccctcagtggcttctgtataattttctccctagcactgccagtgccccagctctaatgggagataagtaaacagatttgggccaacaaaagagctgccgctttcactattccctgggctggtagcaaacctgttgggtcttctgtttttgttgaaccccaaaggagtatctggttaaatagtggccgcggcctagaagagatttttttcagttacctccttcttccaacgctccatccaaacttacataaaaatgtggtaaggggctgctcttctcctctagcctagattttgctaggacaggctgggcagtcaagaactgaaatctatgagtctggtcctactggtgctcctaagaggggctgccacagagcagggcgctcctcatttcctgcatccagttctgccccatgaatcaatccccaggatcttaggggcactgccaagcatgaatgctgcaatcccacatgttccccggtaccatctgcagcccaagaacttcaactggacaggagagccggcagccatcaactcctgttcattgtcaatgaagaaggctgggaggtgctatttttccagtgccagaatcaggctcactagccaaggacaagccagcagaaggctagaagccataaaccgagtcctggcaggatcagtgccacccactttaaccccaaagcagggctattttctgcaaccggaaagagtggcatctgactcatggactgaatgcaccttgccctccatggtaaactctgaacacagagcagccaaggttcccctctgccctgcgtctgcacccatgctgcagcgttccagagcactcctcaacatcaatcagttcagcaccctgaaacgacagaaacaagcaatccgattccagaaaattcggaggcaaatggaggcgcctggtgccccgcccaggaccctgacgtgggaagccatggagcagatacggtatttacatgaggaatttccagagtcctggtcagttcccaggttggctgaaggctttgatgtcagcactgatgtgatccgaagagttttaaaaagcaagtttttacccacattggagcagaagctgaagcaggatcaaaaagtccttaagaaagctgggcttgcccactcgctgcagcacctccggggctctggaaatacctcaaagctgctccctgcaggccactctgtatcaggctctttgcttatgccagggcatgaagcctcatctaaagacccaaatcacagcacagctttgaaagtgatagagtcagacactcacaggacaaatacaccaaggagaaggaagggaagaaataaagaaatccaggacctggaggagagctttgtgcctgttgctgcacccctaggtcatccaagagagctgcagaagtactccagtgattctgagagccccagaggaactggcagtggtgcgttgccaagtggtcagaagctggaggagttgaaggcagaggagccagataacttcagcagcaaagtagtgcagaggggccgagagttctttgacagcaacgggaacttcctgtacagaatttgagtcggggcttggcttatggagatgcctcgtgaaacacagctgggcaagtattaatgtatatggaacagcctggatttctgcatatggataagccaccttggaataggaagaggtgttgagcctggactgtgggaggaaagagctgcgtggatagattcaaacttcctgtggtagtgctcccagtctgacctctgtagaccttcagtactcactcttcttgcttaggctctctgtgtgttgaaagccatcccgtgttgcatgtgttgttacaattttctgtgatacttgcaatttatgtttgagaagaagtgaaaagtttgccttctgacctcatttccttcttgatcagtgaacactaacattttggggacaacttagtcaattggttttccttacaacaaaataaagtaaaatgtagca

SEQ ID NO: 178368 - DNA, 1388 bp, Homo sapiens
  Payload ID: 15106
  Gene Symbol:
  Gene Name: RP11-717K11.2
  ENST ID: ENST00000512921
  CDS Start-End: 112-1269
gattcgtctagttaaaccctggtgttcctgacacaaacttcaggaaaggattttgcacttgtgcagaccgggcgagcagagtaagaagcagtaactattggtacttcagagatgaatgcattcttggatgacccagaatttgccgatattatgctgagagcagagcaagcaatagaagttggaatttttccagaaagaatctctcaaggttcaagtggaagttactttgtgaaggatcctaagaggaaaattattggtgtgtttaaacccaaatcagaagagccttatggtcaactcaatccaaaatggaccaaatatgtccataaggtctgctgcccttgctgctttggccgaggctgcctgattcctaatcaggggtacctttccgaagcgggtgcctatcttgtggacaacaagcttcatctgagcattgtacctaaaacaaaggtggtttggcttgtcagtgagacatttaactataatgcgattgaccgtgcaaaatcaagaggcaaaaagtatgctttagaaaaagtgccaaaagtgggtagaaagtttcataggataggactccctcctaagattggttcctttcagttatttgttgaaggttacaaggaggctgaatattggcttaggaaatttgaagctgaccctttgcctgagaatattagaaaacaatttcagtcacaatttgaaagattagttattttggattacatcatcagaaatacagacaggggcaatgataattggttagtcagatacgaaaagcagaaatgtgaaaaggaaattgaccataaggaatcaaaatggattgatgatgaagaattccttattaaaatagctgcaattgataatggtctagcatttccttttaaacatcctgatgaatggagagcatatccatttcactgggcttggcttcctcaagcaaaagttcccttttctgaagaaataagaaatttgattctaccatatatttctgacatgaactttgtgcaagatttatgtgaagatctctatgaactttttaagactgacaaaggatttgacaaagccacttttgaaagtcagatgtctgtgatgaggggtcagatcttaaaccttactcaggcattgagagacgggaagagtcctttccagctagtacagataccttgtgtgattgtggaacgcagtcaaggtggaagtcagggtcggattgtccacctgagcaattcctttacccagactgtcaattgcaggaagccatttttttcctcctggtagtaaatgtcagagtaagagaaacaaactgtttagaattatcatgtttttaaaacatcatagtaatataaatctgctgttaggagctccagttgctaaaacctcaatttaagtctttaaaa

SEQ ID NO: 178369 - DNA, 947 bp, Homo sapiens
  Payload ID: 15107
  Gene Symbol:
  Gene Name: RP11-722G7.1
  ENST ID: ENST00000598087
  CDS Start-End: 91-228
aggctaacctggtgcggagccagcctgggtctcagccccgcgtacggcctttcacgagtcttcaagccttcaggctttcttctagtcaagatgagtgataaaccagacttgtcggaagtggagaagtttgacaggtcaaaactgaagaaaactaatactgaagaaaaaaatactcttccctcaaaggaaactatccagcaggagaaagagtgtgttcaaacatcataaaatggggatctcctccaaagagcagatttcagcattgcctgacagtcttggttttaggcttgtttttttgtaaacctgtgtgtttgtagagatttcagacatcttctgatttcttctcacctatattccctggttaagaggtcaggggtagtgaatgtttccttaagttcctttttaaacttcccattggtatgtaaattccaaatggcagatgctgtcaataaccttgccatggatgacctttgtgtaggtagtccttgcacctcatgcaggataagccaattttaactttctacaatgggtgcctcaatagtttcataatcttcatgaagttgcatcctttggcagcttcttacagtttattttcacttccaatgtagcaataaaataataaatataatcgttgttgtctgactctgtggttcattctggtggtattctaaggaatgaaaagtacacaaaggtaccttttacactcaaacaaaatggttgaaggaaaacttttagcagattagtcctgggggaaaatactaaattctgtccaagtccagtggttcctgacttggggatggtaggtgctttttctttatagttggaatcacagagttagagaaccttgggagagaaggtcatgtggactaacctccttatctcagaatgaggaaatgaaaacacagggtctgaagtaatctgctcaatttgaataagggttggaattc

SEQ ID NO: 178370 - DNA, 2286 bp, Homo sapiens
  Payload ID: 15107
  Gene Symbol:
  Gene Name: RP11-722G7.1
  ENST ID: ENST00000620307
  CDS Start-End: 73-315
gccagcctgggtctcagccccgcgtacggcctttcacgagtcttcaagccttcaggctttcttctagtcaagatgagtgataaaccagacttgtcggaagtggagaagtttgacaggtcaaaactgaagaaaactaatactgaagaaaaaaatactcttccctcaaaggaaaaaggagtctcgctctgtcgccaggctggagtgcagcgacacgatttcggctcactgcaaacttcgcttcccgagttcaagcagttctcctgcctcagcctcccgagtagctgggacctcaggcacatcaccaagccaggctaaatttggtatttttagtaaagatggggtttcgccatgttggccaggatggtctcgatctcttgacctcctgatccgcccacctcggcctcccaaagtgctgggattacaggcgtgagccaccacgcccggcacctagttttcttaattggtcactgtcattttcttaaacttgtgaacaaatgagaacctaaaagagccaatctttcaagatggatcccagtggctaactgagcttaaatttaaaatagagccaagctgccacgtgttgactagagctaacacgtgtactacaaattccccgaaaacccacacctctatctaactttggaactttcagagctcacctgaagcaaccaaccagagctcacctgtcgctgccaataagggctcagctgtattgaccaaccagagctcaactgagtcaaccaatcagaactaagtttgaattgtttatttgcataaattgactgtactgggaacctcgataggaactttctctataaaagccatatcctctctttgttctctggaactgcacttttgttttacactgaagtctgcacctccctggtttgcaaactgtacacaggaatagcctctttcctccaaattcctttacaaagaatttttcttcacaatatgatgcgagaggtagaagacatgcttacagctgtggattcatatcctgaaatcaccacgattacaataaaacgaaaaatcaaacaaagaaataaaaagtagacaaaaacctcaaactaattttctcttcaatttacaaggctgaacagctaggaggagacttattgattcaggacagttcacctgctcacattttgagccaatggctgaggcccaggactggagatacttcattagtttagccagtggagagtggggtttggatgctctcattggatacttctatcataagtgatgcatactcataggggttaagctttgcattaaaaaagattgtagactgggaaataatataattagacaaatgtgaatgacttagagcagttatttcagtttctaggaagcttaaaaagggttcattgatttatttgactcagctatttctgcactgtgggtttttgttatgtgtttaaatgaattctataacagaggtaatgttgaaaaaagattgtatgaggtctgcttgttccattagtaatgtttgtcccagttcgatccttctgaatttttatttatagcagtaaactgtttccctgtgtgtgcgtgtgtgtgtgtgtgtgtgggtgggtgtgtgtaatgtaatttaattactagtatttcaggtatgagttttgtaaccacatttataaatgagctgctcatatatatacatatacatatatatatatgtatatatatatatatatatatatttagtatgcttccttcaatgggtatcaacatcatattatattttcttgaaataagttttgtcggctgggcgcagtagctcatgcctgtaatcccagctccttgggaggccgaggcaggaggatcgcttgagtccaggagttctacaccagtctggggaaacatgatgaaaccacatctctacaaaaaaaaaatatgaaaactagccgggcgtggtggtgcgcgcttctagtcccagctactcgggaagctgaggcagggaaatcacttgaacccaggaggcagaggttgcagtgagctgagatcgcaccactgcactccagcctgggcgacagagcgagactctgtctcaaaaaaagaaaaagttttctctctttaaacctggaaccatcttactagcaataaatgacctgatcttaaaagtctgacaggaaacagcattggaatttgggatggtaccttcttggtgattgctatttctttaattcttcttaatcgctaaatccttgtttggttcagtttctgggatttatgttttacattcatatatttaataaatgtttctgaatgtattatcataga

SEQ ID NO: 178371 - DNA, 1935 bp, Homo sapiens
  Payload ID: 15108
  Gene Symbol:
  Gene Name: RP11-724O16.1
  ENST ID: ENST00000513963
  CDS Start-End: 75-1709
gttgccttggagccagagagacgcagctaggcctgcacggctgtggagagatcctgccacgggccttgttcaccatgtcggtgctggatgcgctttgggaggatcgggatgtccgtttcgacctgtccgcgcagcaaatgaaaacaagacctggagaagtccttattgattgtttagattccattgaagacaccaaaggaaataatggagatagaggtagactcttggtaacaaatttaagaattctctggcactctttggcattatcaagagtcaatgtttctgtcggttacaattgcatattgaatattacaacaaggactgctaactctaaattacgaggccaaactgaagctctctatatactaacaaaatgtaacagtactcgttttgaatttatatttacaaatttggttcctggaagccctagactttttacttctgtgatggcagtacacagagcttatgaaacttctaaaatgtatcgtgattttaaattaagaagtgcactaattcagaacaagcaactaagactgttgccacaagaacatgtatatgataaaataaatggagtttggaatttatccagtgatcagggcaatttaggaaccttttttattaccaatgtgagaattgtgtggcatgcaaatatgaatgatagttttaatgtcagtataccatatctgcaaattcgttcaataaagattagagattcaaaatttggtttagctcttgtcatagaaagctctcagcagagtggtggatatgttcttggctttaaaatagatcctgtggaaaaactacaagaatcagttaaggaaatcaattcacttcacaaagtctattctgccagtcccatatttggagttgattatgagatggaagaaaagccccagccgctcgaagctctgacagtcgaacaaattcaagatgatgtagaaatagactctgatggtcacacggatgcttttgtggcttattttgctgatggcaataagctcgatagcatagcatctgaatgggttggacttccacctctgccttcagccaggtgtctcttcggtctgggagaggtggatgataaaatctatgtagttgcaggcaaagaccttcaaacagaggcttcgctggattcagtattatgctatgatcctgtggctgcaaaatggaacgaagtaaaaaaactccctatcaaagtctatggccataatgtgatttcacataaagggatgatatattgtctaggaggaaagacagatgacaaaaaatgtacaaacagggtgtttatcttcaaccccaaaaaaggagattggaaagatctggctccaatgaaaattcctcgttccatgtttggagtagcagtccataaaggcaaaattgtgattgcaggaggtgtcactgaagatggtctttcagcttcagttgaagcttttgaccttacaacaaataaatgggatgtaatgaccgaatttccccaagaaagaagctccatcagtttggtcagcctggctggatctctgtatgcaattggtggttttgctatgattcaactggagtctaaagaatttgcacccactgaagtcaatgacatatggaagtatgaagatgataaaaaagaatgggctgggatgttgaaggaaatacgttatgcttcaggagctagttgcctagcaacacgtttaaatctcttcaaactgtctaaactgtgaacaaggtgacaaaacataatagattgggaggtggtttgtttggtgaatggggctttaatttattctgttttttaaaagcttgtacagacactcatgtagaaattattcaagaagttattgtctaagagatgagcagtaggtaagaaaacctcagtcattgactcttcaatgtaatgatcagagtttaaaaccattttctaataataaattaaatcttcagttgaac

SEQ ID NO: 178372 - DNA, 1228 bp, Homo sapiens
  Payload ID: 15109
  Gene Symbol:
  Gene Name: RP11-729L2.2
  ENST ID: ENST00000590722
  CDS Start-End: 105-365
gcacttccgcccgggcgcattgtagccccgcggacagctgggccagggtgcgggcctgcgcctccctcggctcctggcgcgggcctcggggagaggggtggaagatgtctatggatgtgacattcctggggacgggtgcagcatacccatctccaacccggggtgcctctgctgtggtccttcggtgtgaaggcgagtgctggctctttgactgtggggagggaacacagacacagcttatgaaaagccaacttaaagcaggttatcctgaatacatgtctaacaattttccttgcaacgttagctgttgtttttcactgtttccaaaggatcaaaattgcttcagaaattggagacatatttgatttaaaaggaaaaacttgaacaaatggacaatatgtctattacgaatacaccaacaagtaatgatgcctgtctgagcattgtgcatagtttgatgtgccatagacaaggtggagagagtgaaacatttgcaaaaagagcaattgaaagtttggtaaagaagctgaaggagaaaaaagatgaattggattctttaataacagctataactacaaatggagctcatcctagtaaatgtgttaccatacagagaacattggatgggaggcttcaggtggctggtcggaaaggatttcctcatgtgatctatgcccgtctctggaggtggcctgatcttcacaaaaatgaactaaaacatgttaaatattgtcagtatgcgtttgacttaaaatgtgatagtgtctgtgtgaatccatatcactacgaacgagttgtatcacctggaattgatctctcaggattaacactgcagagtaatgaaaacaactggtatttctcacagctccttctagatttggacaaaggaatgatacaagagcaggcaatacatggtccataaatcaaaatactataaaaaggtatacagtgaaaagaagtgctcccacccctgcccccattcccccctacctcagctccatcaagtatgatggtgaaggatgaatatgtgcatgactttgagggacagccatcgttgtccactgaaggacattcaattcaaaccatccagcatccaccaagtaatcgtgcatcgacagagacatacagcaccccagctctgttagccccatctgagtctaatgctaccagcactgccaactttcccaacattcctgtggcttccacaagtcagcctgccagtatactg

SEQ ID NO: 178373 - DNA, 732 bp, Homo sapiens
  Payload ID: 15110
  Gene Symbol:
  Gene Name: RP11-736N17.11
  ENST ID: ENST00000634353
  CDS Start-End: 176-502
gggagagcgcggagccagcggagcgcggaggccccagcgccagcacccgcgcgggcggtgagcgtgagtgtggcgcagggtcgcccctccccagcctggccccggcagtgcgggccccgggagcgccctgacggctagtcctcgtgcagcttagtggcgcagtggcggcagcagcatgagcaccccccggcctgctccaccacagccaggcgctgctgagggggctggaggcccagaagggaaggctgtggcaggtgcctgggagaagggccctcggctgggccagcggctgccctcaatcgtggtggagcccagcgaggcggaccctgtggaaagtggggagctgcgctggcccctggagagtgcccagaggggcccctctcagagccgggctgctgctgccccctcgccgagtctgcccggagaaccagggaaagctgcagataacgctggcagcgagtgtgcctgctccgaggacccagcagccccggcccggggataggacaaggacgtggctgggctctgctgtctgactgctgagggcctctgccccagggtggccgggctgatgcacaggagggccgggcctgcccagcctggaaagcccagaggctgcttcctgtgtcacagggtctggaccgcagccctgccctcttctgcccatggcccaggtctggatcacaccccgctttgttccgtggtttgaagcagaaataaaggcacttcctggtg

SEQ ID NO: 178374 - DNA, 2505 bp, Homo sapiens
  Payload ID: 15111
  Gene Symbol:
  Gene Name: RP11-73M18.2
  ENST ID: ENST00000472726
  CDS Start-End: 2-2200
aatgctgccgtgcgccgcgggagccagggggcgtggggccatggtggtcttgcgggcggggaagaagacctttctcccccctctctgccgcgccttcgcctgccgcggctgtcaactcgctccggagcgcggcgccgagcgcagggatacggcgcccagcggggtctcaagattctgccctccaagaaagtcttgccatgattggataggacccccagataaatattcaaaccttcgacctgttcacttttacatacctgaaaatgaatctccattggaacaaaagcttagaaaattaagacaagaaacacaagaatggaatcaacagttctgggcaaaccagaatttgacttttagtaaggaaaaagaagaatttattcactcaagactaaaaactaaaggcctgggcctgagaactgaatcaggtcagaaagcaacattgaatgcagaagaaatggcggacttctacaaggaatttttaagtaaaaattttcagaagcacatgtattataacagaatgtatgacaacatgtccacaatggtgtacataaaggaagacaagttggagaagcttacacaggatgaaattatttctaagacaaagcaagtaattcaggggctggaagctttgaagaatgagcacaattccattttacaaagtttgctggagacactgaagtgtttgaagaaagatgatgaaagtaatttggtggaggagaaatcaaacatgatccggaagtcactggagatgttggagctcggcctgagtgaggcacaggttatgatggctttgtcaaatcacctgaatgctgtggagtccgagaagcagaaactgcgtgcgcaggttcgtcgtctgtgccaggagaatcagtggctacgggatgaactggccaacacgcagcagaaactgcagaagagtgagcagtctgtggctcaactggaggaggagaagaagcatctggagtttatgaatcagctaaaaaaatatgatgacgacatttccccatccgaggacaaagacactgattctaccaaagagcctctggatgaccttttccccaatgatgaagacgacccagggcaaggaatccagcagcagcacagcagtgcagccgcggctgcccagcagggcggctacgagatccccgcgcggctgcggacgctccacaacctggtgatccagtacgcctcgcaggggcgctacgaggtagctgtgcccctctgcaagcaggccctggaggacctggagaagacttcaggacacgaccacccggacgtggccaccatgctcaacatcctggccttggtgtacagggatcagaataaatacaaagatgcagctaacctactgaatgatgccttggctattcgtgagaaaactttgggcaaagatcatcctgcggtggcggcgactttgaataaccttgcagtcctttatggtaaaagagggaagtacaaagaagcagagccgttgtgtaaaagagctctggaaatccgagaaaaggttttggggaaggatcaccccgatgttgccaagcagttaaataacttggccttactgtgccagaaccagggcaagtatgaagaagtagaatattattatcaaagagccctcgagatctaccagacaaaactgggacctgatgaccccaacgtggctaagacgaaaaataacctggcatcctgctatttgaaacaaggaaagttcaagcaagcagaaacactgtacaaagagattctcactcgtgcacatgaaagggagtttggttctgtagatgatgaaaataaacccatctggatgcatgctgaagaaagagaagaatgcaaaggaaagcaaaaggatgggacatcttttggagagtatggcggctggtacaaagcctgcaaagttgatagtccaactgttacaaccactctaaaaaaccttggggcactttacagacgtcaaggcaaatttgaagctgcagaaacgttagaagaagctgctatgaggtctcgtaaacagggtcttgacaatgttcacaaacagagggtggcagaagtgctcaatgaccctgagaacatggagaagcgcaggagccgtgagagcctcaacgtggacgtggtcaagtacgagagtggccctgacggaggggaggaagtgagtatgagcgtagagtggaacgggatgaggaaaatgaagctcgggctggttaactgacttgctcagcgtcccatggcctagccgcccgtgactctcacactgtctcctgcatgacgggtggcgcctcccgcagcttcccttctctctccagtgctgcccgctgtgtctagcagcctctaggatcttgtcagagctgcacctctctgtgaactggccattcctttcggtgctgctgtcctttttgggggggttcctgatttctgtatacatgtagctttgccagatatgtacttagtaatataaactgtattaataaaatccatttactgtgtaatacacgagtttaaaaattaagagcgatt

SEQ ID NO: 178375 - DNA, 984 bp, Homo sapiens
  Payload ID: 15112
  Gene Symbol:
  Gene Name: RP11-745O10.4
  ENST ID: ENST00000539652
  CDS Start-End: 35-541
gtggaccgggaccggtaggggtgctgttgccatcatggctgaccccgacccccggtaccctcgctcctcgatcgaggacgacttcaactatggcagcagcgtggcctccgccaccgtgcacatccgaatggcctttctgagaaaagtctacagcattctttctctgcaggttctcttaactacagtgacttcaacagtttttttatactttgagtctgtacggacatttgtacatgagagtcctgccttaattttgctgtttgccctcggatctctgggtttgatttttgcgttgattttaaacagacataagtatccccttaacctgtacctactttttggatttacgctgttggaagctctgactgtggcagttgttgttactttctatgatgtatatattattctgcaagctttcatactgactactacagtattttttggtttgactgtgtatactctacaatctaagaaggatttcagcaaatttggagcaggccgctgcaggagcccttcttttctgtggattcatcatctatgacacacactcactgatgcataaactgtcacctgaagagtacgtattagctgccatcagcctctacttggatatcatcaatctattcctgcacctgttacggtttctggaagcagttaataaaaagtaaaacatggctaaaagcttacggagtaagtggaaaagaaagatgcgtgctgaaaagagaaaaaagaatgccccaaaggaggccagcaggcttaaaagtattctcaaactagacggtgatgttttaatgaaagatgttcaagagatagcaactgtggtggtacccaaacccaaacattgccaagagaaaatgcaatgtgaggtaaaagatgaaaaagatgacatgaaaatggagactgatattaagagaaacaaaaagactcttctagaccagcatggacagtacccaatatggatgaaccaaaggcaaagaaaaaggc

SEQ ID NO: 178376 - DNA, 983 bp, Homo sapiens
  Payload ID: 15113
  Gene Symbol:
  Gene Name: RP11-761B3.1
  ENST ID: ENST00000422269
  CDS Start-End: 1-131
agtccgagtggagagagcgagctgagtggttgtgtggtcgcgtctcggaaaccggtagcgcttgcagcatggctgaccaactgactgaagagcagattgcagaaaccagcccaaaagacttcctcttttgaaagagaaggatggtggagaatagcattaacagatactcctatacctggcacttaccacttgaaaacttttattgaagaatccctattaaatccagtgatagcaacctacaattttaaaaacgaaggaaggaaaaagccacctcttgtgcaaagaaacaatccagtcctaaatgatcttccgcagtatatgcctcctgacttcctggacctgttaaagaagcaagtggctacttactcattcaaagacaaaccacggccaagccccagcacactagttgacaaagatcagtcacttcagctttctccggggcaatacaacgtgcttcctgcaccagttcccaaatatgcttccaggagctgtgtatttcgctcaacagttcaaagattcccaacaacctattttattcccatctacccccacccccaccgcacaggtgcctgatgccttaaattccccagcttttcttgtgttctgtggagcaaatcagcttgcttctccttcgcaagtcctctgcaaggatttacgcttctgccttctctacactgccagcatgaaggccctggtccaggtcattataatgtgaaaatgcctccaacaagctctgtcacttcttgttttcaatccagagtccctcgattcttgcccagctgttcagggcatttggggagagaagaagctgggtcacatgccaggaatgcttcagtaactgcatcccaggaattaccaaattagccaaagctcatgcagagccatctccccactactgctggggtgcctgacagggagaggttctggagagcctggagctccctcaccaagaagaaagcatgaggaggggaggggctggggaa

SEQ ID NO: 178377 - DNA, 1807 bp, Homo sapiens
  Payload ID: 15114
  Gene Symbol:
  Gene Name: RP11-762I7.5
  ENST ID: ENST00000546837
  CDS Start-End: 1-1570
tccagccttgcagcgttgcttgactctgctgagagatagcaggccatggcagcggctggtaagaatagttcagtggggctggctggagttgccttgggtcaagcagaatattaataggcaggggaatgcacctgtagctagtgggcgctactgccagcctgaagaggaagtggctcgactcttgaccatggctggggttcctgaggatgagctaaaccctttccatgtactgggggttgaggccacagcatcagatgttgaactgaagaaggcctatagacagctggcagtgatggttcatcctgacaaaaatcatcatccccgggctgaggaggccttcaaggttttgcgagcagcttgggacattgtcagcaatgctgaaaagcgaaaggagtatgagatgaaacgaatggcagagaatgagctgagccggtcagtaaatgagtttctgtccaagctgcaagatgacctcaaggaggcaatgaatactatgatgtgtagccgatgccaaggaaagcataggaggtttgaaatggaccgggaacctaagagtgccagatactgtgctgagtgtaataggctgcatcctgctgaggaaggagacttttgggcagagtcaagcatgttgggcctcaagatcacctactttgcactgatggatggaaaggtgtatgacatcacagagtgggctggatgccagcgtgtaggtatctccccagatacccacagagtcccctatcacatctcatttggttctcggattccaggcaccagagggcggcagagagccaccccagatgcccctcctgctgatcttcaggatttcttgagtcggatctttcaagtacccccagggcagatgcccaatgggaacttctttgcagctcctcagcctgcccctggagccgctgcagcctctaagcccaacagcacagtacccaagggagaagccaaacctaagcggcggaagaaacttgccgaactaaagcaagaatgtcttgctcgtggtttggagaccaagggaataaagcaagatcttatccacagactccaggcatatcttgaagaacatgctgaagaggaggcaaatgaagaagatgtactgggagatgaaacagaggaagaagaaacaaagcccattgagctccctgtcaaagaggaagaaccccctgaaaaaactgttgatgtggcagcagagaagaaagtggtgaaaattacatctgaaataccacagactgagagaatgcagaagagggctgaacgattcaatgtacctgtgagcttggagagtaagaaagctgctcgggcagctaggtttgggatttcttcagttccaacaaaaggtctgtcatctgataacaaacctatggttaacttggataagctgaaggaaagagctcaaagatttggtttgaatgtctcttcaatctccagaaagtctgaagatgatgagaaactgaaaaagaggaaggagcgatttgggattgtcacaagttcagctggaactggaaccacagaggatacagaggcaaagaagaggaaaagagcagagcgctttgggattgcctgatgaaaagttcctgatactttctgttctccagtgttttccatttctctccttcttcttggtcacatatatgcctaaatgcacagtcatgtgcctacgtcctgcctcgcaatgagggagcatgtaccccaggtacatccatgaactgcggcagcagtttgacttattgctgtttcagctttaaggttgttgtgtttttgtttttgattatgttgcttgttaataaaaaaaaatagaaaa

SEQ ID NO: 178378 - DNA, 805 bp, Homo sapiens
  Payload ID: 15114
  Gene Symbol:
  Gene Name: RP11-762I7.5
  ENST ID: ENST00000550124
  CDS Start-End: 1-336
gaaggagacttttgggcagagtcaagcatgttgggcctcaagatcacctactttgcactgatggatggaaaggtgtatgacatcacagagtgggctggatgccagcgtgtaggtatctccccagatacccacagagtcccctatcacatctcatttggttctcggattccaggcaccagagggcggcagagagccaccccagatgcccctcctgctgatcttcaggatttcttgagtcggatctttcaatctttgcagctcctacctgccagctcagatccccgtccggctatgggcgcggcgccggctaccacacctgaagtctccaggaagtaacgcctctccttctgcccctttcctattggaggaacagaatcagcgctgccaccacccattggttggtggtctgtaatgcagaagcacagttggttgccatttctgtcgttcgcaagatacagtgcccgcccctctcccagttccaccttttgaaagaggtggggcaagctgcctagagaagtgagagcgacgtcagctattgaccaatgggaagagctgatggtatggcgtgggagcaagagtgacaacgattggtcagccttgcatctctacgcctaaggcgggagctcctggaggcggaggccgcgggtgggggcctagtggagtgaggggtaacaagatggcgaccgagacggtggagctccataagctaaagagcacttcttaaccttttggaggtcacagatatctttgaaactctgatgaaagcttgccgaactaaagcaagaatgtcttgctcgtggtttgg

SEQ ID NO: 178379 - DNA, 646 bp, Homo sapiens
  Payload ID: 15114
  Gene Symbol:
  Gene Name: RP11-762I7.5
  ENST ID: ENST00000546813
  CDS Start-End: 1-518
ggctgcatcctgctgaggaaggagacttttgggcagagtcaagcatgttgggcctcaagatcacctactttgcactgatggatggaaaggtgtatgacatcacagagtgggctggatgccagcgtgtaggtatctccccagatacccacagagtcccctatcacatctcatttggttctcggattccaggcaccagagggcggcagagagccaccccagatgcccctcctgctgatcttcaggatttcttgagtcggatctttcaagtacccccagggcagatgcccaatgggaacttctttgcagctcctcagcctgcccctggagccgctgcagcctctaagcccaacagcacagtacccaagggagaagccaaacctaagcggcggaagaaatcctctgtttcagtgccttccccatgcccatggagctgtcccaaaacccatccctcagtatttgttgatgccaaagacacgaaccccatggaactggggcaacttcggcagcagtacacttagcaatgaggctgtgttgatgaggaagtgcgcagcatcatacttggtatagaagctggccaggagatagctggggagagaaaaaaataggcttgccgaactaaagcaagaatgtcttgctcgtggtttgg

SEQ ID NO: 178380 - DNA, 782 bp, Homo sapiens
  Payload ID: 15114
  Gene Symbol:
  Gene Name: RP11-762I7.5
  ENST ID: ENST00000548593
  CDS Start-End: 1-366
gctgagtgtaataggctgcatcctgctgaggaaggagacttttgggcagagtcaagcatgttgggcctcaagatcacctactttgcactgatggatggaaaggtgtatgacatcacagagtgggctggatgccagcgtgtaggtatctccccagatacccacagagtcccctatcacatctcatttggttctcggattccaggcaccagagggcggcagagagccaccccagatgcccctcctgctgatcttcaggatttcttgagtcggatctttcaatctttgcagctcctacctgccagctcagatccccgtccggctatgggcgcggcgccggctaccacacctgaagtctccaggaagtaacgcctctccttctgcccctttcctattggaggaacagaatcagcgctgccaccacccattggttggtggtctgtaatgcagaagcacagttggttgccatttctgtcgttcgcaagatacagtgcccgcccctctcccagttccaccttttgaaagaggtggggcaagctgcctagagaagtgagagcgacgtcagctattgaccaatgggaagagctgatggtatggcgtgggagcaagagtgacaacgattggtcagccttgcatctctacgcctaaggcgggagctcctggaggcggaggccgcgggtgggggcctagtggagtgaggggtaacaagatggcgaccgagacggtggagctccataagctaaagcttgccgaactaaagcaagaatgtcttgctcgtggtttgg

SEQ ID NO: 178381 - DNA, 10086 bp, Homo sapiens
  Payload ID: 15115
  Gene Symbol:
  Gene Name: RP11-766F14.2
  ENST ID: ENST00000511828
  CDS Start-End: 1-5382
atgctttcctttcatttctggaagtcccggggtcaacctacagatgctgcttcttccgtggccgatggcattcagactcctcgctgctgccgacggtgccaggcaaacaactggacaggacagctcagctacagaacactggccacagtctcggccggagcagcagccccccagccacagaccacctccaccgcctcatccaggagccttcccacctccctcaggcttgctgcggccccgccacaggggctgaagaactgggaggtggtggcagcagtggcagcagtgcctacagccttggggccagtccagatacgtgggaccctgcttcgggcaactctgcagcccctccggggccagagacggacccaagacttccccagcgatcaccattgtctcttcctgtcgctgaaacctgggcaagggctcataatggaagctgcccctcctgagctgaattcgaaagcaagacaggcggaggtgggggacggggtgagcagtgctcaagacagccaggagctcaagcagcagctgtggccacttcccaagccttcagcctcctcccagcgagaagcgaaatatgtggacatgtgtgcttcagctgaagtccagagggagagtccccagaccatgaaacttaccctggggcactgccctgggggtcagagggcctctaggagcccaaaggagaaagcccaagatgaacccagcagcaagactccaagcccccagaacaatcctgcctcctcccaactctctagatcccagcactctgcctctgaagagggtggcaatttctcatcttcctcatcctcctccccgatgaacaaagcagaagaggatggcctttccaaaatggaggactccaccacatccacaggggctctggccacctcctcttcatccttaggcttcgagagtgagagtggtgaaagtgaaggttgccaggccgtgggaggagaaggagagaaaatatcaggaggagggggaggaggaaaaggaggagggggaggaggggcaggagatggaacagagtgcagggacattattgccaagtcccagggcagcagggacccccccaaagtcgaagaggctcactacatcaccacccatgagatccagctgagtgaggtggaacaggacatggatttcgacgtgggactggcctcccgctgggatttcgaggacaacaacgtgatctactcgttcgtggattatgcttcctttggtggcagcgacgagaccccaggggacatcaccagtctgaccgaagaggacgacgacaacagctgctacctcagcaccactcccagcaccaacaccacccggacgcccagccctacaagcagcgacctggcccgccccaatgcaggccgcagtggccgcgacaccagcagcaccgaagtgggcagtggcccctctgacagtggccccactcccccacccactgggcctggcactgcccccctgactgagcccttgcctgagaccccggaggcagcttcaggggcagcagccgccgccgcaagcagctgtgggagtgcagcaagccagatcctcctatcaatcaaaccggcttcccgggctataaatgagcctagcaacgtgcgtgcaaagcaaaacattatttatgctgccaagcatgaaggcgacatgagcctccgcgtctctacagctgctgaacacaattcaagttcgctgaagcaaaacccggctgcagcagtggctcaggaccatgcaaagaaattcattgctgtacctgctcgcctgcaaaccaggtgcggggccatccgggcgaaggagctggtggactactccagcggagcctccagtgccgtgagcgaactggacgatgcggacaaagaggtgcgtaacctgacctcccgggccttccggagcctggcttacccctactttgaggctctgaacatcagctcccgggagtcctccaccacgctctccgaagtgggctttgggcgctggtcaactttcctggacttaaaatgtgggggtgttggggccagggtggagcagagcctcctcaggagcagcgcggcctctgtggctgcaggtctgaggaagggcagtggggcccgggccactgccgaccagctctacatccagtccaagaagtctcagaccaaggccttggagttcgtggtcagcaaagtcgagggggaaatcaaacatgtggagacgcccctgtgtttccagaagcaggtccagacgggctcccgcgtcgtcacccttttggagcccctgaatgtacgcagtgagagcaaagccagctcggcccctgggcccggcagggccaccaaaggccccggcaagggtcccgggtcggcatacacggacgacggctccgagacctccgagggcagcaagcccacctcccgcgccgatggcccccagaagtccaagttcgcctccagtctgctcaaaaatgtcatttccaagaagatgcagcgggaacacgagttcaaaatggagaggggagaagtcatggatacatcccaccacctctcaggcacctccaaggagacggagggcgcccgcgggagcgagaggcagcgagagaggggcctgcagaggcagagctctcgtcactccgaggccggctccgagtacacagtggtcagcatgtccgacgcgggcggggaggggtccgtggcgggctccaaatctccagtcttcaaagccagtactcctcgcgagcgcaacgcaggccctggccggaatttcaccgatggacacacagaagtgtgtgaaattaaaaagagtgcctcagagaccgtcaagggcatcttcctccgtagtcagaacagtgcgttccggtcatggaaggagaaagaggccgagaagagggaggaacaagcccctatagggaagctgaagctgcccaaaggaggcgactggcgggctgatctcggggagatttctgccagcaagaacaccatcatgtctcgcctctttgtccccaacatccagcagacacccaaggacaagcagccgaggaagcaggccaccaagtaccctgctgctcaggccacctccacagcggtgatcagacccaaggctcccgaaatcaagatccggctggggagtgtgcagcagccgagctcagacttcaacattgccaagttgctcacgcccaagctggccggtggcagcgcctctaacctgttcaagaccatcgaggacaacagcagggcacagcagaaactcttccgcggggacaacctagaaaaagtgccccatttccaggtgagagacatcagagacaagtccaaggctcaaggccccctccaccaggtgagagatgtcaggaaactaattaaagggtcaggggatagtagtgacaagggcagtgttaccccagagcaggggctgactggacccaaacccaggcagctgtctgcagcagctggcggatctggatccctgtcccccatggtgattacatgccaggctgtagtgaaccagagggaagacagcatggaccgagagcccagggaaagcatgggcaaagggggcggcagcagagtcttgaattcttcctccccagaagggacagtcttggttcacagggcatctggcaggctgcctgtggctaccattgcccccaataagcccgagcagggctcatacctgcctgtgctcaagattgtctccaaggcttccacccagaagaccccagagaagctcaaggaggaggaggtcaaggaggaagggaaagccacgaagccagcccggaatgccctggagaagctgactgcagccgtgaggtccatggaagagctgtacagcttcaacaggaacgagtggaagcgcaaaagcgaccccttgcctatgatgatggacagccacgtgctgtcgctcattgccagtgaggagagggaaggggtagtggttgctgatggagaccacgacaagctgtccaaacggctgggtgaggtggaagagcggggcacaggaaacaaagctggtgtggtcctgcgaggggcccccatagaacgtctgcagcggagaaactccaaccccagcgctgagagtgtgtctgccagggcagcggcctttgagaacctggccagggaaagaccccgatctctctatattcccccagtccacaaggatgtagagagaacccaacccctgcagcccctcccaccactccccagcaaccggaacgtgttcacagtgagtgccagcagcatccagaaaactgggggtgtcgctggcaagttcccacaagggccttctccggagagtccttcagcagctaagggcatcaagtcgcagggactccggtccctcaagatctctccagccacccgggcacctcctgatgaggtgaccaacaggaaaagtggcagcaatttggagaagagcaacagtgactgtgagaattacctgaccatccctcttaaaggaagctctgctgcaggggagcttcttagcaggcctggggcttccagggaggggccccccaactcctcagctgccactctctgtagtttacccccgctgagtgcccgcagtcaggtccccagtagctccaaaggctctcaggttagtggaaccagccgaccagcttggcgtaccaaacctgacaacccccgggagacagtagctgcccccccagggccacagagccccgagcatccccccaccaccatctaccaccagccgccgctgcccttcaccctacagggggcccagcctcaggtcctctgcttctccccacccagcatgcctgccccagcacctgcagcctcagctcccgtccccacagaccccttccagcaggcacagcctcaacagacccagcgtaagatgctcctggatgtgacaacaggccagtactatctggtggacacaccagtacagcccatgacccggagactgtttgaccctgagacagggcagtatgtggatgtgcccatgacctcccagcagcaggctgtggctcccatgtccatctctgtgcctcccttggccctgagtcctggggcttatggacccacctacatgatttaccctgggtttctgcctaccgtgctgcccaccaatgctctgcagcccacaccaattgctcgcgctccaagaggaagtgagctctccccaatggtggcagaaccttccagcaaagaggcagctgcaacgttcaccgaggccccatacttcatggcttctggtcagtctccggcctcctcaacctcctcagccccagcagccacatcccagctcctaggggccaaggcctttgcccagctgcatggcaagcctgtcatcagcattacttcgcagcccctggggccacggatcattgctcccccttcctttgatggcaccaccatgagctttgtggtagaacacagatgatgagcagccaccaggaagcggaatgaaaaactgctggagcaagacaaaaagatggactattcttctttaatctggaatttgcattgtaatagcactaagaattatttcatctgaaaaacttcttccacatgtgttattcttaatttttgcttcttataagctaagtgtgtaagtttctatatttttctgaacaatcctcttaaggcagtttttattttaattttattaagttgattgaatggttgcattttttccctttatgactatttctttttatacttcaacacaggatataagctttctattcacctccttcccccctgtacttgtgactagacaaacaattcctttgttcccattgttcagtcaaaacataccacagaatgggattgattctgttgtaaaccaagctagtaaatgagtaatttggatcacgaatctccttatagtttcttggaatatatcaagactagctggctgagttgtaatacgtatttaagttttcactatgatggtctgctctttgaatcatatatcagccaaacctacccattctcttggttatgctctatatgttcttttattaggtttggcatgatttcaaatgtgattgtgaaaaatggtggttgtaatgtttgtgctttattttatttttcccatttgtacaatgccacgacactatttgttgccttaaaatagaatggcttgaaatactggaaagccaatgattgcatctaaaattaagtacttagtctcagaaaggtataaaatatctattttcctttaagaatccaattatttttgtgggtgcataacatttttcttttcttcaataattccctccatagttgcatactcgtgtctctcatggattgtttagagtctaaagagtgacccatttggggcagtagagtagaatatggcactaattcagtggctctgattcactccagccctagcctcgctatcccaataacagtaacctagagttacagcacttgctccttatgaggatgaggcaggtttgaagagatgtcaagaatccaaatcacagaatcttttattgacatttagtactgtctcagttgtaacccaattctgaaggctatttgagtgagtgttcacagggagtcttgaagactggaagacttgattgaacagataaatatttagcttgtcataataagtgtatcgatatatacttggcaaatgttacattgaaatattacttaattactttttaaaggaataatttgaaggttttcccaggatttttttttaagaatctccttttatttaccaatttgtttaaagataaagcattctggtaattttttaaacaccctaatattattttaaacctcagcaatatttgatttctgcttaaattttcttcataagccacagaattttatgctactcatgacaaaaagtgtgagtaaaaaactaggagactgagttttgtatgatttatataatctttttactttgtagttatgcttcccatctcagactcttaaaaaagacttaatttcactttcagggccttcctttaagggatcttactctgaaaaaaagttctcttgggtatagggaaaggtttgaggcgggaatagtcagctctgatcacgattcaattgcttgttgtgctgatgagctatgaaatgaagctatagactttatgagacatgaaatatgaaacatagtctctgtgtataaaaaagatgcccttgtgccaaattcaagaaaaagatatttctttatcatagaggtcttcttacccaggcacatcaatcaattccccccagaacttaaagtaagttttatccactggggaacaaatcttatggcatcagagcttcctcgttttcaggagagattggctgggtataaggtaacttaatattgacccaagaaagtagaatccctttcagaaatcttacacttattttactgaaagcagcaccaagaaacctccagtatttgaatacacctggtgaaacctatataggatttgggtggatagtaccaaaattgttaagactggtttaaagccaaatgcgactttcaggaaaaaccagtggccatgttgagtagtgactgctcaccaactcttccaaaagagagacaactccttctctagaaaatgtggtagagttgagggcttgggacccctaatctatgtatcagtgtttctcaccagcagatttgagttttaaattctcacactgaggtaaattaggacacaaactaaggaaagaaagaaaaagcttttcatttgtttgttctatacaagaggcttcaccttttaggaagttgccaaggacacagtgatgtccaagtggctaaaaacgcaacttttaaataatgttctattaatatcatgtcatctatcgataattttatggttctctatttcaccaaatcatacaaagctgctaggccattcactacctccagtgatagggaaaaaatattttcacgggcatgaggtaaatctcaatcttgatttttattgttttgtcatttcttgaggttgcatgaatatttgaatgaagtgatatacccttccttttatagctcaaggggaatcaaacaagagcctatgaagccttctgacccataaaactattaccctaataatgtccctttagttactgaacttcccttttattttttattactataaaaccattagtaaaacatttcctaaatagtgccttgaacttgaatctaatcagaattgcagagtctggcttttataatatcctcttagggttatatgtgtggcttagttttccagaagatccactttttacttgttgataaaatggtcatatttgaaatatgtcccatttcaatcatttctggaaaactgaacacatgtgtaaccgtataaaaatttaattcgccagaatgtatgtttttaaaaagtactcaatgaagttgccctcaggattaagtgaaggcccagatatgtaggtaatgacatagcagagaggctctctatatgtccatttatcagggagtaaataagctaaagcaaatcacactttatatctttataacaaatctcaactattgacatgcatttctaatacatccttatgtcactggaaatatctggtgatataaattcctttttcttattttcaaatttgacattatcatccttgcctcttaaaaagatagattttaattgttttcatacttcatagaaatcaaagtctgtgtttgctacaaattgaatgctcacgttacctgaaataatactttggactgcaggacaggacagtattgattcctaagtagattgactataatctcatgataagtatgtatatgtgcatgggaaaacaacattcaataatagtctttgtgtttaaaactatcatggtatacattttcttatgtggtgcttgaggagtttcattctacagtttacaaggtgtaggtttgcaccccaaattctcagggtatgctatttcacccaaatacttgaaagaaaaaggtgccctgtattttatcagtactgttgagggggaaattttttgtgtaagtttgtttgataaaactgcttataaaaatcaaattcacaaaatatgttaggctttcacataatttctaaggagatatatgtagaaataagatatatattatcaagagactgcttatatattcttaactagcttctgggtcctaagtagacctcacaggtgcataaaatcattaataaagcatgtagcacttgctaattggtgccttaagcttgaatctaatcagaattgcagactcgggtcctctgggaaaaaaacatgtccgtctgtggcacgtgtgagtactaggcccaggggaagagtctgaaaattgaattcttttgtgtgtcctgtgtctcagaagagaactgaatgttcagagcagcgtttgtaagctattaacattcagtatttcgtgttgcaactagaacacattattagatttattcctgtttaattcataatggtgcagaataaaacacacacatctgatttgatttctttttctttttttaagtttcataattgctttttatggctagtgttaatggcaaaaagtcctttccagggctccctgaataatctaccatacctgtatccatagcaggtgatgcttttttttatccccactttgaagacgtgtgtttctgtatttacacataaatcatactattgtatattaaagacagcagtggttgaaaagaatgtgaacactgtagaagttatgttggaaaaaaggagagtaaattgtgtgattaatggggaaggatattggataatgttataccccggactatgaaaaaagctggtggtaaatgggaagaatgtgaaattttaaactgctctcaacgtaggaatcttggtggaaaagttcctacctgaggtctgatatgattcaattatagaatgcaatgagcttggccaaggggactttgaatccagccaaggaaactttgaatctcgacagctctgagaatcacattttcagtgcattgaatatggagtaaactatttagacaaggattctgtgagactaggctacttacctttaattgccagcatttgtaaatgattgtgcaatcttgtgtaatggtcttttattttgactgttttggaaaaaaaatgttttattgtttttttttcccagtaaaaattacttcaaagaaaa

SEQ ID NO: 178382 - DNA, 530 bp, Homo sapiens
  Payload ID: 15116
  Gene Symbol:
  Gene Name: RP11-77K12.1
  ENST ID: ENST00000567194
  CDS Start-End: 107-530
ggaccccggctggaggtgacgctgaggcggcgagggtgagtcggcgccggccgctaccgcacttcgggcgctcgtccctcatttctctgtggtgaatggcgacgggatggagcgcgaggggagcggcggcagcggcgggtcggccgggctcctgcagcagatcctgagcctgaaggttgtgccgcgggtgggcaacgggaccctgtgccccaactctacttccctctgctccttcccagagatgtggtatggtgtattcctgtgggcactggtgtcttctctcttctttcatgtccctgctggattactggccctcttcaccctcagacatcacaaatatggtggagagtatagtgaagatgatgtaaatgaattagtgaaggaagatgaagtggatggtgaagagcagacacagaaaacccaagggaaaaaaagaaaggcccagagcattccagccaggaagagaagacaaggtggcctctcattagaagaagaggaagaggaggatgccaattcagaatctgagggaa

SEQ ID NO: 178383 - DNA, 254 bp, Homo sapiens
  Payload ID: 15116
  Gene Symbol:
  Gene Name: RP11-77K12.1
  ENST ID: ENST00000566594
  CDS Start-End: 1-254
cagcagatcctgagcctgaaggttgtgccgcgggtgggcaacgggaccctgtgccccaactctacttccctctgctccttcccaggtggagagtatagtgaagatgatgtaaatgaattagtgaaggaagatgaagtggatggtgaagagcagacacagaaaacccaagggaaaaaaagaaaggcccagagcattccagccaggaagagaagacaaggtggcctctcattagaagaagaggaagaggaggatgc

SEQ ID NO: 178384 - DNA, 2125 bp, Homo sapiens
  Payload ID: 15117
  Gene Symbol:
  Gene Name: RP11-77K12.7
  ENST ID: ENST00000460606
  CDS Start-End: 1-173
agttatacgtgaacggagacctgaggctgcagcagaagcagccgctgagctgtggtggcctagatgcccgatacaacatatccgtgatcaacgggaccagcccctttgcctatgactacgacctcacccatattgttgctgcctaccaggagaggaacgaaagctcccagtgaggaactggtcttctggagactctgtgtggcatagagtgattcaaccaccttaagaagacctctggctttcctggaacacagatgtcgagacatctcccatggatttgtgatcagcgttgcagctctcccagcagccctggacggtggcccccagccgcccgcatgtggctgccacggttctccagcaagacagtgacagtgctcctcctggcacagaccacctgcctcctgctcttcatcatctcccggccagggccctcatccccagccggcggcgaggatcgtgtgcacgtgctggtgctgtcctcgtggcgctcgggctcatccttcttgggccagctcttcagccagcaccccgacgtcttctacctgatggagcccgcgtggcatgtgtggaccaccctgtcgcagggcagcgcggcaacgctgcacatggccgtgcgcgacctgatgcgctctatctttttgtgcgacatggacgtgtttgatgcctacatgccacagagccgaaacctgtccgcctttttcaactgggcaacgagccgcgcgctgtgctcgccgcccgcctgcagcgcctttccccgaggcaccatcagcaagcaggacgtatgcaagacactgtgcacgcggcagccattcagcctggcccgggaggcctgccgctcctacagccacgtggtgctcaaggaggtgcgcttcttcaacctgcaggtgctctacccgctgctcagcgaccccgcgctcaacctgcgcatcgtgcacctggtgcgcgacccgcgggccgtgctgcgctcccgggaggcggcgggcccgatactggcacgcgacaacggcatcgtgctgggcaccaacggcaagtgggtggaggccgaccctcacctgcgcctgattcgcgaggtgtgccgcagccacgtgcgcatcgccgaggccgccacactcaagccgccacccttcctgcgcggccgctaccgcctggtgcgcttcgaggacctggcgcgggagccgctggcagagatccgcgcactctacgccttcaccggcctgaccctcacgccacagctcgaggcctggatccacaacatcacccacgggtcggggatcggcaagccaatcgaggccttccatacttcgtctaggaatgcgcgcaacgtctcccaggcctggcgccacgcgttgcccttcactaagatcctgcgcgtgcaggaggtgtgcgccggcgcgctgcagctgctgggctaccggcctgtgtactctgcggaccagcagcgtgacctcaccctggatctggtgctgccacgaggcccagaccacttcagctgggcatcgcctgactgagaactctgggccttagagcaggccccgaactgtggtcgccaggcccaggaggcgactgcatggtggagagggagctggggcgcatggggaagcaggtccctactatcaaccgggagtttggggtcctcccctgaagtaggcaaggactgcacgtttctttctctcctgattctcggttttcctttgagtcttctggagctgccttctcatcaggtgcactcttcatggaaagcaactcttgcccctacctcttctgggcgcagggagtaagttactgctaaattaaattaaatgtgtgccaggccgggtgcggtggctcatgcctgtaatcccagcattttgagaggctgaggcgggtggatcacctgaggtcaggagttcgaaaccagcctggccaacatagtgaaaccccctctctactaaaaatgcaaaaattagtccggcgtggtggcacactcctgtaatcccagctacttaggaggctgaggtgggagaatcacttggactccagaggtggaggttgcagtaagctgagatcatgccactgcaccctagcttgggtggcagagcaagactctatcaaaaaaataagtaataaatttgttcaaaagtcctgc

SEQ ID NO: 178385 - DNA, 1609 bp, Homo sapiens
  Payload ID: 15118
  Gene Symbol:
  Gene Name: RP11-793H13.10
  ENST ID: ENST00000591834
  CDS Start-End: 51-1442
agaggcttgaagtgtggggagaacttggtctcctctctgctatatgaaatatgggagacgacagaccgtttgtgtgcaatgccccgggctgtggacagagatttacaaacgaggaccacctggcagttcataaacacaagcatgagatgacattgaaatttggcccagcccgaactgactcagtcatcattgcagatcaaacgcctactccaactagattcctgaagaactgtgaggaggtgggactcttcaatgaactagctagctcctttgaacatgaattcaagaaagctgcagatgaggatgagaaaaaggctgctgctgggccccttgacatgtctctgccttccacaccagacatcaaaatcaaagaagaagagccagtggaggtagactcatccccacctgatagccctgcctctagtccctgttccccaccactgaaggagaaggaggttaccccaaagcctgttctgatctctacccccacacccaccattgtacgtcctggctccctgcctctccacttgggctatgatccacttcatccaacccttccctccccaacctctgtcatcacacaggctccaccatccaacaggcaaatggggtctcccactggctccctccctcttgtcatgcatcttgctaatggacagaccatgcctgtgttgccagggcctccagtacagatgccgtctgttatatcgctggccagacctgtgtccatggtgcccaacattcctggtatccctggcccaccagttaacagtagtggctccatttctccctctggccaccctataccatcagaagccaagatgagactgaaagccaccctaactcaccaagtctcctcaatcaatggtggttgtggaatggtggtgggtactgccagcaccatggtgacagcccgcccagagcagagccagattctcatccagcaccctgatgccccatcccctgcccagccacaggtctcaccagctcagcccacccctagtactggggggcgacggcggcgcacagtagatgaagatccagatgagcgacggcagcgctttctggagcgcaaccgggctgcagcctcccgctgccgccaaaagcgaaagctgtgggtgtcctccctagagaagaaggccgaagaactcacttctcagaacattcagctgagtaatgaagtcacattactacgcaatgaggtggcccagttgaaacagctactgttagctcataaagactgcccagtcactgcactacagaaaaagactcaaggctatttaggaggaagacagcgaacccctcccaccacaggatgcccagacctctgggtcactgttgcactacctgctccaggcaatggagagacctggccggagccaagccttcctgtttcagccccagaggtttggcagaaatacccagggatcctggaggaatgaatggctgagtccccgggctggagaggggctgaattcccagttctggagcctggctgcccctcaacgctttgggaagaagtgacatgtcatcccttgatatgtctgcatgcaaggtccacacccaaaagtgtcaatgtttgccccccaaataaaattgtctggcttct

SEQ ID NO: 178386 - DNA, 1032 bp, Homo sapiens
  Payload ID: 15119
  Gene Symbol:
  Gene Name: RP11-795F19.5
  ENST ID: ENST00000562771
  CDS Start-End: 112-285
cctcccgctctgcgccgtcgccccgcccacacgccgccaccctcgcgtcagttgtcgctccgcgcctgcgcccgttgtctccctgctcgctccgggtcccggcgccgcgccatgtgggctgcggcgggcgggctgtggcgctcccgcgcgggtctccgggccctgttccgtagccgcgatgctgcgctatttccaggctgcgagcggggacttcactgctctgctgtctcctgcaagaactggctcaagaaatttgcctcgaaaaccaagtggatgaagacctgatcattgaagttcaccagttatttttctcaagaatgtgaataacaatgggatttgcactcattatatttttagaatggcttcgcataattttcatgcatcctgtggacgatgaacacaaatgcagctgtggccgtgcctggcctgtgtgtgttgaacgcgttcctgccgtgcgggagccacctacccagcggagcctcagagtctgagttctcaatgagtcaacattttgggtgtgtatgccaagaggtgacacgaaacagaagttgggatcactgtggttaacctgagcatgttggagaccaaggagaggctgatgttaatgttggatttttgtgaaaatgattcctttcaaagaaagacctgtgacagttgagcgtgtgctgcatctgagatgctggctggggagcccaggcagtcgacgggagaggagcgctcactgtcttactggaaacaagctgtttggagaacaacctgtttttactctccttttgcaagcaaaacactcccactgagcaatagcgtttatggcagcatttagcggacacagaagcacatctgaaagtggagagagacgcgtttccccattgctggccgagtcccaccactttgctcagctatgaacacctgacatctcgtttcattttcatgcaaaatctggagataattattatccacaattctaaggccttaggcccctccgcatgagcctgccattaccacttcattcccttgcacctgaaagactcc

SEQ ID NO: 178387 - DNA, 852 bp, Homo sapiens
  Payload ID: 15119
  Gene Symbol:
  Gene Name: RP11-795F19.5
  ENST ID: ENST00000591514
  CDS Start-End: 1-174
aaggaagaccatgcgcgcctgagggccctgaacggcctcctctataaggcactgacagacctgctgtgtacccctgaagtgagtcaggagctgtatgaccttaacgtggagctctccaaggtggatgaagacctgatcattgaagttcaccagttatttttctcaagaatgtgaataacaatgggatttgcactcattatatttttagaatggcttcgcataattttcatgcatcctgtggacgatgaacacaaatgcagctgtggccgtgcctggcctgtgtgtgttgaacgcgttcctgccgtgcgggagccacctacccagcggagcctcagagtctgagttctcaatgtgagcctcattttattttattttaaaatgcagttgtaaactttccccttaaacaattcagaaagcagcagtcttatgtggtcttttagaaaacaaactcaaatggaagagtgtccttgtatattaatgaacaaaatttacttctgaatgtgagtttgtttttggtgcttggaaccagcacttcatggaagagaacagcaaaaagtgagcagcagagagatggtggtccaaggagttaaaagttattttaatcacagcgggcaacttgggaagagtttcatggtgtcagaagtctatatgacaggaagggaagagagtacctcaaaggaggaaggaaggagagaagatgtggtaggtgaagttgtaatgtgatttaatgatggctgagaacttgtacaaaacccagaaaatgaagataaattagatatgaaggaagaaaaaggtcaaagatgagattgtaaaactgtgatacagactggctgaaattggagtttgggtctt

SEQ ID NO: 178388 - DNA, 2218 bp, Homo sapiens
  Payload ID: 15119
  Gene Symbol:
  Gene Name: RP11-795F19.5
  ENST ID: ENST00000569722
  CDS Start-End: 151-324
atcgccccgcccacacgccgcctgccaggcgtgagtcttcctcccgctctgcgccgtcgccccgcccacacgccgccaccctcgcgtcagttgtcgctccgcgcctgcgcccgttgtctccctgctcgctccgggtcccggcgccgcgccatgtgggctgcggcgggcgggctgtggcgctcccgcgcgggtctccgggccctgttccgtagccgcgatgctgcgctatttccaggctgcgagcggggacttcactgctctgctgtctcctgcaagaactggctcaagaaatttgcctcgaaaaccaagtggatgaagacctgatcattgaagttcaccagttatttttctcaagaatgtgaataacaatgggatttgcactcattatatttttagaatggcttcgcataattttcacaatagcgtttatggcagcatttagcggacacagaagcacatctgaaagtggagagagacgcgtttccccattgctggccgagtcccaccactttgctcagctatgaacacctgacatctcgtttcattttcatgcaaaatctggagataattattatccacaattctaaggccttaggcccctccgcatgagcctgccattaccacttcattcccttgcacctgaaagactccagagccccttgaaagaacaggtcctccaagaggagcatcgccagccagcccctgaatctcctgaggaaactctcatgcacatatcttgacctgagcacagaccggacgccagcggagggcaggagcaagcaggacacactgtggctgaggaggggaccctgggcttgtgggcctcggagaggcagagcaggggaggcagatgagactgcacacagctttttgtttgacatatcctaagccccctgcacacgccactcaaggtcttctctgtgccccatctggtgcaggaggcctgtctgtctgtgaaattgcttttagcaatagctgtggatcaccactgagagggtgaatatacaaatgaacaatgggcagaccgtctatgatggcaaaacttggacctccaaccttgaggccaaagcacatcatgtgcggcctctggcgggactcaggtctgggaagcgactgcagcttccctattttctagctctgcttccaactaagaaagtcagatattctccccaaaccaaccccataggatgcccgctgccaggtggcccacccccagcttccccctgacaacagcctccacccagggcatacccaaccagagccttcccatcttctaatgggaagcttcccctccccaccccaccttcaaggctctgccacgcgcagggacagtgtagccttcttggctacagcttcgagtgagcagcctctgccatcctcgctgatgtccccggttaccgtgaaggctcctccaggacactgtctgcactgcctgtcgtccagaccccacctctgcccaggcaccctggccttaatgctgcagcccacagggcacccagctggtgactgaggcctgttctgagcccctcgctggcacattcctggacttctcagtttggtgccagggcctcattcctgcttcccatttgctctgttacaggggaattagtcccttcctttactcttttgtgctgtgctttctaaacgtggtgtttgtcataataagaagcatgaggggcacatggatcagcctcacagacaggtgagtctgtagctcttaccagacccttgttcacatccatgaacttggctgtggatcaccagggaaactgggtgaggttctgccatccaggggttttgtcctgagaacttggcttttagaacattctctctggttttttgcttgggggtgggggtctggtgcagggtgctgggtctgtgtttggaggaggccagcccgtaggctgggggcctgagacactgtgcactggcgtgatgcgtctgccgcccatcaccagcttgcaggggcatccacggctgaatcctctgctcttccaggaaagacttatgcttctcatggtcctagttctcatgctgatctttctacttggcaaaattcaccaagggtgacttgggtttttggtggcaactctgggaacatttggcttgaaaaattgttcatttaagagattctttagagaagaaaatgagtaagattccctaggcctaaatgcagaggcctccaaatgaatttctgaataaaaaagtatttcgctaa

SEQ ID NO: 178389 - DNA, 930 bp, Homo sapiens
  Payload ID: 15120
  Gene Symbol:
  Gene Name: RP1-179P9.3
  ENST ID: ENST00000467125
  CDS Start-End: 1-930
aaccaattagaagctgaaatacatttgcatcgtcacaaaactgtgatccgagcctgcagaggacgtaatgacttgaaacgaccaatgcaagcaccaccaggccatgatcaagattccctaaagaaaagccaaggtgttggtccaattagaaaagttctcctccttaaggaagatcatgaaggccttggcatttcaattacaggtgggaaagaacatggtgttccaatcctcatctctgagatccatccggggcaacctgctgatagatgcggagggctgcacgttggggatgctattttggcagtcaacggagttaacctaagggacacaaagcataaagaagctgtaactattctttctcagcagagaggagagattgaatttgaagtagtttatgtggctcctgaagtggattctgatgatgaaaacgtagagtatgaagatgagagtggacatcgttaccgtttgtaccttgatgagttagaaggaggtggtaaccctggtgctagttgcaaagacacaagtggggaaatcaaagtattacaagtctggcatagaagattaaagaatcaaaaaagtgccaaggaaggggtgacagtgcttataaacgaagacaaagagttggctgagctgcgaggtctggcagccggagtaggcctggctaatgcctgctatgcaatacagtatgtagctttggccatcattatggagcacctaggcaaaggtactcttccaacccaagaggagattgaaaatcttcctgccttccctcgggaaaaactgactctgcgtctcttgctgggaagtggagcctttggagaagtgtatgaaggaacagcagtggacatcttaggagttggaagtggagaaatcaaagtagcagtgaagactttgaagaagggttccacagaccaggagaagattgaattc

SEQ ID NO: 178390 - DNA, 349 bp, Homo sapiens
  Payload ID: 15121
  Gene Symbol:
  Gene Name: RP11-812E19.9
  ENST ID: ENST00000569103
  CDS Start-End: 1-349
atggagtttgggctgaactgggttttccttgttgctattataaaaggtgcccagtgtgaggtgcagctggtggagtctgggggaggcttggtacagcctggggggtccctgagactgtcctgtccagactctggattcaccttcagtaaccactacatgagctgggtccgccaggctccagggaagggactggagtggatttcatacattagtggtgatagtggttacacaaactacgcagactctgtgaagggccgattcaccatctccagggacaacgccaataactcaccgtatctgcaaatgaacagcttgagagctgaggacacggctgtgtattactgtgtga

SEQ ID NO: 178391 - DNA, 577 bp, Homo sapiens
  Payload ID: 15122
  Gene Symbol:
  Gene Name: RP11-831H9.11
  ENST ID: ENST00000528405
  CDS Start-End: 10-309
atcgcgactatgggagctccggggggaaagatcaaccggccccgaacggagctgaagaagaagctgttcaaacgccggcgggtgttgaatcgggagcggcgtctgaggcaccgggtggtcggggctgtgatagaccaagggctgatcacgcggcaccacctcaagaagcgggcgtccagtgcacgtgccaacattacactgtcagggaagaagcgcagaaaactcctccagcagatccggcttgcccagaaagagaagacagccatggaagtgctcaggagctgtcccaggaaatcaaggcttttctgactggcgtagaccccattctgggccaccaactctcagcccgggaacatgctcgctgtggtcttctcctgctccgttctttgccacctgctcgggctgctgtgcttgaccacttgagaggtgtctttgatgagagtgtccgggcccacctggctgccctggatgaaacccctgtggctggtccacctcacctccgtccacctccaccctctcatgtccctgctggtggacctggtctagaggatgtggttcaggaagtgcagcaggtgct

SEQ ID NO: 178392 - DNA, 777 bp, Homo sapiens
  Payload ID: 15123
  Gene Symbol:
  Gene Name: RP11-834C11.12
  ENST ID: ENST00000513209
  CDS Start-End: 1-381
gtgagtttccctgagacccccaagtccgacagccagacccccagccccaatgaaatcaagacggagcagagcctggcgggccctaaagggagcccctcggagagcgaaaaggagagggccaaagctgccgactccagcccagacacctcggataacgaagcgaaagagacggacggcaagcggtcccgaaccagttacacgcgctaccagactctggaactcgagaaagaattccactttaaccgctacctcactcgccgcaggcgcatagagatcgccaacaacttgtgtctcaatgagagacagatcaagatctggttccagaaccgcaggatgaagtggaagaaagattccaaaatgaaaagcaaagaggctctttagaggcagcgggggaggcccgcagagcgcgcccctagccggttcctgtccctgcgcctttccttttcgcctttcctctctatatttcgggtcgggggcaggtgctggagcactgggctcccgggccccacagacaaaagcgcttttccttggcattccgcatccctaccgacccagggttcccgcggggctgtcggcgctgccccatctcccctcagctcggctcagctcggtacccggggcccagggcaagctccgcaggacttccccggagggctgcggcgtacaggctggcgcagaacgaaccttggcctgggccgtatctccggctcccagcctcagcgcggccctcccgagttaaggtgggcccggcccgcgccacaggaccctcgccggacc

SEQ ID NO: 178393 - DNA, 3087 bp, Homo sapiens
  Payload ID: 15124
  Gene Symbol:
  Gene Name: RP11-849F2.7
  ENST ID: ENST00000582471
  CDS Start-End: 52-375
ccttttgcggccatcaccgaagcgggagcgggtaaggattcggcggccaaaatgaagtttaatccctttgtgacttccgaccgaagcaagaatcgcaaaaggcatttcaatgcaccttcccacattcgaaggaagattatgtcttcccctctttccaaagagctgagacagaagtacaacgtgcgatccatgcccatccgaaaggatgatgaagttcaggttgtacgtggacactataaaggtcagcaaattggcaaagtagtccaggtttacaggaagaaatatgttatctacattgaacgggtgcagcgggaaaaggctaatggcacaactgtccacgtaggcattcaccccagcaaggttgtatatatctgaactggtcgactaaagatgcaaagcgaagtgctccagtgagtgtggtacaggttgttgagatgaaggagagatggcaatcagctaaagttactgaatacgtcaggaaggaggctggtttcagctggctgtgattgggaggatcaatgcgaggacattccgagtcggaaacagccaaggcgaagactcacaggattctgccctgcccctccgctctgcatctgacagctgggatctcgggatcctgttttcctaagcttgctggaattcctgcagtcctcatgtgaactcccctggcctcatcaccatcctgtcttacggctgttctgactaaggaatcccagtttagacaactgagtatcaagttctctccctaaggaattatctgatcacagtggcaggtagactccatttggggtatctcttttctgcaggataatctcctgacatatctttatgtacacagatataatatttccattggaaacagatcctgccacccctgttaggagtcatcaagcctgcgcccaagttcacttggactctgctttattctggaaagattaataaatgggctacagctctggcagcgtcaaaactggccagaccaacagacctcccaggaaagcaaaactcctttccctcatccatgaagctgtactcatcttgttagatgtgagacctatttcttatttcttccatttattcacctgactcgctttcagagtcctttatgctgcatgccttcattcctggtgccctctcttgtctcttccccagtcctgctgaagctgctctttagcccaggccccaagactatatggtccctgtggcagcagccaatgttgtttcaggaagcaacagcatttgaaaatatgaccaaagattggaattatttagaaggctctcaaaaggattgctacagagacacaatgctggacagttatgagaacacggtcccacagggatccttcttacagctctccatgatgcctcagagagctggaaatgatccacctggggtttcaaatgcaagtgaaatggaaatggagataagtaacatgagagaaaagtttcttatgagtgtaacaaagttagtagaaagcaaaagttacaacagcaaggtattttccaaagaaaagtactttcaaacaataaaggaagttaaagaagctaaagaaaaagggaagaagtcatcacgtgattatcgccgtgcagcaaaatatgatgtgatctctgtacagggcacagagaaactgatagaggctactcatggagaacgtgatcgaatacggtattatgtacataaggaagagttgtttgatattcttcatgatacacatctcagtattggacatggtgggcggacacgcatgctcaaggagctgcaaggaaaatatgggaatgtcaccaaagaagttattgtcttatatctgactctgtgtaaacagtgccaccagaagaacccagtacccaagagaggccttgcaccaaagcccatgacttttaaggacatagactccacatgccaagttgaaatacttgacatgcagtccagtgccgatggtgagttcaagttcattttatactaccaggatcactcaaccaagtttattattttacggccattaagaaccaaacaggcccatgaggtggtcagtgtcttgttagatattttcacaattcttggtacacccagtgtgttagactctgacagtggcgttgagttcacaaaccaggttgttcatgagctcaatgagttgtggccagacctaaagattgtatctggtaagtaccaccctggccaaagccagggctccctggaaggagcaagccgtgatgtaaagaacatgataagtacctggatgcagagtaaccactcatgtcactgggccaaaggcctccgattcatgcagatggtgaggaatcaggctttcgacgtttccttgcagcaaagtccatttgaggcaatgtttggctataaagccaaatttgggctatattcctcaaacttgccccgggaaactgtggctactttacaaacggaagaagagctagaaattgctgaagaacagctagaaaatagcctttggatcaggcaggaagaaagggctgagattggagcagacagatctgatatggacgatgacatggatcccactcctgaagcttcagaacccagcacctcacaagggacttccggtctcctctgctggtgaacagatggctgctgggtggacagtcacaggtgtctctctgagcatagtcatctgagaactgttgccagaggccccagaggaaaagattgaaggctgcactctcaggtcaagttgtacatggcagtccttgctcaaaaagacaaaagttcaggtctgtgtatttattcttagggctgccataaaaaattaccacaacctggccgggcgcagcgctcatgcccgtaatcccagcactttggtaggccaaggtgggcgggtcacttgagatcaggagttcaagactagcctggccaacatgatgaaaccctgtctctactgaaaatatagaaattagccaggcttggagctgtgtgcctgtaatcccagctaaccaggaggctgaggcaggagaatcacttgaacccaggaggcagaggttgcagtgagccgagaccatgccactgcactccggcctgggtgacaaagcaagactctgtctcaaaaaaaaaaaaaaaaa

SEQ ID NO: 178394 - DNA, 5064 bp, Homo sapiens
  Payload ID: 15125
  Gene Symbol:
  Gene Name: RP11-864I4.1
  ENST ID: ENST00000496634
  CDS Start-End: 47-1624
gtggtggcagaggtgcttgtgtttttgtcggtacaggagagtcgctatggcggcggtggattcggatgtcgaatcgctgccgcgtggggggttccgctgctgcctctgccacgttactacagccaaccgacccagccttgatgcccacttgggaggcagaaagcaccggcacctggtagaactacgagctgcgagaaaggcccagggacttcgaagtgtgtttgtcagtggctttcccagggatgtggattctgctcagctctctgagtacttcctagcatttggacctgtggccagtgttgtcatggacaaggacaagggagtgtttgccattgtggagatgggggacgtgggtgctcgagaggctgtcttgtcacagtcccagcacagcctgggaggacatcgcctgcgtgtccgcccacgggagcagaaggagttccagagcccggcctccaaatcccccaaaggagcggcccccgacagtcaccagctggccaaagcgctagctgaggctgcagacgtgggggcacaaatgataaagcttgtggggctgagggagttgtccgaggccgagcggcagcttcgcagcctagtggtggccctgatgcaggaggtcttcacagagttcttccctggctgtgtggtccacccttttggctcttccataaatagcttcgatgtccatggctgtgatcttgacctcttcttggatctgggtgacttggaagagccccagccagtcccaaaggctccagaatctccatcgctggactcggccctggcttccccactggaccctcaagccctggcctgcaccccagcttcccctccagattcacaacctcctgcttctccccaggattctgaagccctggactttgaaaccccttcctcctccctggcgccccaaactccggactctgccttggcctccgagacccttgcttctccccagtctctgcctccagcttcaccactgctagaggacagggaagagggggacctggggaaggcctcggaactagcagagaccccaaaggaggagaaagcagagggggcagcaatgctggagctggtgggatccattctccggggctgtgtccctggggtgtatcgagtccaaactgtgccctctgcccggcgccctgtggtcaagttctgtcatcggccttcaggtctccacggtgatgtctccctcagtaaccggctggccctgcataactcccgtttcctgagtctctgctctgagctggatggtcgagtccggcccctcgtgtacaccctccgctgctgggctcagggtcgggggctgtcagggagtggcccccttctcagtaactacgccctgaccttgctggtgatctattttcttcagaccagggaccctcctgtgttgcccactgtgtcccagctcacccagaaagcaggagagggggaacaggtggaagtcgatggctgggactgcagtttccccagggatgcctcaagactggagcccagcataaatgtggagcccctcattcgcacagctcgaggggagtgcgggggcagcaccgcgcgtggcacctggcacccgcgcagagttcctgaatggcagagcggtgggtggctccagcagtactgagaagagccaggtttgcctccacattcttcctgtcgcctcagatttatgcgcacaaggacggagatttgcgttcagcgttcttcattctctcctttaaacgaggagagttcatcccgttcttaaactgggtaagagatttcaaacctgaacatgggtcaaaagccatgaacatcagaagcgacgatgtcaggtcttccagcgtcagcccctccaggggccgagtccggaggaggtgggagggacagggcgcgttctccctcatgtccctgccctgcttcgggccggagggccggtgccctgctcgcagtaacagcaccctggagctgtcaggggttggatgtgagcaaacctcactttggcaggcgggttcagaccggggcccctgttagacgctcatccctttctggaggaaaagcagagcaggaactaaagggatttagcacacacactgccacctccgcgcagcagctgttcctcgctcccatgagtttcatagaatcatgtgaggggcttggcaaaatctaccatcaagtcacttgtccctgggagggccagagagggacgcccccagtagcactggccgcgccgggccaacaaccgcgccacgtagccaagaactcgcggcttttccagcgggttctcacaacttccccgccctccacgctgtctacctccacgtctagactccgattggcccgctgcacctggggggcgggccagtcaagagctccaatgcgcaggcccgagctttttccgcgctggccagcaggccccacccacccagttctttttccaattcagcgccactggataccgaactgtcgtacgtatgtcttctgtttcgtcctcgctttccggctgctgtttctccacggctctcctctttccccctcccttctctcccgggcggcttactttgcggcagcgccgagaaccccaccccctttctttgcggaatcaccatggcggctggggtaagtttgctggctctggtggttcgggtcatcctatccaccgccatcctttgcccgagtggggccagtcggcgccagaggagttctgaggttgagtggggaactgattcgggggtctacagactgtactgctggagagtagggttcctagggcctggaggggaactgaggctggggctctcggaggccagaggtggaagggtctggggaagaggagaaaagagatgccgggtctgggccgtccgaagcctgagaaaggggttcggctctgttgccgctttgaggcgtggtatctgggcaggttgacgaacttctgtgtccgttttgtggagtaacacaggggacaggttgaagaggagggtctttgtaggcaggtccggctggcacggttaaaggtcgtctctcagggaggtttgggagcgagaggattctccggacagtgaagtcagaccaattggactccgctggccggcataatagagaagcccaacgccggggaactcgctgcgggacaggaccggagggatgatattcgcgacacggaaagaaaggctttttgagagagaggagttgatttaagaagacggcatgccatcccctatctctggctagtctgaggggaactagaaatctctcgatcgtcgtgcgtgccttagagacaggacgatgcttttgaagcggtgagcagctgagcagtagagtaggcaggcgctcggaaccatcaatgaatgaagcgagggctccgggaagggaggagagtatgtttgtaggcagatggagtctgatggagctagaagttctggatttcttggagatagatttgagaggaagagaatacttccagaggtgtccttagggaaggtcaaatctgtcaacaagctttatttagcagttggtgtgtagttctgttcttggtatttcggaggattctgattacatatgacaagtactaaaggacttggttcaccagaggaagtaaaagggtgagttgaatacattgggattattcaggaaagtcatcctggagagtggcattaaggactgggacccttctactcattaattttgtccctctctttctcccatagaccctgtacacgtatcctgaaaactggagggccttcaaggctctcatcgctgctcagtacagcggggctcaggtccgcgtgctctccgcaccaccccacttccattttggccaaaccaaccgcacccctgaatttctccgcaaatttcctgccggcaaggtcccagcatttgagggtgatgatggattctgtgtgtttgagagcaacgccattgcctactatgtgagcaatgaggagctgcggggaagtactccagaggcagcagcccaggtggtgcagtgggtgagctttgctgattccgatatagtgcccccagccagtacctgggtgttccccaccttgggcatcatgcaccacaacaaacaggccactgagaatgcaaaggaggaagtgaggcgaattctggggctgctggatgcttacttgaagacgaggacttttctggtgggcgaacgagtgacattggctgacatcacagttgtctgcaccctgttgtggctctataagcaggttctagagccttctttccgccaggcctttcccaataccaaccgctggttcctcacctgcattaaccagccccagttccgggctgtcttgggcgaagtgaaactgtgtgagaagatggcccagtttgatgctaaaaagtttgcagagacccaacctaaaaaggacacaccacggaaagagaagggttcacgggaagagaagcagaagccccaggctgagcggaaggaggagaaaaaggcggctgcccctgctcctgaggaggagatggatgaatgtgagcaggcgctggctgctgagcccaaggccaaggaccccttcgctcacctgcccaagagtacctttgtgttggatgaatttaagcgcaagtactccaatgaggacacactctctgtggcactgccatatttctgggagcactttgataaggacggctggtccctgtggtactcagagtatcgcttccctgaagaactcactcagaccttcatgagctgcaatctcatcactggaatgttccagcgactggacaagctgaggaagaatgccttcgccagtgtcatcctttttggaaccaacaatagcagctccatttctggagtctgggtcttccgaggccaggagcttgcctttccgctgagtccagattggcaggtggactacgagtcatacacatggcggaaactggatcctggcagcgaggagacccagacgctggttcgagagtacttttcctgggagggggccttccagcatgtgggcaaagccttcaatcagggcaagatcttcaagtgaacatctcttgccatcacctagctgcctgcacctgcccttcagggagatgggggtcattaaaggaaactgaacattg

SEQ ID NO: 178395 - DNA, 533 bp, Homo sapiens
  Payload ID: 15126
  Gene Symbol:
  Gene Name: RP11-872D17.8
  ENST ID: ENST00000528835
  CDS Start-End: 1-88
gcttgccattcttctgacattcttccacccctttctggtatatcgggaatgccgtacttggaaagaaagtccctctgcaattgcatagttcagaagccctcacttttcagccccgaggatggttttgttcatcttccaccacctttgaggacctcgtgtcccaaaagactttgcctatcccagcaaaacacacacacacacacacacacacacaaaataaagacacacaaggacgtctgcgcagcaagaaaagaatctcagttgccaagcagattgatatcacacagactcaaagcaaaggataaagccaagatgaaactccccttacttctggctcttctatttggggcagtttctgctcttcatctaaggtctgagacttccacctttgagacccctttgggtgctaagacgctgcctgaggatgaggagacaccagagcaggagatggaggagaccccttgcagggagctggaggaagaggaggagtggggctctggaagtgaagatgcctccaagaaagatggggctgt

SEQ ID NO: 178396 - DNA, 681 bp, Homo sapiens
  Payload ID: 15126
  Gene Symbol:
  Gene Name: RP11-872D17.8
  ENST ID: ENST00000529411
  CDS Start-End: 1-681
actttggcggtggccctctgctcgacggtgccttcgctggccctgacatccctgctgtgcctgggcttcgccctctgtgcctcagtccccatcctccctctccagtacctcaccttcatcctgcaagtgatcagccgctccttcctctatgggagcaacgcggccttcctcacccttgctttcccttcagagcactttggcaagctctttgggctggtgatggccttgtcggctgtggtgtctctgctccagttccccatcttcaccctcatcaaaggctcccttcagaatgacccattttacgataaagccaagatgaaactccccttacttctggctcttctatttggggcagtttctgctcttcatctaaggtctgagacttccacctttgagacccctttgggtgctaagacgctgcctgaggatgaggagacaccagagcaggagatggaggagaccccttgcagggagctggaggaagaggaggagtggggctctggaagtgaagatgcctccaagaaagatggggctgttgagtctatctcagtgccagatatggtggacaaaaaccttacgtgtcctgaggaagaggacacagtaaaagtggtgggcatccctgggtgccagacctgccgctacctcctggtgagaagtcttcagacgtttagtcaagcttgg

SEQ ID NO: 178397 - DNA, 576 bp, Homo sapiens
  Payload ID: 15127
  Gene Symbol:
  Gene Name: RP11-87C12.2
  ENST ID: ENST00000546333
  CDS Start-End: 49-306
tccctagcccgggagccgggtctctggagtcgcggcccggggttcacgatgtccgacgaggaagcgaggcagagcggaggctcctcgcaggccggcgtcgtgactgtcagcgacgtccaggagctgatgcggcgcaaggaggagatagaagcgcagatcaaggccaactatgacgtgctggaaagccaaaaaggcattgggatgaacgagccgctggtggactgtgagggctacccccggtcagacgtggacctgtaccaagtccgcaccgccaggcacaacatcatatggtctgcaagtggatgatgagattgtggagttcggctctgtgaacacccagaacttccagtcactgcataacattggcagtgtggtgcagcacagtgaggggaggaaactctacagagaagaatgtcagatgcagcagaagctccccgagaagcaacaggagaaaatggagaaacagaaatgaaagaagaggaggaacctaatccaaattataaagaagtagaagatccacaacaggaatcaaaagatgacacaatagcatggagagagtctcaggaggaggagagg

SEQ ID NO: 178398 - DNA, 936 bp, Homo sapiens
  Payload ID: 15128
  Gene Symbol:
  Gene Name: RP11-886H22.1
  ENST ID: ENST00000590532
  CDS Start-End: 1-516
atcctgcaggtattcaaacagctcttctacatgatcaacgcagtgactcttaacaacctgctcttgcggaaggacgtctgctcttggagcacaggcatgcaactcaggtacaatataagtcagcttgaggagtggcttcggggaagaaaccttcaccagagtggagcagttcagaccatggaacctctgatccaagcagcccagctcctgcaattaaagaagaaaacccaggaggacgcagaggctatctgctccctgtgtacctccctcagcacccagcagattgtcaaaattttaaacctttatactcccctgaatgaatttgaagaacgggtaacagtggcctttatacgaacaatccaggcacaactacaagagcggaatgaccctcagcaactgctattagatgccaagcacatgtttcctgttttgtttccatttaatccatcttctctaaccatggactcaatccacatcccagcgtgtctcaatctggaattcctcaatgaagtctgaagatgcatgtttccagcattagtttgattcccaatgtgtgtttgtagttgctgctaagcgaacgccctttggagcttacggaggccttctgaaagacttcactgctactgacttgtctgaatttgctgccaaggctgccttgtctgctggcaaagtctcacctgaaacagttgacagtgtgattatgggcaatgtcctgcagagttcttcagatgctatatatttggcaaggcatgttggtttgcgtgtgggaatcccaaaggagaccccagctctcacgattaataggctctgtggttctggttttcagtccattgtgaatggatgtcaggaaatttgtgttaaagaagctgaagttgttttatgtggaggaaccgaaagcatgagccaagctccctactgtgtcagaaatgtgcgttt

SEQ ID NO: 178399 - DNA, 690 bp, Homo sapiens
  Payload ID: 15129
  Gene Symbol:
  Gene Name: RP11-894J14.5
  ENST ID: ENST00000607283
  CDS Start-End: 1-371
ttctcctgcttgccatcaatggagtgacagagtgtttcacatttgctgccatgagcaaagaggaggtcgacaggtacaattttgtgatgctggccctgtcctcctcattcctggtgttatcctatctcttgacccgttggtgtggcagcgtgggcttcatcttggccaactgctttaacatgggcattcggatcacgcagagcctttgcttcatccaccgctactaccgaaggagcccccacaggcccctggctggcctgcacctatcgccagtcctgctcgggacatttgccctcagtggtggggttactgctgtttcggagaggccaagaaaaccatggaggagcagtggaccttggtgtccctgctgagcacaagccagcaacaaggacctgtccccccaggctccacggcatcctcagccacagacaagctcagccgctgggagtgtgcacctgtcacaagaaggtggacttttaaatattctccactgaagcaaatgctgcaacaatttgcatttccttcaccaatgtcgtcttgtgccttttcttgttcctactgtaaaggagatgggttagatgttaaacgaagtctcactgtgttgtccaggctggtctcaagctcctgggctcaagcaatacttccacctcagcctcccaaaatgctgggattacaggtatgagtatcgat

SEQ ID NO: 178400 - DNA, 768 bp, Homo sapiens
  Payload ID: 15129
  Gene Symbol:
  Gene Name: RP11-894J14.5
  ENST ID: ENST00000607203
  CDS Start-End: 1-77
ttctcctgcttgccatcaatggagtgacagagtgtttcacatttgctgccatgagcaaagaggaggtcgacagatgaattagcagcagttagcccttgttccagcgcagtcgattcttcaccagttgacttttccattcttcttgggaagcgcggcttaaaaagaaagtgctggagaggccaagaaaaccatggaggagcagtggaccttggtgtccctgctgagcacaagccagcaacaaggacctgtccccccaggctccacggcatcctcagccacagacaagctcagccgctgggagtgtgcacctgtcacaatggtgctaaaaaaaatctggattcaaatccagccagcagcgtgactttgagcaagtttgtgaagtgggatatttctcagagcggttgagggaggtggcttgagctcgcacctggcacacggaagactcaagatttacagggcgcctcctgcggaagcctagagacatcgggggcgccgaagggcccgcgccggacttcgcagacagggggcacttgggtgccctttcaggtctcagagggagcgcccgatccccgacgaggggcaggcaaacgggcgcagtgcccgcggcggcggcacgcgcgcatctgggatccggccgcttctccgctcatgccatcttgtccgagccagtcacgtgcgggcgacagcggcgcgcttcgccgggccggtactccaggtccgacccgcgaacccctctgggatccccgccgctctgtctacaacccgagg

SEQ ID NO: 178401 - DNA, 823 bp, Homo sapiens
  Payload ID: 15129
  Gene Symbol:
  Gene Name: RP11-894J14.5
  ENST ID: ENST00000607495
  CDS Start-End: 1-101
ttctcctgcttgccatcaatggagtgacagagtgtttcacatttgctgccatgagcaaagaggaggtcgacaggttattcccagcactttctatgttgtaaactgttaagtgaatatcctgacacagagtcctccaagagcctggtctccttctccattttgcctgctgatgaaccctgagagtgaacttcaccgcctctcagccccagcctcgcccctaagagagcctaggatggaagggagcctgcccaggtcatattgagttgatgaccagccagcctggagcctgagactcaggacctgtagaggccaagaaaaccatggaggagcagtggaccttggtgtccctgctgagcacaagccagcaacaaggacctgtccccccaggctccacggcatcctcagccacagacaagctcagccgctgggagtgtgcacctgtcacaaaaacgaagtctcactgtgttgtccaggctggtctcaagctcctgggctcaagcaatacttccacctcagcctcccaaaatgctgggattacagatggagtcttgctctgtcgcccaggctggagtgcagtgatgcgatctcggctcactgcaacctccacctcccctggttcaagtgattctcctgcctcagcctcccaagtagctgggactacaagcccgtgccaccatgcccagcactttcatttggacccgtggatacccattgaacagatgcttgaaacctgcaagtaatcttcagatcctagcagaaccataggcctttcctttgttttgggaggatatagcctgcctatatgctgtggaaatgaacgggg

SEQ ID NO: 178402 - DNA, 1498 bp, Homo sapiens
  Payload ID: 15130
  Gene Symbol:
  Gene Name: RP11-903H12.5
  ENST ID: ENST00000553909
  CDS Start-End: 191-286
acacactcacacaaggacgccaaccccacctagatgcaaagcaggattcaaaagaacatctttgcgttttctaccggctccccatcatcgtactagggaggaagaagcgggtgagaaacaaaacttctttccattgtcctgcccgtttctgcggacttgttctgaggccgaggagcctgtgttggaagagatggtgatgggcctgggcgttttgttgttggtcttcgtgctgggtctgggtctgaccccaccgaccctggctcaggataactccaggcacctctaagatactgatggctctgcagaggacccattcattgcttctgcttttgctgctgaccctgctggggctggggctggtccagccctcctatggccaggatggcatgtaccagcgattcctgcggcaacacgtgcaccctgaggagacaggtggcagtgatcgctactgcaacttgatgatgcaaagacggaagatgactttgtatcactgcaagcgcttcaacaccttcatccatgaagatatctggaacattcgtagtatctgcagcaccaccaatatccaatgcaagaacggcaagatgaactgccatgagggtgtagtgaaggtcacagattgcagggacacaggaagttccagggcacccaactgcagatatcgggccatagcgagcactagacgtgttgtcattgcctgtgagggtaacccacaggtgcctgtgcactttgacggttagatgccaccatgtagggattatcgcgagtggttgaccttacacttactccttaaatagcagtgagtaatgcatttgagctgtcccaggctctgtctcctcagctcatttcctactctttttctctatataactcattctattaaatacattgcaccaaagagatatggagacataaacctgtaatgaatgaggctgggcttttctgtaataagcttccttttataatactggtcagcttagctctctcagatcctatcctgtggaatttagttattatgtgtatttatgtagtatttcaaacatttcaaaatgctttcatctatgtttatcacattttaataccacagcacttataatgatgtcactacatatagaagctcaaagttaagggatttgctgaagactgtaaagttaatggaagaattgagacaaaaatccagtgtagctggccacttatccagggctttttctacttcatcacaaggaatgttttgaaagtgtctgctttttttatccttaaaattcacctgtcagggaggcattaaaaatttggaaatgtatgccagcaaaatgtgagctctgtattttttggcattcttatgtttgggtttaataagattaagaaaatgatactgggaattttctttttcctgaaactttgaatcaccctagtaagtcaaagtactaaaaaatgtactagatcattaagacttatgtgctcttactgattgaaagattttttatgttttccttgtaataaa

SEQ ID NO: 178403 - DNA, 930 bp, Homo sapiens
  Payload ID: 15131
  Gene Symbol:
  Gene Name: RP11-934B9.3
  ENST ID: ENST00000555591
  CDS Start-End: 1-771
atggatggctttaggagaaccatagaaaaccagcactctcgtaatgatgtcatggtttctgagtggctaaacaaactgaatctagaggagcctcccagctctgttcctaaaaaatgcccgagccttaccaagaggagcagggcacaagaggagcaggttccacaagcctggacagcaggcacatcttcagattcgatggcccaacctccccagactccagagacctcaactttcagaaaccagatgcccagccctacctcaactggaacaccaagtcctggaccccgagggaatcagggggctgagagacaaggcatgaactggtcctgcaggaccccggagccaaatccagtaacaggagctgacctcagacccgagcttcctgaccactgtgctgtgcgcgctgggcggcttctcgctgctgctgggcctcgcttcccgggagcagcgactgcagcgctggacgcgtcccctgtccggcttggtatgggtcgcgctgctagcgctaggccacgccttcctgttcaccgggggcgtggtgagcgcctgggaccaggtgtcctattttctcttcgtcatcttcacggcgtatgccatgctgcccttgggcatgcgggacgccgccgtcgcgggcctcgcctcctcactctcgcatctgctggtcctcgggctgtatcttgggccacagccggactcacggcctgcactgctgccgcaggtgagcacgcaagtagcacaggctgcgctcaggacggctctgccacgtgctagtaggctccttttagggggttgttgagctgtgactccaagtcaaggtgcaacgctgggcgcaggatacccaaccgtgctttcgcagagctggtacaacagtgtgatgcaatgcctgctgttaccagaagagggatccaggccacacggaagggagtcgtg

SEQ ID NO: 178404 - DNA, 694 bp, Homo sapiens
  Payload ID: 15132
  Gene Symbol:
  Gene Name: RP11-96L14.7
  ENST ID: ENST00000407889
  CDS Start-End: 5-196
caccatgcgatttcgacgcttgacccctggttacttccgggtgttacagatgcaggtagctggtgagctgaaggcagagccccggagtctgctggcaggagttgtggctacagtgctagctgtcctcggcctgggtggctcctgctatgccgtctggaagatggtggggcagcggcgggtgccacgggccccgtaacgaagaagagagactctcacttggatgctggggggctcgacgctcagctgcttcagcctgggagaaagaaaaacaggagttgggagctgaccagccctagcttgtccctgacgccaggatccgggtctgagaaacgggaggcgggcggacccacgggtcccaagagagaagactctgcgctgcctggggcttcaacttcacatctcccggccggtaccgcggaccctcctccgccccaggccgggctcgtccgggactcacgcgcaggccagacagcggtgcagaccgccccctggcaggtcggggtcgaactcggcgtttgggtcgggctggggtcgtgcggatccctgaggccgcagctcgcggtgaatctcatccaagtccggccgccgccgcttcgccttcatctgccgggctagagagtgcgctcggtgcgcgcctgtccggcgggagcgacccatggccagaaacagcccggccggccaaggggccaggagc

SEQ ID NO: 178405 - DNA, 579 bp, Homo sapiens
  Payload ID: 15132
  Gene Symbol:
  Gene Name: RP11-96L14.7
  ENST ID: ENST00000433939
  CDS Start-End: 81-272
ggcaggcgcgggtgagcatcctctgagagcttgggtcttgcgtatgtggaaggccgccagggagaccagtgccgcccaccatgcgatttcgacgcttgacccctggttacttccgggtgttacagatgcaggtagctggtgagctgaaggcagagccccggagtctgctggcaggagttgtggctacagtgctagctgtcctcggcctgggtggctcctgctatgccgtctggaagatggtggggcagcggcgggtgccacgggccccgtaacgaagaagagagactctcacttggatgctggggggctcgacgctcagctgcttcagcctgggagaaagaaaaacaggagttgggagctgaccaggtgagagccctatctgctgagcacccatccatcaatcctctccttactccttcataccttttcttgtggtctttggatcggaagtgggtcttcaggttggtggaatcgatgaagtacctcctgtaggaatggaagtgagaaggagagtgaggaggtgatagtctcccaagtgcacctatctccctagccctagcttgtccctgacgccaggat

SEQ ID NO: 178406 - DNA, 1468 bp, Homo sapiens
  Payload ID: 15132
  Gene Symbol:
  Gene Name: RP11-96L14.7
  ENST ID: ENST00000448923
  CDS Start-End: 161-352
ggcaggcgcgggtgagcatcctctgagagcttgggtcttgcgtatgtggaaggtcagagacccctctaccctagtttccacttcttggtgtcatgaagaccactggtcttcacgtccgctcccaccctacaggccgccagggagaccagtgccgcccaccatgcgatttcgacgcttgacccctggttacttccgggtgttacagatgcaggtagctggtgagctgaaggcagagccccggagtctgctggcaggagttgtggctacagtgctagctgtcctcggcctgggtggctcctgctatgccgtctggaagatggtggggcagcggcgggtgccacgggccccgtaacgaagaagagagactctcacttggatgctggggggctcgacgctcagctgcttcagcctgggagaaagaaaaacaggagttgggagctgaccaggtgagagccctatctgctgagcacccatccatcaatcctctccttactccttcataccttttcttgtggtctttggatcggaagtgggtcttcaggttggtggaatcgatgaagtacctcctgtaggaatggaagtgagaaggagagtgaggaggtgatagtctcccaagtgcacctatctccctagccctagcttgtccctgacgccaggatccgggtctgagaaacgggaggcgggcggacccacgggtcccaagagagaagactctgcgctgcctggggcttcaacttcacatctcccggccggtaccgcggaccctcctccgccccaggccgggctcgtccgggactcacgcgcaggccagacagcggtgcagaccgccccctggcaggtcggggtcgaactcggcgtttgggtcgggctggggtcgtgcggatccctgaggccgcagctcgcggtgaatctcatccaagtccggccgccgccgcttcgccttcatctgccgggctagagagtgcgctcggtgcgcgcctgtccggcgggagcgacccatggccagaaacagcccggccggccaaggggccaggagcagggcagggagcacacgtgtgagcacttccgggccgatcagctacgtcaggccacgccggggggctaggcaggctcggccggaccgcctctgatgacgtcactctcggccagcggctcgagcgccgccaggcggccgtcgacgtcagtgaccgagctcaggacgggctcccagaagtgtgcccactgaagggcatggccccgcgggccctcgctggggaggcgcggggtggtgcgtgcgcctgggggtttcggggccgtcttgctgccctgctcttcctggcctggtccaaccagtatcagtgccaacctgtactcctgtcatcccttcctgtttcccagaccttggactccgcggtgggggtgggatgctttatctctggaaagcactgataaatgtctgtgtcatgaataaattagtaaatgactgaga

SEQ ID NO: 178407 - DNA, 466 bp, Homo sapiens
  Payload ID: 15133
  Gene Symbol:
  Gene Name: RP11-96L14.8
  ENST ID: ENST00000635463
  CDS Start-End: 83-439
agttcctagagccagactcactggtatccactgagccaccaccttcctgtgcttgcgtgccaggccccttccccctgcagccatgaaccaggccttctggaaaacctacaagtccaaagtgctacagaccctgagtggggaatctgaagaagacctggcagaggagagggagaacccagcattagtggggtctgagacagcagaaccgaccgaggagaccttcaatcccatgtcacagctggcccgccgggttcagggggtcggggtgaaaggctggctgacaatgtcatctctgtttaacaaagaagatgaagataagctgctgccatcagagccttgcgctgaccagtatgtgcgtgtgtgtttgtggtggttctggaaggggcctgaggtcccccttctgcctggtcctttccttctggtttgtttgtctttctaaccactgagggctggggaggggcagtcc

SEQ ID NO: 178408 - DNA, 643 bp, Homo sapiens
  Payload ID: 15133
  Gene Symbol:
  Gene Name: RP11-96L14.8
  ENST ID: ENST00000634842
  CDS Start-End: 83-643
agttcctagagccagactcactggtatccactgagccaccaccttcctgtgcttgcgtgccaggccccttccccctgcagccatgaaccaggccttctggaaaacctacaagtccaaagtgctacagaccctgagtggggaatctgaagaagacctggcagaggagagggagaacccagcattagtggggtctgagacagcagaaccgaccgaggagaccttcaatcccatgtcacagctggcccgccgggttcagggggtcggggtgaaaggctggctgacaatgtcatctctgtttaacaaagaagatgaagataagctgctgccatcagagccttgcgctgaccaccctctggcggcgcgacccccctcgcaggcggcggcggcggcggaggcgcgcggcccgggcttctgggacgcgttcgccagcaggtggcagcagcagcaggccgcggcggcgtccatgctgcgcggcaccgagcccactccggagccggaccccgaacccgcggacgaggccgcggaggaggccgcagagcgccccgagtcgcaggaggccgagccggtggccggcttcaagtggggcttcctcactcacaaactggccgagatgagggtgaaggctgcgcccaagggtgactag

SEQ ID NO: 178409 - DNA, 1060 bp, Homo sapiens
  Payload ID: 15134
  Gene Symbol:
  Gene Name: RP11-96O20.4
  ENST ID: ENST00000564080
  CDS Start-End: 193-1060
ttctgtccggccagccgctggagtcgttaggtgccgccttgcttctgacgagccacacgtttgcttcttccctgtgttcccagctggagggacatgagtgtccctgggccgtcgtctccggacggggccctgacacggccaccctactgcctggaggccggggagccgacgcctgcctgatcctgcctgaagatggtgccactggtggctgtggtatcagggccccgtgcccagctctttgcctgcctgctcaggctgggcactcagcaggtcggcccccttcagctgcacaccggggccagccatgcggccaggaaccattatgaggtgctggtgctgggtgggggcagtggcggaatcaccatggctgcccgcatgaagaggaaagtgggtgcagagaatgtggccattgttgagcccagtgagagacatttctaccagccaatctggacactggtgggtgctggtgccaaacaattgtcctcatctggtcgtcccacggcaagtgtgattccatctggtgtagaatggatcaaagctagagtgactgagttgaacccagacaagaactgcattcacacagatgacgacgagaagatctcctaccgatatcttattattgctctcggaatccagctggactatgagaagattaaaggcctacctgaaggtttcgctcatcccaaaatagggtcgaattattcagttaagactgtagagaagacatggaaagctctgcaggacttcaaagagggcaatgccatcttcaccttcccaaatactccagtgaagtgtgctggagcccctcagaagatcatgtacttatcagaagcctacttcaggaagacagggaagcgatccaaggccaatatcattttcaacacttctcttggagccattttcggggttaagaagtatgcagatgccctgcaggagatcatccaggagcggaacctcactgttaactacaagaaaaacctcattgaagtccgagccgataaacaagaggctgtatttgagaacctggacaaaccaggagagacccaagtgatttcagtga

SEQ ID NO: 178410 - DNA, 566 bp, Homo sapiens
  Payload ID: 15135
  Gene Symbol:
  Gene Name: RP11-977G19.10
  ENST ID: ENST00000547423
  CDS Start-End: 250-566
accgcagcacgctggagtcccgcttaggtaccagttagcgtcaggggagctgggtcaggcggtcgccgggacaccccgtgtgtggcaggcggcgaagcgctctggagaatcccggacagccctgctccctgcagccaggtgtagtttcgggagccactggggccaaagtgagagtccagcggtcttccagcgcttgggccacggcggcggccctgggagcagaggtggagcgaccccattacgctaaagatgaaaggctggggttggctggccctgcttctgggggccctgctgggaaccgcctgggctcggaggagccaggatctccactgtggagcatgcagggctctggtggatgaactagaatgggaaattgcccaggtggaccccaagaagaccattcagatgggatctttccggatcaatccagatggcagccagtcagtggtggagaatgcatcttgtcttgttcttgcagcccggcatgccagtgcttcctccacgaatttgaaagacatattggctgacctgatacctaaggagcaggccagaattaagactttcag

SEQ ID NO: 178411 - DNA, 937 bp, Homo sapiens
  Payload ID: 15135
  Gene Symbol:
  Gene Name: RP11-977G19.10
  ENST ID: ENST00000549318
  CDS Start-End: 149-937
ctggagaatcccggacagccctgctccctgcagccaggtgtagtttcgggagccactggggccaaagtgagagtccagcggtcttccagcgcttgggccacggcggcggccctgggagcagaggtggagcgaccccattacgctaaagatgaaaggctggggttggctggccctgcttctgggggccctgctgggaaccgcctgggctcggaggagccaggatctccactgtggagcatgcagggctctggtggatgaactagaatgggaaattgcccaggtggaccccaagaagaccattcagatgggatctttccggatcaatccagatggcagccagtcagtggtggaggtgccttatgcccgctcagaggcccacctcacagagctgctggaggagatatgtgaccggatgaaggagtatggggaacagattgatccttccacccatcgcaagaactacgtacgtgtagtgggccggaatggagaatccagtgaactggacctacaaggcatccgaatcgactcagatattagcggcaccctcaagtttgcgtgtgagagcattgtggaggaatacgaggatgaactcattgaattcttttcccgagaggctgacaatgttaaagacaaactttgcagtaagcgaacagatggagggaccagcaagaacagagacaggaaggggaaaatggatgtgaccaactcagctgaaaaatcccggagatcgcccgccatggctttacttactgcggccgcccggctcttgggaaccaagaatgcatcttgtcttgttcttgcagcccggcatgccagtgcttcctccacgaatttgaaagacatattggctgacctgatacctaaggagcaggccagaattaagactttcaggcagcaacatggcaagacggtggtgggccaaatcactgtggacatg

SEQ ID NO: 178412 - DNA, 512 bp, Homo sapiens
  Payload ID: 15135
  Gene Symbol:
  Gene Name: RP11-977G19.10
  ENST ID: ENST00000548360
  CDS Start-End: 265-512
ctgattggggctcgcaccgcagcacgctggagtcccgcttaggtaccagttagcgtcaggggagctgggtcaggcggtcgccgggacaccccgtgtgtggcaggcggcgaagcgctctggagaatcccggacagccctgctccctgcagccaggtgtagtttcgggagccactggggccaaagtgagagtccagcggtcttccagcgcttgggccacggcggcggccctgggagcagaggtggagcgaccccattacgctaaagatgaaaggctggggttggctggccctgcttctgggggccctgctgggaaccgcctgggctcggaggagccaggatctccactgtggagcatgcagggctctggtggatgaactagaatgggaaattgcccaggtggaccccaagaagaccattcagatgggatctttccggatcaatccagatggcagccagtcagtggtggagatcccggagatcgcccgccatggctttacttactgcggccgccc

SEQ ID NO: 178413 - DNA, 1126 bp, Homo sapiens
  Payload ID: 15136
  Gene Symbol:
  Gene Name: RP11-983G14.2
  ENST ID: ENST00000621301
  CDS Start-End: 92-1042
tgtggcataccttgtgtttagttcaagaactataatctagatgtaacacctgaaaataaactcttttattgatattctacaggcagaagaaatgaagatagcaaacaacacagtagtgacagaatttatcctccttggtctgactcagtctcaagatattcagctcttggtctttgtgctgatcttaattttctaccttatcatcctccctggaaattttctcattattttcaccataaggtcagaccctgggctcacagcccccctctatttctttctgggcaacttggccttcctggatgcatcctactccttcattgtggctcccaggatgttggtggacttcttctctgagaagaaggtaatctcctacagaggctgcatcactcagctctttttcttgcacttccttggaggaggggagggattactccttgttgtgatggcctttgaccgctacatcgccatctgccggcctctgcactgttcaactgtcatgaaccctagagcctgctatgcaatgatgttggctctgtggcttgggggttttgtccactccattatccaggtggtcctcatcctccgcttgcctttttgtggcccaaaccagctggacaacttcttctgtgatgtccgacaggtcatcaagctggcttgcaccgacatgtttgtggtggagcttctgatggtcttcaacagtggcctgatgacactcctgtgctttctggggcttctggcttcctatgcagtcatcctctgccatgttcgtagggcagcttctgaagggaagaacaaggccatgtccatgtgcaccactcgtgtcattattatacttcttatgtttggacctgctatcttcatctacatgtgccctttcagggccttaccagctgacaagatggtttctctctttcacacagtgatctttccattgatgaatcctatgatttatacccttcgcaaccaggaagtgaaaacttccatgaagaggttattgagtcgacatgtagtctgtcaagtggattttataataagaaactgagaaggaggaattctggctggaattcatatcattcatttaacaagtcctgtttttcactgagtacctcccatttgccaggtacca

SEQ ID NO: 178414 - DNA, 789 bp, Homo sapiens
  Payload ID: 15136
  Gene Symbol:
  Gene Name: RP11-983G14.2
  ENST ID: ENST00000631033
  CDS Start-End: 1-634
cctccttggtctgactcagtctcaagatattcagctcttggtctttgtgctgatcttaattttctaccttatcatcctccctggaaattttctcattattttcaccataaggtcagaccctgggctcacagcccccctctatttctttctgggcaacttggccttcctggatgcatcctactccttcattgtggctcccaggatgttggtggacttcttctctgagaagaaggtcatcaagctggcttgcaccgacatgtttgtggtggagcttctgatggtcttcaacagtggcctgatgacactcctgtgctttctggggcttctggcttcctatgcagtcatcctctgccatgttcgtagggcagcttctgaagggaagaacaaggccatgtccatgtgcaccactcgtgtcattattatacttcttatgtttggacctgctatcttcatctacatgtgccctttcagggccttaccagctgacaagatggtttctctctttcacacagtgatctttccattgatgaatcctatgatttatacccttcgcaaccaggaagtgaaaacttccatgaagaggttattgagtcgacatgtagtctgtcaagtggattttataataagaaactgagaaggaggaattctggctggaattcatatcattcatttaacaagtcctgtttttcactgagtacctcccatttgccaggtaccattgtaggcaatggaggagagttatgcataatgagagaataaacttattatatttaaagaatataaaggaaa

SEQ ID NO: 178415 - DNA, 3447 bp, Homo sapiens
  Payload ID: 15137
  Gene Symbol:
  Gene Name: RP1-27O5.3
  ENST ID: ENST00000480336
  CDS Start-End: 91-1629
gtgtcggtgcgcggtgctccgtggctgcgctgctggaacccgctggaagagatacaggtttgctctggagcagcagcagctggcggagcaatggagatgcaatcctattatgccaagcttttgggggagctgaatgaacagagaaagagggactttttctgtgactgcagcatcattgtggaagggcggatcttcaaggcccacaggaacattttgtttgctaacagcggctacttccgagccctgctcattcactatatccaggacagcgggcggcatagcaccgcctccttggacattgtcacctctgatgccttctccatcatcttagatttcctctattctgggaagttggatttgtgtggggagaatgtgattgaagtgatgtcggctgccagctacctgcagatgaatgacgtggtgaacttctgcaagacatacattaggtcatccctcgacatttgccgaaagatggagaaggaggctgctgtggctgcagcagtggcggcggcagcggcggcggctgcagcggcggcagcagcggcggctcatcaggttgacagtgaaagccccagttcaggccgggaggggacctcctgtggtaccaagagcttggtctcctctccagccgagggagaaaagagcgtggagtgcctgagagagtccccttgcggtgactgcggagactgccaccccttggaactggtggtgagagacagccttggcggtggctcggctgacagcaacctctctactccacccaaacggatagagcccaaggtggaatttgatgctgatgaagtggaggtggacgttggtgaacagctgcagcagtatgctgccccgctgaacctggcccacgtggaggaggccttgccaagcggccaggcggttgacttggcttacagcaactaccacgtgaagcagttcctggaggcgctcttgcgcaacagcgctgccccgagcaaggatgatgcagaccatcacttttctaggagtttggaaggaagaccagaaggtgcaggagtagccatgagttccatgatggatgtccaggctgactggtatggagaggactcaggtgatgtgctggtggtccccatcaagctccacaagtgtcctttctgcccttacactgccaaacagaagggcatcctcaagcggcacatccgttcacacacaggcgagcggccctacccctgtgagacctgcggcaagaggttcactcgacaagagcacctgcggagccacgcactgagtgtccacagatccaaccgtccaatcatctgcaagggctgcaggagaacattcacgagtcacctgtcccaggggctgcggcgcttcgggctgtgtgacagctgcacctgcgttacagacacacccgatgatgatgatgatttgatgcccatcaaccttagcttggtggaggcttcatctgaaagccaagaaaagagcgacacagacaatgactggccaatctatgtggagtcggagatcgggtctcattatgttgcccaggctagtctggaactcctggccttaagccaacctcctgcctcagcctcccaaagtgctggcattacagacggagtctcactctgttgcccaggccggagtacagtggcatgatctcagctctctgcaacctccacctcctgggttcaagacaatcctccaaacacagactgtttgacttagaatcttcccttttttactccattcaagagcagcattcataaatttccagaatggagatctcctctcatcagtctcacctcctgcagcaactgaacgagcagcgcaggcaagatgtattttgtgactgcagtattctagttgaagggaaggtcttcaaagcacatcgaaatgtattattcgctagtagcggctactttaaaatgcttctttctcagaattcaaaggagacgagtcagccaaccacagctacatttcaggctttctcccctgacacttttacagttatcttggacttcgtatattctggcaaactgtctcttactggtcagaatgtcatagaagtgatgtcggctgctagcttccttcagatgactgatgtcataagtgtatgtaagacttttattaaatcttccttagacattagtgagaaagaaaaagatcgctatttcagtctctcagataaagatgccaattctaatggtgtagaacgttcctctttttatagtggtggctggcaagaaggaagcagttctccacgttctcacctaagcccagagcaaggaacaggtataataagtggaaaatcttggaataagtataattatcatccagcctcccagaagaatactcaacaacccttggccaagcatgaaccaaggaaagagtccattaaaaagaccaaacatttgagattgtcacagccttctgaagttactcattataagtcaagcaaacgagaagtacgaacatctgattcttccagccatgtttcccagtctgaagaacaagcacagattgatgctgaaatggactctactcctgttggctatcagtacggtcaaggatctgatgtcacatccaaaagctttccagatgatctgcctcggatgcgattcaagtgcccgtactgcacacatgtggtgaagcggaaggcagacctaaagcgccaccttcgttgtcatacaggagaaaggccctatccatgtcaagcttgtggaaaaagatttagcaggctagaccatctaagtagccattttcgaacaattcaccaggcatgtaaactcatctgcagaaaatgtaaacgtcatgtgacagatctaacagggcaagtggtacaggagggaaccaggcgctacagactgtgtaatgagtgtcttgcagaatttggcatagacagcctccccattgacttggaagctgaacaacatcttatgtccccatcagatggagataaggattccagatggcacttgagtgaagatgagaatagatcctatgtggagattgtagaagatgggtctgctgatctggtcatccaacaggttgatgatagtgaagaagaagaagaaaaagaaattaagcccaacattaggtagctgtaatgtgaaccaacagagctggcatgtctgcaatttacattgacttcctgtatctctctctttctatggtcggagtctagttaacaaatttatcacactgactttaaagaaatgatctgatataacttgcatgctttctgaacaggccattgtatccattctgaactttgttgccctaaaatgtgttgctgcactggaaagaaagaactagcttgagttggcttgatggatgaacaattatcctcttactttcattacaatcctcttactttattccagagatacctttttcttttaatattggaggatctacttagcaaacttttttcaaagaaaatactttaaataaattcaccacaaccaaacttta

SEQ ID NO: 178416 - DNA, 679 bp, Homo sapiens
  Payload ID: 15138
  Gene Symbol:
  Gene Name: RP1-309K20.6
  ENST ID: ENST00000454607
  CDS Start-End: 1-421
aggggaaagtctgctgatggcactgaaggacgttgccttatcctcagggagtgcctgcacctctgcatccctggagccctcttatgtgcttagagcaattggcactgatgaggatttagcgcactcttctatcaggtttggaattggccgcttcactacagaggaggaagtggactacacagtggagaaatgcattcagcatgtgaagcgtcttcgagaaatgagtctaaaagttggttttaattggttgcccacaggattgacttggcctctacttcttgttaaggaaattcatctcttgttttatcaggtgtgtgtggtttcagcgcagcatggctgtggtcatccgtttgcaaggtctcccaattgtggcggggaccatggacattcgccacttcttctctggattgaccattcctgatgggggcgtgcatattgtagggggtgaactggcttggccggactgaacgggtgcggaactgctcaagccctgagttctccaagactctacagcttgagtaccgctttgagacagtccagaagctacgctttggaatctatgacatagacaacaagacgccagagctgagggatgatgacttcctagggggtgctgagtgttccctaggacagattgtgtccagccaggtactgactctccccttgatgctgaagcctg

SEQ ID NO: 178417 - DNA, 611 bp, Homo sapiens
  Payload ID: 15138
  Gene Symbol:
  Gene Name: RP1-309K20.6
  ENST ID: ENST00000441563
  CDS Start-End: 1-175
aggggaaagtctgctgatggcactgaaggacgttgccttatcctcagggagcgcactcttctatcaggtttggaattggccgcttcactacagaggaggaagtggactacacagtggagaaatgcattcagcatgtgaagcgtcttcgagaaatgagtctaaaagttggttttaattggttgcccacaggattgacttggcctctacttcttgttaaggaaattcatctcttgttttatcaggtgtgtgtggtttcagcgcagcatggctgtggtcatccgtttgcaaggtctcccaattgtggcggggaccatggacattcgccacttcttctctggattgaccattcctgatgggggcgtgcatattgtagggggtgaactggcttggccggactgaacgggtgcggaactgctcaagccctgagttctccaagactctacagcttgagtaccgctttgagacagtccagaagctacgctttggaatctatgacatagacaacaagacgccagagctgagggatgatgacttcctagggggtgctgagtgttccctaggacagattgtgtccagccaggtactgactctccccttgatgctgaagcctg

SEQ ID NO: 178418 - DNA, 872 bp, Homo sapiens
  Payload ID: 15138
  Gene Symbol:
  Gene Name: RP1-309K20.6
  ENST ID: ENST00000541176
  CDS Start-End: 1-485
tgatgaatggggaccctaagcaccattatcccggctgtatcaacctctcctttgcatatgtggaaggggaaagtctgctgatggcactgaaggacgttgccttatcctcagggagtgcctgcacctctgcatccctggagccctcttatgtgcttagagcaattggcactgatgaggatttagcgcactcttctatcaggtttggaattggccgcttcactacagaggaggaagtggactacacagtggagaaatgcattcagcatgtgaagcgtcttcgagaaatgagtctaaaagttggttttaattggttgcccacaggattgacttggcctctacttcttgttaaggaaattcatctcttgttttatcaggtgtgtgtggtttcagcgcagcatggctgtggtcatccgtttgcaaggtctcccaattgtggcggggaccatggacattcgccacttcttctctggattgaccattcctgatgggggcgtgcatattgtagggggtgaactggatggcccactgcgtgaccttggttcagctgtccatttcctgtgaccatctcattgacaaggacatcggctccaagtctgacccactctgcgtccttttacaggatgtgggagggggcagctgggctgagcttggccggactgaacgggtgcggaactgctcaagccctgagttctccaagactctacagcttgagtaccgctttgagacagtccagaagctacgctttggaatctatgacatagacaacaagacgccagagctgagggatgatgacttcctagggggtgctgagtgttccctaggacagattgtgtccagccaggtactgactctccccttgatgctgaagcctg

SEQ ID NO: 178419 - DNA, 1922 bp, Homo sapiens
  Payload ID: 15139
  Gene Symbol:
  Gene Name: RP13-1032I1.10
  ENST ID: ENST00000571730
  CDS Start-End: 132-1460
tttccggctcgaatgcccggcagccgtggcggctagagcgttcctccccagctcgaatgcccggcggccgaggcggctagagcgtcgcctcctcccggggaaccgcgtgtgaccttccagcccgcggaccgatgctgccggcggccgctcgccccctgtgggggccttgccttgggcttcgggccgctgcgttccgccttgccaggcgacaggtgccatgtgtctgtgccgtgcgacatatgaggagcagcggccatcagaggtgtgaggccctcgctggtgcacccctggataacgcccccaaggagtacccccccaagatacagcagctggtccaggacatcgccagcctcactctcttggaaatctcagacctcaacgagctcctgaagaaaacgttgaagatccaggatgtcgggcttgtgccgatgggtggtgtgatgtctggggctgtccctgctgcagcagcccaggaggcggtggaagaagatatccccatagcgaaagaacggacacatttcaccgtccgcctgaccgaggcgaagcccgtggacaaagtgaagctgatcaaggaaatcaagaactacatccaaggcatcaacctcgtccaggcaaagaagctggtggagtccctgccccaggaaatcaaagccaatgtcgccaaagctgaggcggagaagatcaaggcggccctggaggcgacgcagcaggaggtgaagctgcgcatgacgggcatggcgctgcgggtggtgcgtaccgacggcatcctggcactctacagcggcctgagcgcctcgctgtgcagacagatgacctactccctgactcggttcgccatctacgagactgtgcgggaccgtgtggccaagggcagccaggggcctctccccttccacgagaaggtgttgctgggctccgtcagcggtttagctggaggcttcgtggggacgcccgcagacttggtcaacgtcaggatgcagaacgacgtgaagctgccccagggtcagcggcgcaactacgcccatgcgctggatggcctgtaccgcgtagctcgtgaagagggtctcaggagactgttctcgggtgcaaccatggcatccagccgaggggccttagtcactgtgggccagctgtcctgctacgaccaggccaagcagctggtccttagcaccgggtacctctctgacaacatcttcactcactttgtcgccagctttattgcaggtggatgtgccacgttcctgtgccagcccctggatgtgctgaagactcgcctgatgaactccaagggggagtatcagggcgttttccactgcgccgtggagacagcgaagctcgggcctctggccttttacaagggcctcgtcccagctggcatccgcctcatcccccacaccgtgctcacttttgtgtttctggaacagctacgcaaaaactttggcatcaaagtgccatcctgaccagccgtgggaatggctgggctgccaggccagacacgctaggttcttccaaagagtcccaagcccagcacctgctcctggggccacgacctccctggccgtggccacccgtcctccgcagcaggcccctgctgtccccccacctgctggctgagctcctcctggcctcgtcccctctcagctgtagctgcaccacccccgctctggctaccaggctctcccggctgggcactgcgtggccttgcccctctcccgctggcagctcctcaggggaacaggggctaccagaggctgatttctcccctctcctgggccaggggaggggtattatccctgcctcctgcccccgatgcccaaagcagcatcttccagcactttccatcgaggacttgggtggcagagtgtgggtgcagcctggctgttgctcacccaagtgctagctctgcacttcgtgtctgctga

SEQ ID NO: 178420 - DNA, 334 bp, Homo sapiens
  Payload ID: 15140
  Gene Symbol:
  Gene Name: RP1-317E23.6
  ENST ID: ENST00000527604
  CDS Start-End: 1-132
aaggagctggaggaactgcagaacaaccaggagaactcgtcccaccagaagctggctggcctgcacctggagaagtacagcttccccgtggagatgatgatctgcctgcccaatggcaccgtgatggcctgatatgaaggagtcacgcctcccgcctcccggagctgcccagtggctgccttgtccttcaagtgcaggagctggttcaaatgtcaggaatggaagccactgtgaccatcccaatctggcaaaacaagccacatggggctgctcgaagtgtagtaagaagaattgggaccaacctacccttgaagccgtgtgcccgggcgtcctt

SEQ ID NO: 178421 - DNA, 291 bp, Homo sapiens
  Payload ID: 15141
  Gene Symbol:
  Gene Name: RP1-321E8.5
  ENST ID: ENST00000613352
  CDS Start-End: 1-125
aagtcactaaatctcagcccgaaaagtgggatgaagaggcccaagatgctgcaggcgaggaagagaaagaacaagaaaaagagaaggatgcagaaaacaaggtgaagaactccaaagggacctagacgcagcagaggtgaagccaagaaaatccagatgcctgtgggaattgtaacacatatcattccaaagttcgttacatcaaaagtgatatccagtgacatctaactttcatggatgtatgtgacagtgttcaagttaaaaaataaaagtttgttttaaatgaataaa

SEQ ID NO: 178422 - DNA, 4369 bp, Homo sapiens
  Payload ID: 15142
  Gene Symbol:
  Gene Name: RP13-279N23.2
  ENST ID: ENST00000494072
  CDS Start-End: 1-889
gtgggaggaggagctcgccaagcgcatgaaccttcagaccatggtggacacgctgcaggaggcagcacaggaggctgatgccatccaggaggagatgaatgagaagatcgagcggctcaaggccgagctggtggtgtttaaggggcttatgagtgaccccatgacagacctggacacaaagatccaagaaaaggccatgaaggtggacatggacatctgccgccgaatcgatatcacggccaagctgtgcgatgtcgcacagcagcggaactcagaagacgtgtccaagatcttccaggtggtccccaaaaagaaagagcgtaaggtggcttccgatgatgacatctctgagcaggacggggaggtgaaccggttctcggacgatgaggtcggctccatgaacatcaccgatgagatgaagcgcatgtttaaccagctgcgggagacctttgactttgacgacgactgtgacagcctgacgtgggaagagaatgaagacacgctgctgctctgggaggatttcaccaactgcaatccgaccatcgacctgcagggcgagcaagaggaaaacttgggcaacttgatccatgagaccgaatccttcttcaagacgagagacaaggagtaccaggaaacgataggtcagatcgagctcgagctggccacagccaaaagtgacatgaaccgacacctgcacgagtacatggagatgtgcagcatgaagcgaggcctggacgtgcagatggagacctgccgccggctcatcaaaggctccgcagacaggaattcaccgtcccccagctccgtggccagcagcgactcaggaagtacagatgagatccaggatgagttcgagcgcgaggcggatgtggagcccatggtcagctgatgactgaggccctgcgagcctggaccccctgtcggaggtagaggggctggggtctggtggtggggccgctgctgacctctctgcctctgtcccctgcccttgtgttccagcctgcggtggaagcacacctcctccctgaaggtggccaacgagcccgtcttagccttcacgcagggcagccctgagcgagatgccctgcaaaaggccttgaaggacctgaagggccggatggaagccatcccatgcgtggtgggggatgaggaggtgtggacgtcggacgtgcagtaccaagtgtcgccttttaaccatggacataaggtggccaagttctgttatgcagacaagagcctgctcaacaaagccattgaggctgccctggctgcccggaaagagtgggacctgaagcctattgcagaccgggcccagatcttcctgaaggcggcagacatgctgagtgggccgcgcagggctgagatcctcgccaagaccatggtgggacagacatcagctgaagcgcttctgggtcctaagcccttttggggacccagagatgtcctcaagggacaaggcctaggagctgggatggatgatcacagattattaggcgagacagattggtaagaccgtgatccaagcggagattgacgctgcagcggaactcatcgacttcttccggttcaatgccaagtatgcggtggagctggaggggcagcagcccatcagcgtgcccccgagcaccaacagcacggtgtaccggggtctggagggcttcgtggcggccatctcgccctttaacttcactgcaatcggcggcaacctggcgggggcaccggccctgatgggcaacgtggtcctatggaagcccagtgacactgccatgctggccagctatgctgtctaccgcatccttcgggaggctggcctgccccccaacatcatccagtttgtgccagctgatgggcccctatttggggacactgtcaccagctcagagcacctctgtggcatcaacttcacaggcagtgtgcccaccttcaaacacctgtggaagcaggtggcccagaacctggaccggttccacaccttcccacgcctggctggagagtgcggcggaaagaacttccacttcgtgcaccgctcggccgacgtggagagcgtggtgagcgggaccctccgctcagccttcgagtacggtggccagaagtgttccgcgtgctcgcgtctctacgtgccgcactcgctgtggccgcagatcaaagggcggctgctggaggagcacagtcggatcaaagtgggcgaccctgcagaggattttgggaccttcttctctgcagtgattgatgccaagtcctttgcccgtatcaagaagtggctggagcacgcacgctcctcacccagcctcaccatcctggccgggggcaagtgtgatgactccgtgggctactttgtggagccctgcatcgtggagagcaaggaccctcaggagcccatcatgaaggaggagatcttcgggcctgtactgtctgtgtacgtctacccggatgacaagtacaaggagacgctgcagctggttgacagcaccaccagctatggcctcacgggggcagtgttctcccaggataaggacgtcgtgcaggaggccacaaaggtgctgaggaatgctgccggcaacttctacatcaacgacaagtccactggctcgatagtgggccagcagccctttgggggggcccgagcctctgtgaggcaggactacctcctgagaccatcacttcccagccatggggcccagggcaaagaccatctcctccctgttcttcctcctatgggtcctggctgagccggctgagaactcggacttctacctgcctggggattacctcctgggtggcctcttctccctccatgccaacatgaagggcattgttcaccttaacttcctgcaggtgcccatgtgcaaggagtgatgttggtgatgatggtgatggtagtgatgatggtgttggtggtgatgatagtgatgctgaagatggtgctgatggtggtgatggtgttggtgatgatggcgatggtagtgatgctggtgatggtgttagtgatggtgttggtgatggtggtgatcgtagtgatgctgatgatggtgataggctacaacctcatgcaggccatgcgctttgcggtggaggagatcaacaatgacagcagcctgctgcctggtgtgctgctgggctatgagatcgtggatgtgtgctacatctccaacaatgtccagccggtgctctacttcctggcacacgaggacaacctccttcccatccaagaggactacagtaactacatttcccgtgtggtggctgtcattggccctgacaactccgagtctgtcatgactgtggccaacttcctctccctatttctccttccacagatcacctacagcgccatcagcgatgagctgcgagacaaggtgcgcttcccggctttgctgcgtaccacacccagcgccgaccaccacatcgaggccatggtgcagctgatgctgcacttccgctggaactggatcattgtgctggtgagcagcgacacctatggccgcgacaatggccagctgcttggcgagcgcgtggcccggcgcgacatctgcatcgccttccaggagacgctgcccacactgcagcccaaccagaacatgacgtcagaggagcgccagcgcctggtgaccattgtggacaagctgcagcagagcacagcgcgcgtcgtggtcgtgttctcgcccgacctgaccctgtaccacttcttcaatgaggtgctgcgccagaacttcactggcgccgtgtggatcgcctccgagtcctgggccatcgacccggtcctgcacaacctcacggagctgcgccacttgggcaccttcctgggcatcaccatccagagcgtgcccatcccgggcttcagtgagttccgcgagtggggcccacaggctgggccgccacccctcagcaggaccagccagagctatacctgcaaccaggagtgcgacaactgcctgaacgccaccttgtccttcaacaccattctcaggctctctggggagcgtgtcgtctacagcgtgtactctgcggtctatgctgtggcccatgccctgcacagcctcctcggctgtgacaaaagcacctgcaccaagagggtggtctacccctggcagctgcttgaggagatctggaaggtcaacttcactctcctggaccaccaaatcttcttcgacccgcaaggggacgtggctctgcacttggagattgtccagtggcaatgggaccggagccagaatcccttccagagcgtcgcctcctactaccccctgcagcgacagctgaagaacatccaagacatctcctggcacaccatcaacaacacggtcagccagggggcctggtgggtgggcaggcctggggcggggcctggggcccttgctggagtggctag

SEQ ID NO: 178423 - DNA, 1147 bp, Homo sapiens
  Payload ID: 15143
  Gene Symbol:
  Gene Name: RP13-347D8.7
  ENST ID: ENST00000620151
  CDS Start-End: 1-975
atgtctgccacaggggatcaagacctgatccaagaggaccaggaggctccagtgaaccaggagggagcgcaggccgaggccgtaggtgaccgggagggcggtgactctggccccgacagtggcaacactgtggccggagtcgcagggcccatgagaggcctcggggaggaggagggtgagcaggcggcaggcttggccgcagcccccgggggtgggaacgccgaggaagactcagagatcaggatagtagtggagatggtggaggaggaggaggatgaggaggaggaagaggaggaggaggaggaagagaggaacgaggcggacaacttcgacttggtcgcggccgcccgtcgctaccccataagaggctttcgcatggagtttctggacatggtccactcccttctcctccgcatctatcacaacgaccacatcctgatcaggatgcgtggcggccgcctgatgcggaggcgccgcactgcggcgcccagtggctcagaagagccccggctgttgctggtgcatgagaggctgggcgtgggggccgcgggtcctgagggcgagggcctgggcctgctccaggaggccgcgttggtcccagagcctgaggtgccagcagacctggccgagatggccagggagcctgcagaagagcccgcagaggaggcctcagagaagcccacagaggaggccgcagaagagcccgcagaggaggcctcagagaagcccacagaggaggccgcagaggaggagctcgcagaggaggccgcagaggaaccggccaaagaggaaccggctgcagaggaggagtccgcagaggaaccggccacagaggaggctgctgcccctgaggaagtcactaaatatcagcatgaaaagtgggatgaagaggcccaagatgctgcaggcaaggaagagaaagaagagaaagagaaggatgctgaaaacaaggtgaagaactccaaagggacctagacgcagcagaggggaagctgagaaaatccagatgcctgtgagaattttaacacatatcattccaaagttcattaccttaaaagtgatatctagtgacatctaacttttatctttcacaaatgtatttgacagtgtttgttcaagttagaaataaaagtttgttttaaatgaa

SEQ ID NO: 178424 - DNA, 948 bp, Homo sapiens
  Payload ID: 15144
  Gene Symbol:
  Gene Name: RP1-34B20.21
  ENST ID: ENST00000635200
  CDS Start-End: 51-560
acttttacatttttgtcttcattgcttaacatcgtttttaagaattcaaaatgtccggacgcggcaagcaaggcggaaaggcccgagctaaggctaagacccgctcttcgcgggccggactccagttccctgtgggccgcgtacaccgcttgctccgcaagggcaactactccgagcgagtcggggccggcgcgccagtgtatctggcggcggtgttggagtacctgaccgccgagatcctggagctggcgggcaacgccgcccgcgacaacaagaagacccgcatcatcccccgacacctgcagctggccatccgcaacgacgaggagctaaacaagttgctgggtaaagtcacaattgctcagggcggtgttctgcccaacatccaggctgtactgctccccaagaagactgagagtcaccacaaggccaaggggtttagaagttcgcaatggctcgtaccaagcagactgctcgcaagtccacgggtgggaaagcgccacgcaagcagctggccaccaaggctgctcgaaagagcgctccagccaccggcggcgtgaagaagccccaccgttaccggcccggcacggtggctctgcgcgagatccgccgctaccagaagtcgaccgagctgctgattcgcaaactgccattccagcgtctagtccgtgagatcgcgcaggacttcaagactgatctgcgttttcagagctcggcggtgatggcgctgcaggaggcctgcgaggcctacctggtggggctgtttgaggacaccaacctatgcgccattcacgccaagcgagtgactatcatgcccaaggacatccagcttgctcgccgcattcgtggggagagggcgtaaattgtcttgtgaatgtgtgctaaccaaaacccaaaggctcttttcagagccaaccaccttttctataaaagttgctgtttactgtt

SEQ ID NO: 178425 - DNA, 1637 bp, Homo sapiens
  Payload ID: 15144
  Gene Symbol:
  Gene Name: RP1-34B20.21
  ENST ID: ENST00000635641
  CDS Start-End: 51-563
acttttacatttttgtcttcattgcttaacatcgtttttaagaattcaaaatgtccggacgcggcaagcaaggcggaaaggcccgagctaaggctaagacccgctcttcgcgggccggactccagttccctgtgggccgcgtacaccgcttgctccgcaagggcaactactccgagcgagtcggggccggcgcgccagtgtatctggcggcggtgttggagtacctgaccgccgagatcctggagctggcgggcaacgccgcccgcgacaacaagaagacccgcatcatcccccgacacctgcagctggccatccgcaacgacgaggagctaaacaagttgctgggtaaagtcacaattgctcagggcggtgttctgcccaacatccaggctgtactgctccccaagaagactgagagtcaccacaaggccaaggcagggtttagaagttcgcaatggctcgtaccaagcagactgctcgcaagtccacgggtgggaaagcgccacgcaagcagctggccaccaaggctgctcgaaagagcgctccagccaccggcggcgtgaagaagccccaccgttaccggcccggcacggtggctctgcgcgagatccgccgctaccagaagtcgaccgagctgctgattcgcaaactgccattccagcgtctagtccgtgagatcgcgcaggacttcaagactgatctgcgttttcagagctcggcggtgatggcgctgcaggaggcctgcgaggcctacctggtggggctgtttgaggacaccaacctatgcgccattcacgccaagcgagtgactatcatgcccaaggacatccagcttgctcgccgcattcgtggggagagggcgtaaattgtcttgtgaatgtgtgctaaccaaaacccaaaggctcttttcagagccaaccaccttttctataaaagttgctgtttactgttgctgtccgtaaactggaacctctgttcactcaagggacgaggtctcactgtgttacccaggctggcctcaaaactccttagcttggccaggcgaggtggctcaggcctgtaatcacagcactttaggatgccaaggcgggcggatcacgtgatgccaagagttcgagaccagcctgcccaacacattgaaacttcgtctctactgagaatacaaaaattagccgggtgtggtggcacacgcctgcagtcccagctacatggaaagctgaggcaggagaagggcttgaacccgggaggcggaagttgcagtgaaccgagatcacaccactgcactccagcctgggcagcagagctagactccttcaaaaaaaaaaaaaaaatccccaaggacaaacaaaaccaccaaaaacaactccttagcttaagagattctcccgccttggcctcacaaaatgctgagattacaaacgtaggccaccgcgaccggcaagggccgatcttcatatcgtagccgccaacacctacttgagcgcggccacagagaaggccgctgcgcttcttggagacggctaagtcattagtgatgaactcacataccggaggggcctggacatcttgcacttcactgcaacttcggacttgcaacctttttctttacttcagtctttgacttgggagatagacca

SEQ ID NO: 178426 - DNA, 421 bp, Homo sapiens
  Payload ID: 15145
  Gene Symbol:
  Gene Name: RP13-512J5.1
  ENST ID: ENST00000438485
  CDS Start-End: 1-105
cttacccaggggatggacattcagtggatgcatgttcctggtcattcgggatttataggcaatgaagaagctgacagattagccagagaaggagcatcattataaactgctgatctactgtttctttgtcaaacgggaggagataacatgagggtcatgagaaatgtttgcagacggagtgaatgccttgaaagtgctgcgaccaggtgctgacacccggaggtctggctgctcaaagtgttagctgacacggaagacacacggactttccctccattccccaaaactccccttccctgactcgtcagctgcataaaaaccctctccttatctctttgtcaaggggatttgagaaatcttgctgtcttgtcttcttgctttggccaaatggaataaacctttctctgtctccagacaccta

SEQ ID NO: 178427 - DNA, 2897 bp, Homo sapiens
  Payload ID: 15146
  Gene Symbol:
  Gene Name: RP13-582O9.6
  ENST ID: ENST00000522452
  CDS Start-End: 792-1391
gggaggtcctcgtcgcctctcgtctccagccaggtactcactgggctcctgcctgccgcctccggcccaggacgcgcagcgtcggtatgggccccgccgcctccccgcaccccggcgctccagggatgtggcaagacccggctttgagcacctcccgggcgccggccccgaggccgacctagctctgcacgtgggccgcggggctctgccgttgaaaggagagcctctaactaggagcacgcacgggaccctggcgggcccctccgcctggctcagatgcctggcatctcaggccttggcacagctagcaggcccctggcaggccgtggacccagcaggctgttttagtgcagattgcccctgaatctcaagcccactaatgttccagtctctccatgagacccagatccctgaaagtagtggagggaggcgccagggtgagtgaggttttctaggcagcccttaccgcccacggatacccagagcttcatattacaagtgaagggtcctccgcccagagaggcgacggagctacgctggagttgcacgacagaaccagaaccccagtctttaggggtgtggcaagcgtgggttgcgctgtttgtaactagctaatcactcctgtctacaggcctgtgagcaccaagaggatggtggcccttggcctcctggtgcagagcatcagtcccacgctgggagtgtggagaggtgcgtgggaagcaagccattgaggaagtggggccaacagagaggtcagcagccccttagccctcacgcttccaaggaacagaatgatggagaagcctgcaggcagaaaaaagaagacgccgaccccaagggaggaggcagacgtgcagaagagtgcgctcagagaggagaaggtgtccggggacagaaagccacctgagaggcccactgtgcccaggaagccccgcacagagccctgcctgagtcctgaagacgaagagcacgtctttgatgccttcgacgcttcatttaaagatgactttgagggggttcccgtgttcattccttttcagaggaagaaaccctatgagtgcagtgagtgtgggcggatctttaagcacaagacagaccacattcgccatcagagggtccacactggagagaagcccttcaagtgtgcgcagtgcgggaaggccttccggcacagctctgacgtcaccaaacaccagaggactcacacgggagagaagcccttcaaatgcggggagtgcgggaaagcctttaactgcggctccaatctcctgaaacatcagaagacgcacaccggggagaagccctacgaatgcacgcactgtgggaaagcctttgcctacagctcctgtctcatccgccatcagaaacgccaccctcggaagaagccctgagccggggccatctgcggactcgggccctgcggtgcgagcctcgccggacacctgctccgtggctccctcgtgtcccgcgtctgatgggggcgcagggccgtgcgcactgtgttccgtgccctggggacccccggaaaagcagcccagtcagatgtgggaacgtgccagcgagggagagacctttccactgcagagagtctctctgatcaagacaccgcagtgatggagaagccaccagaggctccttgcagccacagagcattttccaagttcccgatggcgaacggggctcagcaccagagaccagggagtattcactgccatccattggacgtgtttgggtcacctcagagcacccagcaggagaggctcctggtgtagtgggcagcccagcacttcccgctgctgcctgcctgtgatgtccactctgcttaagcctttcatctgccgctgaaggccccagtctggactctctgccctctgggtccccgagctctgcagcgagccctgggaccactcatccctgcccagccagcttcagtgcccggggccgcttgtccctgcccggcctctgtgccccaactgtgcttggtcctctggcttctctcctcctgctggagtgccagtccctgagctcagacccccgtccccggaactgggccacaccacgtgccctcttggcccagccttcctcccagagaggcggcctgacttacctggatggacttgggacaaaggttcctcaggaccttggacaccaccacctgctgagcttcccgtcccagccatgcagtggggcccctggggtgccctcggcagcttcggtccagcctgcatctgcccctcggccttccgacgtgggcggtgggccccagccccacagaccagcccagcattcaggctcccctggctccagccctaaggtgctctcccagccgtccgacctggatctccaagacgtagaggaagtggagatcggcagagacaccttctggcccgactccgagcccaagccggagcaggctccacgctctcctggctctcaggcccctgacgagggggcgggcggggcgctgcgcagcctcctgaggagccttccccgcagggcccggtgcagcgccggcttcgggcctgaatccagcgcggagcggccggcgggccagccgcctggggccgtcccttgcgcccagccgcggggcgcctggcgcgtgacgctcgtgcagcaagcagcggccgggcccgagggtgcgcccgagcgggctgccgagctgggagtcaacttcggtcggagccggcagggcagcgcgcggggggccaagccgcacaggtgcgaggcctgcggcaagagtttcaagtataactcgctgctcctgaagcaccagcgcatccacacgggcgagaagccctacgcctgccacgagtgcggcaagcgcttccgcggctggtcgggcttcatccagcaccaccgcatccacacgggcgagaagccctacgagtgcggccagt

SEQ ID NO: 178428 - DNA, 567 bp, Homo sapiens
  Payload ID: 15147
  Gene Symbol:
  Gene Name: RP13-672B3.2
  ENST ID: ENST00000537262
  CDS Start-End: 204-567
aggttccacccaaggacccaacaggggccccgcgcgcccggggaagccacggcaaggggagcgggtccgcaggcgcgggtgaagacagggcgaggggagcggtggcattttgtcagcacttgggaacttcctggcccagatgattgagaagaagcggaaaaaagaaaactctagaagtctggatgtcggtgggcctctgagatatgccgtttacgggggaaagacgcctcagccttcgccgccaagatgagggggggcttctggccggcgctgaggatgaactggcgggtgtggacgccactacagttcatcaacatcaactacgtccctctgaagttccgggtgctcttcgccaacctggcagctctgttctggtatgcctacctggcctccttggggaagtgacgaccgctgggagaacatcaggtgcactgtggacgtgggtctgggggtctcacccgcccagcgagagcagaaccaatccagtcaggatgtcactgactctaaatcaggcgagaaccactgtctctgatcaacgtgcggaagaggaacgtggaatctggggaa

SEQ ID NO: 178429 - DNA, 4904 bp, Homo sapiens
  Payload ID: 15148
  Gene Symbol:
  Gene Name: RP1-37E16.12
  ENST ID: ENST00000455236
  CDS Start-End: 1-621
aagcgagatggtgacgaccggcggccgaggctcgttcttagcttcgacgaggagaagaggcgggagtacctgacaggcttccacaagcggaaggtcgagcgaaagaaggcagccattgaggagattaagcagcggctgaaagaggagcagaggaagcttcgggaggagcgccaccaggaatacttgaagatgctggcagagagagaagaggctctggaggaggcagatgagctggaccggttggtgacagcaaagacggagtcggtgcagtatgaccaccccaaccacacagtcaccgtgaccaccatcagtgacctggacctctcgggggcccggctgctcgggctgaccccacctgagggaggggctggagacaggtctgaggaggaggcgtcatccacggagaaaccaaccaaagccttgcccaggaagtccagagaccccctgctctctcagcggatctcctccctcacagcatcactacatgcacacagccgcaaaaaggtcaagaggaaacatccccgacgggcccaggactccaaaaagcccccaagggcccctcgtaccagcaaggcccagcgccgccgtctcacaggcaaagcacggcacagcggggagtgagaccgagaacgaagcggtgccccagtctaggctgcggggacctgtccttgctcagcttggctgtccctgtagcccagcctgcacctaggtgtgcctaccgcatgttgccgctgctgtttctgctgggacgtctgactccagttccttctcccctctccagtgacaaggtctgatgatggaggagccttggccctggctgtcccaggggaggaggtgaaattcctcagctctccaccaagattggccacaaaagcctgatcccctggaacacagcaggcctcacatagacggtcagccattggatcataggaactgccctggcctgactcacccaatatggaggaggtgcctggggatgccctgtgtgaacactttgaggccaacatacttacccagaaccgctgtcaaaactgcttccaccctgaggaggcccatggagcaagataccaggagctcaggagcccttcaggtgctgaggtgccctactgcgacctgcctcgatgtccacctgcccctgaggacccactcagcgcctcaacctccggctgccagtctgtggtggacccaggcctcaggccagggcccaagaggggcccatccccctcagcagggctcccagaagagggtcccacagctgcccccaggagcaggagccgggagcttgaggcagtaccctatctggagggcctgaccacttccttgtgtggcagctgcaacgaggaccccggctctgaccccacctccagccctgactccgccacccctgatgataccagcaactcgtcctctgtggactgggacactgttgagaggcaggaggaggaggcccccagctgggacgagctcgcagtgatgatcccgaggaggcctcgggaggggccgagagctgacagctcccaaagggctccgtctctcctcaccaggtcccctgtgggaggagatgctgcaggccagaaaaaggaggacaccggcggtgggggccggagcgcaggacagcactgggcaaggctccggggagaaagcgggttgtccctggagcggcaccggtcaacactgacccaggcttcctccatgacaccacacagtggacctcgaagcaccacgtctcaggcttctcctgcccaaagggacactgctcaggctgcctctacacgtgaaatccccagagcctcctctccccatcgaatcacccaaagggacacctccagggcctcatccacccaacaggaaatctccagggcctcatccacccaacaggaaacctccagggcctcatccacccaagaggacacccctagggcctcatccacccaagaggacacccccagggcctcatctacacagtggaacacccccagagcttcctctccctcacgaagcacccaactggataaccccagaacctcttctacccagcaggacaacccccaaacttcttttcctacttgtactccccagcgggaaaaccccaggacaccctgtgtccagcaggacgatcccagagcctcctctcccaacagaaccactcaacgagagaattccagaacatcctgtgcccagcgggacaatcccaaagcctccagaacctcctctcccaatagagccacacgagacaaccccagaacatcctgcgcccagcgggacaatcccagagcctcctctcccagtagagctacacgagacaaccccacaacatcctgtgcccagcgggacaatcccagagcctccagaacctcctctcccaatagagccacacgagacaaccccagaacatcctgtgcccagcgggacaatcccagagcctcctctcccagtagagctacacgagacaaccccacaacatcctgtgcccagcgggacaatcccagagcctccagaacctcctctcccaatagagccacacgagacaaccccagaacatcctgcgcccagcgggacaatcccagagcctcctctcccaatagagctgcacgagacaaccccacaacatcctgtgcccagcgggacaatcccagagcctccagaacctcctctcccaatagagccacacgagacaaccccagaacatcctgtgcccagcgggacaatcccagagcctcctctcccaatagagctacacgagacaaccccacaacatcctgtgcccagcgggacaatcccagagcctccagaacctcctctcccaatagagccacacgagataaccccagaacatcctgtgcccagcgggacaatcccagagcctcctctcccaacagaaccacccaacaagacagccccagaacatcctgtgcccgacgggacgatcccagagcctcctctcctaacagaaccatccaacaagagaaccccagaacatcctgtgccctacgggacaatcccagagcctcctctcccagcagaaccatccaacaagagaaccccagaacatcctgtgcccaacgggacgatcccagagcctcctctcctaacagaaccacccaacaagagaaccccagaacatcctgtgcccgacgggacaatcccagagcctcctctcgcaacagaaccatccagcgagacaaccccagaacatcctgtgcccagcgggacaatcccagagcctcctctcctaacagaaccatccaacaagagaacctcagaacatcctgtacccgacaggacaatcccaggacctcctctcccaatagagccacacgagacaaccccagaacatcctgtgcccagcgggacaatctcagagcctcctctcccatcagagccacccaacaggacaaccccagaacttgtattcaacagaacatccccagatcatcttctacccaacaagacaaccctaaaacctcttgtaccaaacgagataacctcagacccacttgtacacagcgggaccgcacacagtccttttcctttcaacgagacaaccctggaacctcctcatctcaatgctgcacccaaaaggagaatctgagaccatcatctccccaccgctccactcaatggaacaatcccaggaattcatctccccatcgtactaacaaagacatcccctgggcctcgtttcccctccggccaactcagagtgatggtccccgaacctcttccccatctcgctccaagcaaagcgaggttccctgggcatccatcgccctccggccaacccaaggtgacaggcctcagacatcctctcccagcaggccagcccagcatgacccaccccagtcctcctttggccccacccagtacaacttgccatcccgggccacctcttcctcccataacccaggccaccagagcacctcccgaacttcctcacctgtgtaccccgctgcctatggggctcccctgacctctcctgagccctcccagcctccatgtgctgtgtgcattgggcaccgggatgcccctcgagcctcttcgccccctcgctatttgcagcacgaccccttccccttcttcccagagccccgcgcccctgagagtgaaccgccccaccacgagcctccctatataccacctgctgtgtgcattggacaccgagatgccccccgggcgtcctcgcccccccgccacacccaatttgaccccttccccttcctcccagacacatcagatgccgagcatcagtgtcagtccccccaacacgagccccttcagctccctgcacctgtgtgtattgggtaccgagatgcaccccgggcctcctccccaccacgccaggccccagagccttccctcttattccaggacctccccagggccagcacagagagccttgtcccttccatggactctctgcacgagtgcccccacatccccacccctgtgtgcattgggcaccgggatgcaccctccttctcatccccaccacgccaggctcctgagccatccctcttcttccaggatccccctggaactagtatggagagcctggccccctccactgactctctgcatggctccccagtgctgatcccccaagtgtgcatcgggcaccgggatgcaccccgagcctcctccccaccccgccacccacccagtgacctagcgttcctggcaccctcaccttcaccgggcagctctgggggctcccggggctcagcgcctcccggggagaccaggcacaacttggagcgggaggagtacactgtgctggccgacctgcccccacccaggaggctggcccagagacagccagggccccaggcgcagtgcagcagcgggggccgcacccacagccctggccgtgcagaggtggagcgcctcttcgggcaagagcgcag

SEQ ID NO: 178430 - DNA, 489 bp, Homo sapiens
  Payload ID: 15149
  Gene Symbol:
  Gene Name: RP1-4G17.5
  ENST ID: ENST00000577138
  CDS Start-End: 47-298
gtagggtctccccgcccggcgcccccagtgttttctgagggcggaaatggccaattcgggcctgcagttgctgggcttctccatggccctgctgggctgggtgggtctggtggcctgcaccgccatcccgcagtggcagatgagctcctatgcgggtgacaacatcatcacggcccaggccatgtacaaggggctgtggatggactgcgtcacgcagagcacggggatgatgagctgcaaaatgtacgactcggtgctcgccctgtccggtaattcagtaccaaactgttcgatatgatatcctccccttatctcctgtgtcccggaatcggctagcccaggtgaagaggaagatcctggtgctggatctggatgagacacttattcactcccaccatgatggggtcctgaggcccacagtccggcctggtacgcctcctgacttcatcctcaaggtggtaatagacaaacatcctgtccggttttttg

SEQ ID NO: 178431 - DNA, 582 bp, Homo sapiens
  Payload ID: 15150
  Gene Symbol:
  Gene Name: RP1-66C13.4
  ENST ID: ENST00000582441
  CDS Start-End: 68-547
gcactcgtcgccgcggcggcgtccggggctggcgttcccctggaggctgggacagagggtctcacggatggccccgctgccaggagcagaactggttcggaggccactgcagctctaccgatacttgctgcgctgttgccagcagctgccgaccaagggcatccagcagcattacaagcatgctgtcaggcagagttttcgggttcattcagatgaagacaaccctgagagaatccagcagattattaaaagagccattgaagatgctgactggatcatgaacaaaaattcacctgctgcatccatcatcagaagaggccaggaatgcggcctgctgggtgggcagggccaagaagaaggcagccgtgcaggcccaggaagccgtaggagacttgccaacctccaggagggggccagccctggaccctgcagacaggcgctctggggagggtaccagaagctcactgtttgtcccggcttgaaggctgtttgctgtgtgaccttgccccacagtgaagaacatctgagctcaaatccagataagtgacataagtgacctgctttgtaaagccatagagatgg

SEQ ID NO: 178432 - DNA, 654 bp, Homo sapiens
  Payload ID: 15151
  Gene Symbol:
  Gene Name: RP3-369A17.6
  ENST ID: ENST00000562221
  CDS Start-End: 1-183
agcattaaaatgctggtgacattgtgtcaatctgatactgaagaaatcagaaatgtggcctcagaaaccctcttgtctctgggagaagatgggcggctggcatatgaacaattggacaaatttcctcgagactgtgttaaagtcggaggtcgtcatggaactgaagttgccacagccttttaattacaggaggaccacctgctgggaactttgcagctgagtacatggaagaagtggctcacttgttgcaagatgaggagttggcaccaaaaataaagatcctgctgctccagagtgtggcatgttggtgttacttaaaccctgtcagccagaaaagagccaaaagtctgcaatttattcctattctcattagtttttttgaaggcagattcgagtctactatcaaaagtgaaacaaacagctacctcctccttaaattttggacttgttacgttctctctgtcatgacatgcaataacttgtcttgcgtcaaggagcttaaagaccacagtgctctaaaatatcatttgcaaatgttggctgctgagaattggtctggatggacagagaattttgcagaggtgctgtatttcctaattggttttcataggaattagtttctctaaatccagttacatgttgcagctctctgtg

SEQ ID NO: 178433 - DNA, 958 bp, Homo sapiens
  Payload ID: 15152
  Gene Symbol:
  Gene Name: RP3-461F17.3
  ENST ID: ENST00000261406
  CDS Start-End: 1-654
ggattcaagcctcgtgaacgaagcggtggggagcaggcacaggactgggatgctctgccacccaagcggccccgactaggggcaggaaacaagatcggaggccgtaggcttattgtggtgctggaaggggccagtctggagacagtcaaggtagggaagacatatgagctactcaactgtgacaagcacaagtctatattgttgaagaatggacgggaccctggggaagcgcggccagatatcacccaccagagtttgctgatgctgatggatagtcccctgaaccgagctggcttgctacaggtttatatccatacacagaagaatgttctgattgaagtgaatccccagacccgaattcccagaacctttgaccgcttttgtggcctcatggttcaacttttacacaagctcagtgttcgagcagctgatggcccccagaagcttttgaaggtaattaagaatccagtatcagatcactttccagttggatgtatgaaagttggcacttctttttccatcccggttgtcagtgatgtgcgtgagctggtgcccagcagtgatcctattgtttttgtggtaggggcctttgcccatggcaagagatgcgacttgctctgttgtccagacttgagtgcagtagctcaatcatagctcactgcagccttgaattccgggctaccacacccagcttgttactgtatttttgaatgtctgaagtgaagaatgaatctaagtggggactgcttggctcggtcattcagttacatccacagcacagagaaactgaggattctttgttgatgaggtgtctggatcgtatctattccagagtaaagtcatgatggctttatgacgttctgaggtgcgttttgcaggaggggacgttgttgagttccaaacaggtgaggtattgcacactagcaaacacatgagaagaaggcggaggaattgggag

SEQ ID NO: 178434 - DNA, 1087 bp, Homo sapiens
  Payload ID: 15152
  Gene Symbol:
  Gene Name: RP3-461F17.3
  ENST ID: ENST00000607161
  CDS Start-End: 1-672
aagatggccgcgcccagtgatggattcaagcctcgtgaacgaagcggtggggagcaggcacaggactgggatgctctgccacccaagcggccccgactaggggcaggaaacaagatcggaggccgtaggcttattgtggtgctggaaggggccagtctggagacagtcaaggtagggaagacatatgagctactcaactgtgacaagcacaagtctatattgttgaagaatggacgggaccctggggaagcgcggccagatatcacccaccagagtttgctgatgctgatggatagtcccctgaaccgagctggcttgctacaggtttatatccatacacagaagaatgttctgattgaagtgaatccccagacccgaattcccagaacctttgaccgcttttgtggcctcatggttcaacttttacacaagctcagtgttcgagcagctgatggcccccagaagcttttgaaggtaattaagaatccagtatcagatcactttccagttggatgtatgaaagttggcacttctttttccatcccggttgtcagtgatgtgcgtgagctggtgcccagcagtgatcctattgtttttgtggtaggggcctttgcccatggcaaggtgtctggatcgtatctattccagagtaaagtcatgatggctttatgacgttctgaggtgcgttttgcaggaggggacgttgttgagttccaaacaggtgaggtattgcacactagcaaacacatgagaagaaggcggaggaattgggagaaaaataaaaagaatgcagcaggccaggttagcaggaacgttaagacggtgacggagaacagcaaagcctggaagcaagccgccgtggagaaggaagaactgtgctgagtacttcactctgttgcccaggctggagtgcagcggcacaatcacagctcactgcagtttcaacttcctgggttcaagtgatcctcctgcctgagcctcccaagtagctaggactataggtatgtgccgccatgcccccaaaacaacagcaaattatgtgtgtgtgtgtgtgtgtgtgtgtgtgtgtgtgtgtgtgtgtgtgtgt

SEQ ID NO: 178435 - DNA, 762 bp, Homo sapiens
  Payload ID: 15153
  Gene Symbol:
  Gene Name: RP3-468K18.5
  ENST ID: ENST00000545614
  CDS Start-End: 1-58
cacagaaatggaagttcatgaagagagtcgacagtttacaaggtttcatcgtccataacgaagagtgagactatttggaaacagagactgatcatctttgggggaagccctgcttcctgaaaacctgatattgcactgggatttgaatgtgtgtgtttccgtttaacttgtggtgaaggaagtgtgtgactcagcttggctgggaagtgctcctcacctgtgtggcccagatggctccaacaagcaaaaggaaggatgcagtgactcttgctgcccagaatgcacagcgatggacaaggtcaaagatgtaaggggaaacttgaaagcaacgtgcttgctggtatcctagacagaagaccggaggattggaaccaaaaaattaaaaacaaacagattctcatgaagtgaacctgatttgaagcaaagctcgtgccccctgacgcatcctagatactgaaggtcctgtttcaggaaacgatcgtcctgaagtacaatgcagtgaggtgaataactacattcagctgagaaaacgacagtagctcacgttcatcaaatgcttactagaagccaagcacaggtccaagtacttcatacccatcctctcatttaatccaacaacaactctggaagcctcacaggaagaaaaagccctttatagagaagaagaaagctgtgtcttttcacttggtccaccggagccaacgagatcctttagcagcagatgagagtgcaccccagagggttctattgcccacacaaaaa

SEQ ID NO: 178436 - DNA, 1496 bp, Homo sapiens
  Payload ID: 15154
  Gene Symbol:
  Gene Name: RP3-468K18.7
  ENST ID: ENST00000454207
  CDS Start-End: 117-539
ttgatcctgacattgttgcagctcttgatgatgattttgactttgatgatccagataatctgcttgaggatgactttattcttcaggccaataaggcaacaggagaggaagagggaatggatatacagaaatctgagaatgaagatgacagcgagtgggaagatgtggatgatgagaagggagatagcaatgatgactatgactctgcaggcctattgtcagatgaagactgtatgtctgtgcccggaaaaactcacagagctatagcagatcacttgttctggagtgaggaaacaaagagtcgcttcacggagtattcgatgacttcctcagtcatgaggagaaatgaacagctgaccctacatgatgagaggtttgagaagttttatgagcaatatgatgatgatgaaattggagctctggataatgcagaattggaaggttctattcaagtggacagcaatcgcttacaggaagttttgaatgactactataaagagaaggcagagaaatggcaatcaggaattgtttccctgtgaagtctgtggaagacgttttgcagcagatgttctggaaaggcatggaccaatatgtaagaaactcttcaacagaaagcgtaaacctttcagttctttgaagcaaagattacagggcactgacattcctactgtgaagaagactccacaatccaagtctccacctgtgaggaagtctaactggagacaacaacatgaagactttattaatgcaatccgatcagcaaagcagtgtatgctagccattaaagaaggccgacccctcccacctccaccccctccatccttgaacccagattatattcaacgtccatattgtatgagaaggtttaatgaaagcgcagctgagcgacatactaatttctgcaaggatcagtcttctcgccgagtctttaatccagctcagacagcagccaaattggcatccagagctcagggtagggctcagatgggtccaaaaaaagaaccaactgttaccagtgctgtgggagctttgctgcagaacagggtcctggtggccacgaatgaagtcccaaccaagtcaggattagctatggaccctgcttctggagcaaaactcagacaaggatttagtaaatcttctaaaaaagattaactcctagaagccagactgcctccctgaaacccatcagcctggatggttgcgtacccgagaatgccacctaaggggaaggaacggtagatgtgatgtctgtttttacacccttgattcttcttgaagcatcacttagaacaagtaaaacttgcttcagatttttatttactccctttgaagttttcaaaacaaaagcattaaacacatcaacctgtataatgcatgattcaaattcacttgaagtttaattggacatttgatgggtttttaaagacaatgttgctttgatattagaacctttttagtagactagtaattggaatactaacattatttacttacta

SEQ ID NO: 178437 - DNA, 694 bp, Homo sapiens
  Payload ID: 15155
  Gene Symbol:
  Gene Name: RP4-539M6.19
  ENST ID: ENST00000439023
  CDS Start-End: 1-434
ctgtggaggcctatggagagtttctctgcatgtttgaggaaaattatcccgaaacactgaagcgtctttttgttgttaaagcccccaaactgtttcctgtggcctataacctcatcaaacccttcctgagtgaggacactcgtaagaagatcatggtcctgggaggtcggtggatttcctcctggactccagcctgcgcaagctctacccaacagtggggaagcccagctcctcctgatcatactctggtacctggcctgtgcatcggcctcctgcttcatgtcaacctcctactcctgccagggaatgtggacacctggctccctggtgtccaaagaccctggcacctgggtgggtttgagctggacagaagcttagagacaaaggcttcaagaagcagtggctgcagggagtcacagaagggcaggacctgaacgctgtctgcttccctggaatccaagatgctgagtggaagtggaccctgggtgggcccggccctgtctttttcaggaaaattacatcctcccatggaggatgagagactgaggctcagggagggcaaggaataggcccaagatcacttggcaagctgggcacccaggacccccaggtgcttgacagagtcaccccatggtggtatggctgaacaaggagcggcagacaactcagggagaaactcaggagtgcagtacca

SEQ ID NO: 178438 - DNA, 1470 bp, Homo sapiens
  Payload ID: 15155
  Gene Symbol:
  Gene Name: RP4-539M6.19
  ENST ID: ENST00000439838
  CDS Start-End: 1-1017
gctgtggaggcctatggagagtttctctgcatgtttgaggaaaattatcccgaaacactgaagcgtctttttgttgttaaagcccccaaactgtttcctgtggcctataacctcatcaaacccttcctgagtgaggacactcgtaagaagatcatggtcctgggagcaaattggaaggaggttttactgaaacatatcagccctgaccaggtgcctgtggagtatgggggcaccatgactgaccctgatggaaaccccaagtgcaaatccaagatcaactacgggggtgacatccccaggaagtattatgtgcgagaccaggtgaaacagcagtatgaacacagcgtgcagatttcccgtggctcctcccaccaagtggagtatgagatcctcttccctggctgtgtcctcaggtggcagtttatgtcagatggagcggatgttggttttgggattttcctgaagaccaagatgggagagaggcagcgggcaggggagatgacagaggtgctgcccaaccagaggtacaactcccacctggtccctgaagatgggaccctcacctgcagtgatcctggcatctgctatgccaatgaggtgggcgaggctttccgctctcttgtgccagcggcggtggtgtggctgagctatggcgtggccagctcctacgtgctggcggatgccattgacaaaggcaagaaggctggagaggtgcccagccctgaagcaggccgcagcgccagggtgactgtggctgtggtggacacctttgtatggcaggctctagcctctgtggccattccgggcttcaccatcaaccgcgtgtgtgctgcctctctctatgtcctgggcactgccacccgctggcccctggctgtccgcaagtggaccaccaccgcgcttgggctgttgaccatccccatcattatccaccccattgacaggtcggtggatttcctcctggactccagcctgcgcaagctctacccaacagtggggaagcccagctcctcctgatcatactctggtacctggcctgtgcatcggcctcctgcttcatgtcaacctcctactcctgccagggaatgtggacacctggctccctggtgtccaaagaccctggcacctgggtgggtttgagctggacagaagcttagagacaaaggcttcaagaagcagtggctgcagggagtcacagaagggcaggacctgaacgctgtctgcttccctggaatccaagatgctgagtggaagtggaccctgggtgggcccggccctgtctttttcaggaaaattacatcctcccatggaggatgagagactgaggctcagggagggcaaggaataggcccaagatcacttggcaagctgggcacccaggacccccaggtgcttgacagagtcaccccatggtggtatggctgaacaaggagcggcagacaactcagggagaaactcaggagtgcagta

SEQ ID NO: 178439 - DNA, 872 bp, Homo sapiens
  Payload ID: 15155
  Gene Symbol:
  Gene Name: RP4-539M6.19
  ENST ID: ENST00000454552
  CDS Start-End: 1-223
gaagcctgctgtggaggcctatggagagtttctctgcatgtttgaggaaaattatcccgaaacactgaagcgtctttttgttgttaaagcccccaaactgtttcctgtggcctataacctcatcaaacccttcctgagtgaggacactcgtaagaagatcatggtcctgggaggtggcagtttatgtcagatggagcggatgttggttttgggattttcctgaagaccaagatgggagagaggcagcgggcaggggagatgacagaggtgctgcccaaccagaggtacaactcccacctggtccctgaagatgggaccctcacctgcagtgatcctggcatctgtcggtggatttcctcctggactccagcctgcgcaagctctacccaacagtggggaagcccagctcctcctgatcatactctggtacctggcctgtgcatcggcctcctgcttcatgtcaacctcctactcctgccagggaatgtggacacctggctccctggtgtccaaagaccctggcacctgggtgggtttgagctggacagaagcttagagacaaaggcttcaagaagcagtggctgcagggagtcacagaagggcaggacctgaacgctgtctgcttccctggaatccaagatgctgagtggaagtggaccctgggtgggcccggccctgtctttttcaggaaaattacatcctcccatggaggatgagagactgaggctcagggagggcaaggaataggcccaagatcacttggcaagctgggcacccaggacccccaggtgcttgacagagtcaccccatggtggtatggctgaacaaggagcggcagacaactcagggagaaactcaggagtgcagtacca

SEQ ID NO: 178440 - DNA, 1625 bp, Homo sapiens
  Payload ID: 15156
  Gene Symbol:
  Gene Name: RP4-559A3.7
  ENST ID: ENST00000432920
  CDS Start-End: 169-1248
atccgccgggggagaatagggttgcaccatcccagaagctgctgttagctcgccggtcctcggcacgccgcccgttcgcccctgcgctgtccgcccttcccctagcgttacttccggtccctcgctgagggggttcgtgcggctcccaggaggcgtgaaccgcggaccatgagcgtgggcttcatcggggccggccagctggcctatgctctggcgcggggcttcacggccgcaggcatcctgtcggctcacaagataatagccagctccccagaaatgaacctgcccacggtgtccgcgctcaggaagatgggtgtgaacctgacacgcagcaacaaggagacggtgaagcacagcgacgtcctgtttctggctgtgaagccacatatcatccccttcatcctggatgagattggggccgacgtgcaagccagacacatcgtggtctcctgtgcggctggtgtcaccatcagctctgtggagaaggcattcatggctctggacgcattggctgatggtggggtgaagatgggtttgccacggcgcctggcaatccaactcggggcccaggctttgctgggagctgccaagatgctgctggactcggagcagcatccatgccagcttaaggacaatgtctgctcccctgggggagccaccatccacgccctgcactttctagagagtgggggcttccgctctctgctcatcaatgcagttgaggcctcctgtatccgaacacgaggtggccggcaggttcctggcgttggaggccagcacacacctgctggtgttcggcatggagcagcggctgccgcccaacagcgagctggtgcaggccgtgctgcggctcttccaggagccggtccccaaggccgcgctgcacaggcacgggcggctgtccccgcgcagcgcccgggcccgggtgaccgtcgagtggctgcgcgtccgcgacgacggctccaaccgcacctccctcatcgactccaggctggtgtccgtccacgagagcggctggaaggccttcgacgtgaccgaggccgtgaacttctggcagcagctgagccggccccggcagccgctgctgctacaggtgtcggtgcagagggagcatctgggcccgctggcgtccggcgcccacaagctggtccgctttgcctcgcagggggcgccagccgggcttggggagccccagctggagctgcacaccctggaccttggggactatggagctcagggcgactgtgaccctgaagcaccaatgaccgagggcacccgctgctgccgccaggagatgtacattgacctgcaggggatgaagtgggccgagaactgggtgctggagcccccgggcttcctggcttatgagtgtgtgggcacctgccggcagcccccggaggccctggccttcaagtggccgtttctggggcctcgacagtgcatcgcctcggagactgactcgctgcccatgatcgtcagcatcaaggagggaggcaggaccaggccccaggtggtcagcctgcccaacatgagggtgcagaagtgcagctgtgcctcggatggtgcgctcgtgccaaggaggctccagccataggcgcctagtgtagccatcgagggacttgact

SEQ ID NO: 178441 - DNA, 568 bp, Homo sapiens
  Payload ID: 15157
  Gene Symbol:
  Gene Name: RP4-576H24.4
  ENST ID: ENST00000567028
  CDS Start-End: 38-568
agacgtttgaacagagcaggctcctgaggtctccaggatgcctgtcccagcctcctggccccaccctccttgtcctttcctgctgctgactctattgctgggactcacaggagtggcaggtgaggacgagctacaggtgattcagcctgaaaagtccgtatcagttgcagctggagagtcggccactctgcgctgtgctatgacgtccctgatccctgtggggcccatcatgtggtttagaggagctggagcaggccgggaattaatctacaatcagaaagaaggccacttcccacgggtaacaactgtttcagaactcacaaagagaaacaacctggacttttccatcagcatcagtaacatcaccccagcagacgccggcacctactactgtgtgaagttccggaaagggagccctgacgacgtggagtttaagtctggagcaggcactgagctgtctgtgcgcggagtcacacatgtgttccatgtgcaacaaacggagatgtcacagactgtatcaactggggagtcaatcatcttgagttgcagcgtacccaataccttacca

SEQ ID NO: 178442 - DNA, 563 bp, Homo sapiens
  Payload ID: 15157
  Gene Symbol:
  Gene Name: RP4-576H24.4
  ENST ID: ENST00000566961
  CDS Start-End: 1-422
aattaatctacaatcagaaagaaggccacttcccacgggtaacaactgtttcagacctcacaaagagaaacaacatggacttttccatccgcatcagtaacatcaccccagcagatgccggcacctactactgtgtgaagttccggaaagggagccccgaccacgtggagtttaagtctggagcaggcaccgagctgtctgtgcgtgaggcaagaactgtcttctctgctcggagcactgagtcgagggcatctccaggacaggcattcaggcagagcaagctccaggtttcaccacaatgcccatccctgcctccccactccacccacctctgccttccttactgctgtatctgctgcttgaactggcagtctcttacagttctagaagccagaagtctgaaatctgcatctctggactgaaatcaaggcatcagcagaactgctccttctggaggttctaggagagaacatattccctttctcttttggcttctggtttgctgccagcatccctggcctgtcagcagcatagaataaatcttcaaggccagtgtctttaaa

SEQ ID NO: 178443 - DNA, 588 bp, Homo sapiens
  Payload ID: 15157
  Gene Symbol:
  Gene Name: RP4-576H24.4
  ENST ID: ENST00000564763
  CDS Start-End: 66-584
agagcagagtctgcgatcttcccagcacagacgtttggacagagcaggctcctaaggtctccagaatgcccgtgccagcctcctggccccaccttcctagtcctttcctgctgatgacgctactgctggggagactcacaggagtggcaggtgaggacgagctacaggtgattcagcctgaaaagtccgtatcagttgcagctggagagtcggccactctgcgctgtgctatgacgtccctgatccctgtggggcccatcatgtggtttagaggagctggagcaggccgggaattaatctacaatcagaaagaaggccacttcccacgggtaacaactgtttcagaactcacaaagagaaacaacctggacttttccatcagcatcagtaacatcaccccagcagacgccggcacctactactgtgtgaagttccggaaagggagccctgacgacgtggagtttaagtctggagcaggcactgagctgtctgtgcgcgcttttttccaggagtcacacatgtgttccatgtgcaacaaacggagatgtcacagactgtatcaactggggagtcaatcatcttgagttg

SEQ ID NO: 178444 - DNA, 252 bp, Homo sapiens
  Payload ID: 15158
  Gene Symbol:
  Gene Name: RP4-583P15.14
  ENST ID: ENST00000467211
  CDS Start-End: 1-252
ccttcccacaccaggagctgccccgggctctgccggcagctgcagccaccgcagggtgcgctggcctcgaggccacctattccaacgtggggctggcggcccttcccggggtcagcctggcggccagccctgtggtggccgagtatgcccgcgtccagaagcgcaaagggacccatcgcagtccccaagagccacagcaggggaagactgaggtgaccccggccgctcagggctcttccgtgggcggcggct

SEQ ID NO: 178445 - DNA, 3119 bp, Homo sapiens
  Payload ID: 15159
  Gene Symbol:
  Gene Name: RP4-583P15.15
  ENST ID: ENST00000490623
  CDS Start-End: 1-1253
cggcccgtgggtccggatcagagaccgttcctaaagcagaggcggggccagaatctgcggcaggtgggcaggaggaggaagagggagaggacgaggaagagctgagtgggacaaaggtgagcgcgccctactacagctcctggggcactctggagtatcacaacgccatggtggtgggaacggaagaggcggaggatggctcggcgggtgtccgtgtgctttacctgtaccccactcacaagtctctgaagccgtgcccgttcttcctggagggaaagtgccgctttaaggagaactgcaggttctcccatgggcaggtggtctctctggatgagctgcgccccttccaggacccagacctgagctccctgcaggccggctctgcgtgtctggccaagcaccaggatggcctctggcacgcagcacgcatcaccgatgtggacaacggctactacacagtcaagtttgactcgctgctgctgagggaggccgtggtggagggggacggcatcctgcccccactgcgcacagaggccacagagtccgactcagacagcgacggtacgggtgactccagctatgccagagtggtggggtcagatgctgtggactctgggacctgcagctctgcctttgctggctgggaggtgcacacgcgaggtataggctccagactcctcaccaagatgggctatgagtttggcaagggtttgggccgacacgcggaaggccgggtggagcccatccatgctgtggtgttgcctcgagggaagtcgctggaccagtgtgtggagaccctgcagaagcagaccagggttggcaaggctggcaccaacaagccccccaggtgccggggaagaggggccaggcctgggggccgcccagctcctcggaatgtgtttgacttcctcaatgaaaagctgcaaggtcaggctcctggggccctagaagccggggcggccccagcggggaggaggagcaaggacatgtaccatgccagcaagagtgccaagcgggccctgagcctgcggctcttccagactgaggagaagatcgagcgaacccagcgggacatcaggagcatccaggaggctctcgcccgcaacgctggccggcatagcgtggcgtcagcccagctgcaggagaagctggcaggagcccagcgccagctggggcagctccgggctcaggaagccggcctgcagcaggagcagaggaaggcagacacccacaagaagatgactgagttctagagaccccacaagcactatggacgaagcgtgggaccccagcacgggctgccctcaggaagaccagtgttgcccgaggaggggccggcctgctggcctggggcgtgcagacactgctgagtggagacagagctgcggggtcccatctggacacttacttgcccacctgccagtgtcttgggcatttccttggcaaggacattaaagtgatttcatcacagtgtcattcagtggagatcagctggctgcagggtctctggggagagaagggtctgtgcagggctgtggtgagagacgggctgggctggaggggcctaggaggccggcattctcccttcttacccttctctgaccaaggcagatcggaggccagggtgcccgccaggctgcctgacacccacagatgggtggagctcagtgctgctccagcgggcgagacgggcgggagaggactgtggcccaccacgtggggcactcttggtgaggcaggcggacctggccctgtgggtttgggggttctgtgccagctctgctcacgtcttcgtgtgtggaggggttgtgagttaggctgtcagaacagtgcgggctagaggcgcacacgtttcatctaggcttcgggcggggcgcagcaggtgggtgaggctgcggtggtggctgctgcccagggtgggaggctcaggggaggcgcttggcgacaggagcaggaagtgatgaggtggggagctcagccgagggctgcacaaagaccttcctggcctgccccagacagagctgaggacccctggccgtgggcttgggcctcggcttcacaggatggggctgccagtgtcctgggcccctcctgccctctgggttctagggtgctgcgccctgctcctctcgctgtgggcgctgtgcacagcctgccgcaggcccgaggacgctgtagcccccaggaagagggcgcggaggcagcgggcgaggctgcagggcagtgcgacggcggcggaagcgcaagtcggacaccagactgcacgagctgcaccggggcccgcgcagcagcagggccctgcggcctgccagcatggatctcctgcgcccacactggctggaggtgtccagggacatcaccggaccgcaggcagccccctctgccttcccacaccaggagctgccccgggctctgccggcagctgcagccaccgcagggtgcgctggcctcgaggccacctattccaacgtggggctggcggcccttcccggggtcagcctggcggccagccctgtggtggccgagtatgcccgcgtccagaagcgcaaagggacccatcgcagtccccaagagccacagcaggggaagactgaggtgaccccggccgctcaggtggacgtcctgtactccagggtctgcaagcctaaaaggagggacccaggacccaccacagacccgctggaccccaagggccagggagcgattctggccctggcgggtgacctggcctaccagaccctcccgctcagggccctggatgtggacagcggccccctggaaaacgtgtatgagagcatccgggagctgggggaccctgctggcaggagcagcacgtgcggggctgggacgccccctgcttccagctgccccagcctagggaggggctggagacccctccctgcctccctgccctgaacactcaaggacctgtgctccttcctccagagtgaggcccgtcccccgccccgccccgcctcacagctgacagcgccagtcccaggtccccgggctgccagcccgtgaggtccgtgaggtcctggccgctctgacagccgcggcctccccgggctccagagaaggcccgcgtctaaataaagcgccagcgcaggatgaaagcg

SEQ ID NO: 178446 - DNA, 507 bp, Homo sapiens
  Payload ID: 15159
  Gene Symbol:
  Gene Name: RP4-583P15.15
  ENST ID: ENST00000496820
  CDS Start-End: 1-507
gcgggccctgagcctgcggctcttccagactgaggagaagatcgagcgaacccagcgggacatcaggagcatccaggaggctctcgcccgcaacgctggccggaagagggcgcggaggcagcgggcgaggctgcagggcagtgcgacggcggcggaagcgtccctactgaggcggacccacctctgctccctcagcaagtcggacaccagactgcacgagctgcaccggggcccgcgcagcagcagggccctgcggcctgccagcatggatctcctgcgcccacactggctggaggtgtccagggacatcaccggaccgcaggcagccccctctgccttcccacaccaggagctgccccgggctctgccggcagctgcagccaccgcagggtgcgctggcctcgaggccacctattccaacgtggggctggcggcccttcccggggtcagcctggcggccagccctgtggtggccgagtatgcccgcgtccagaagcgcaaagggac

SEQ ID NO: 178447 - DNA, 872 bp, Homo sapiens
  Payload ID: 15159
  Gene Symbol:
  Gene Name: RP4-583P15.15
  ENST ID: ENST00000632538
  CDS Start-End: 1-871
gttctcccatgggcaggtggtctctctggatgagctgcgccccttccaggacccagacctgagctccctgcaggccggctctgcgtgtctggccaagcaccaggatggcctctggcacgcagcacgcatcaccgatgtggacaacggctactacacagtcaagtttgactcgctgctgctgagggaggccgtggtggagggggacggcatcctgcccccactgcgcacagaggccacagagtccgactcagacagcgacggtacgggtgactccagctatgccagaggtatggcagcagctgcggagcccaggagccaggaagggcctcggcttcacaggatggggctgccagtgtcctgggcccctcctgccctctgggttctagggtgctgcgccctgctcctctcgctgtgggcgctgtgcacagcctgccgcaggcccgaggacgctgtagcccccaggaagagggcgcggaggcagcgggcgaggctgcagggcagtgcgacggcggcggaagcgcaagtcggacaccagactgcacgagctgcaccggggcccgcgcagcagcagggccctgcggcctgccagcatggatctcctgcgcccacactggctggaggtgtccagggacatcaccggaccgcaggcagccccctctgccttcccacaccaggagctgccccgggctctgccggcagctgcagccaccgcagggtgcgctggcctcgaggccacctattccaacgtggggctggcggcccttcccggggtcagcctggcggccagccctgtggtggccgagtatgcccgcgtccagaagcgcaaagggacccatcgcagtccccaagagccacagcaggggaagactgag

SEQ ID NO: 178448 - DNA, 602 bp, Homo sapiens
  Payload ID: 15160
  Gene Symbol:
  Gene Name: RP4-613B23.5
  ENST ID: ENST00000431549
  CDS Start-End: 106-357
gtgggtggggagaagccgggaggactgggtgcgcctgcagggatcggaagccggttggggtgtgagaggttttctcgctctagggagattcttcaagcaatcactatgtcaacagacacaggtgtttcccttccttcatatgaggaagatcagggatcaaaactcattcgaaaagctaaagaggcaccattcgtacccgttggaatagcgggttttgcagcaattgttgcatatggattatataaactgaagagcaggggaaatactaaaatgtccattcatctgatccacatgcgtgtggcagcccaaggctttgttgtaggagcaatgactgttgggcaggatggcagcagatgaaagctcacagaacactttgcggctccagttcaaggcaatgcaggagatgcagcacaaacggttacagaagcagatggagaaaaagagggaaaaagaactgagcctcaaaagcagagctgacgaccaagaggagcccttggaggtttcagatggcctcagccttctccacgcaggggagccaaactcgaaaaatagctttgagaagagggtgcttgaagatgagattgaacaccttcgaaatgagc

SEQ ID NO: 178449 - DNA, 529 bp, Homo sapiens
  Payload ID: 15161
  Gene Symbol:
  Gene Name: RP4-614O4.11
  ENST ID: ENST00000444717
  CDS Start-End: 1-333
ggaagctactgtgtcttcagcaatcagggagggctggtgcatcccaagacttcaattgaagaccaggatgagctgtcctctcttcttcaagtcccccttgtggcggggactgtgaaccgaggcagtgaggtgattgctgctgggatggtggtgaatgactggtgtgccttctgtggcctggacacaaccagcacagagctgtcagtggtggagagtgtcttcaagctgaatgaagcccagcctagcaccattgccaccagcatgcgggattccctcattgacagattgggtaactcaaggcgtccctggagtacactgaggataagtgtttgagaaatgctgtctgaaggaatgaagtcagtctatgacaacgtctctctgccgtgaatcattcctgcagatgaaaaagtgtgacttggcagctgaccccacctcagagttcactccccgagagcccaacctgcaacacgtcaagcagactgccaccctgtcagtccatggctgatggaggacagatgacaagatatac

SEQ ID NO: 178450 - DNA, 554 bp, Homo sapiens
  Payload ID: 15162
  Gene Symbol:
  Gene Name: RP4-635E18.9
  ENST ID: ENST00000612542
  CDS Start-End: 1-184
agaggacttgatcattaaaggaatcagcgttcatatatccaatgccgaacctaagcacaatagcaatagacagttagaaagaagtggaagatttggtggtaatccagcacttgcactattactcagcagcagtaacatggtaacacttaaaatggtactcggggacctccaaagactaaactgacaagccttcaaggagcccaggggctcacagactgggagtgatttttctcctttggagctcgtccagaatccatcagcctcacacacatatttacctgcaaatcattggaaaagcaaaaatgtttaactgcatgtataagatggttgtcatttgcttgaatacccccttgaaaaatgttgattcttgagcatcagtgggacatagaggtgtctgaagaaccattttacatgatttcataaataggaggtctctgcattaccatgtttgcttgcaaagtggaaaccttttagatgtgtaacttgaatatgtatcaagatctcaagtgcttaatgataaggtgttgacttgttaaattaaaccatttggaata

SEQ ID NO: 178451 - DNA, 645 bp, Homo sapiens
  Payload ID: 15162
  Gene Symbol:
  Gene Name: RP4-635E18.9
  ENST ID: ENST00000622108
  CDS Start-End: 1-51
ctcatttcaaatgtttatggaagaagcacttcattgaaagtagtgctgtaaatattctgccataggaatactgtctacatgctttctcattcaagaattcgtcatcacgcatcacaggccgcgtctttgacgcacttgcactattactcagcagcagtaacatggtaacacttaaaatggtactcggggacctccaaagactaaactgacaagccttcaaggagcccaggggctagagtataatggtgcgatctgggctcaccgcaacctccaccacctgggttcaagcaattctgcctcagccgctcgagtagctgggattacaggctcacagactgggagtgatttttctcctttggagctcgtccagaatccatcagcctcacacacatatttacctgcaaatcattggaaaagcaaaaatgtttaactgcatgtataagatggttgtcatttgcttgaatacccccttgaaaaatgttgattcttgagcatcagtgggacatagaggtgtctgaagaaccattttacatgatttcataaataggaggtctctgcattaccatgtttgcttgcaaagtggaaaccttttagatgtgtaacttgaatatgtatcaagatctcaagtgcttaatgataaggtgt

SEQ ID NO: 178452 - DNA, 700 bp, Homo sapiens
  Payload ID: 15162
  Gene Symbol:
  Gene Name: RP4-635E18.9
  ENST ID: ENST00000611136
  CDS Start-End: 1-268
gcgggagttcttctctcagtacggggatgtgatggatgtcttcatccccaagccattcagggcctttgcctttgttacatttgcagatgatcagattgcgcagtctctttgtggagaggacttgatcattaaaggaatcagcgttcatatatccaatgccgaacctaagcacaatagcaatagacagttagaaagaagtggaagatttggtgttcatctcatttcaaatgtttatggaagaagcacttcattgaaagtagtgctgtaaatattctgccataggaatactgtctacatgctttctcattcaagaattcgtcatcacgcatcacaggccgcgtctttgacgcacttgcactattactcagcagcagtaacatggtaacacttaaaatggtactcggggacctccaaagactaaactgacaagccttcaaggagcccaggggctcacagactgggagtgatttttctcctttggagctcgtccagaatccatcagcctcacacacatatttacctgcaaatcattggaaaagcaaaaatgtttaactgcatgtataagatggttgtcatttgcttgaatacccccttgaaaaatgttgattcttgagcatcagtgggacatagaggtgtctgaagaaccattttacatgatttcataaataggaggtctctgcattaccatgtttgcttgcaa

SEQ ID NO: 178453 - DNA, 1793 bp, Homo sapiens
  Payload ID: 15162
  Gene Symbol:
  Gene Name: RP4-635E18.9
  ENST ID: ENST00000614757
  CDS Start-End: 95-991
ggagcgaagcggtggctgggctgcgcttgggtccgtcgctgcttcggtgtccctgtcgggcttcccagcagcggcctagcgggaaaagtaaaagatgtctgaatatattcgggtaaccgaagatgagaacgatgagcccattgaaataccatcggaagacgatgggacggtgctgctctccacggttacagcccagtttccaggggcgtgtgggcttcgctacaggaatccagtgtctcagtgtatgagaggtgtccggctggtagaaggaattctgcatgccccagatgctggctggggaaatctggtgtatgttgtcaactatccaaaagataacaaaagaaaaatggatgagacagatgcttcatcagcagtgaaagtgaaaagagcagtccagaaaacatccgatttaatagtgttgggtctcccatggaaaacaaccgaacaggacctgaaagagtattttagtacctttggagaagttcttatggtgcaggtcaagaaagatcttaagactggtcattcaaaggggtttggctttgttcgttttacggaatatgaaacacaagtgaaagtaatgtcacagcgacatatgatagatggacgatggtgtgactgcaaacttcctaattctaagcaaagccaagatgagcctttgagaagcagaaaagtgtttgtggggcgctgtacagaggacatgactgaggatgagctgcgggagttcttctctcagtacggggatgtgatggatgtcttcatccccaagccattcagggcctttgcctttgttacatttgcagatgatcagattgcgcagtctctttgtggagaggacttgatcattaaaggaatcagcgttcatatatccaatgccgaacctaagcacaatagcaatagacagttagaaagaagtggaagatttggtggtaatccagttcatctcatttcaaatgtttatggaagaagcacttcattgaaagtagtgctgtaaatattctgccataggaatactgtctacatgctttctcattcaagaattcgtcatcacgcatcacaggccgcgtctttgacgccctgaatgcaaagaattcatagcagttaattccccttttttgacccttttgagatggaactttcataaagtttcttggcagtagtttattttgcttcaaataaacttatttgaaaagttgtctcaagtcaaatggattcatcacctgtcatgcattgacacctgatacccagacttaattggtatttgttcttgcattggccaaagtgaaaatttttttttttcttttgaaatctagttttgaataagtctgggtgaccgcacctaaaatgcacttgcactattactcagcagcagtaacatggtaacacttaaaatggtactcggggacctccaaagactaaactgacaagccttcaaggagcccaggggctcacagactgggagtgatttttctcctttggagctcgtccagaatccatcagcctcacacacatatttacctgcaaatcattggaaaagcaaaaatgtttaactgcatgtataagatggttgtcatttgcttgaatacccccttgaaaaatgttgattcttgagcatcagtgggacatagaggtgtctgaagaaccattttacatgatttcataaataggaggtctctgcattaccatgtttgcttgcaaagtggaaaccttttagatgtgtaacttgaatatgtatcaagatctcaagtgcttaatgataaggtgttgacttgttaaattaaaccatttggaataca

SEQ ID NO: 178454 - DNA, 823 bp, Homo sapiens
  Payload ID: 15163
  Gene Symbol:
  Gene Name: RP4-734P14.4
  ENST ID: ENST00000461548
  CDS Start-End: 264-605
gccgagatcccgggcacgctggctctggtccaccttctccaatccctgcctgctgggagaggacgatctcttgagaaaggaaagacttctgtgctcccgagaacttcctatcaggtcctggctgcagggaaacaagctgggctttttataattaaggttggaagaagtcaccacaggcagcagaactccatcttgagatgaaataacatctacctggacctctggcagaatttcaaggcacacactgggctgactctggcgccatgatgttgccttatccttcagcactgggagatcaatactgggaagagattttgcttccaaagaatggggaaaatgtagagactatgaagaaattgacccaaaatcataaagcgaaaggcttgccttctaatgatactgactgcccccagaaaaaggagggaaaggcccaaatagtggtaccagttacattcagggatgtgactgtgatcttcacagaagcagaatggaagagactgagtccagagcagaggaatctatacaaagaagtgatgctggagaattacaggaatcttctctcattggacggtgggcaagagcagcaagatgctgcagcatattgattacaggatgaggtgcatcctgcaggacggccggatcttcattggcaccttcaaggcttttgacaagcacatgaatttgatcctctgtgactgtgatgagttcagaaagatcaagtgtgtgaggggggagagcttgagtttctggcctcattgcctatttgtaaagctgtagcctaaagggctctcccaatgcagcctggtctgaaactgctttaaga

SEQ ID NO: 178455 - DNA, 687 bp, Homo sapiens
  Payload ID: 15164
  Gene Symbol:
  Gene Name: RP4-777O23.3
  ENST ID: ENST00000598361
  CDS Start-End: 361-672
cacgctggtgtctgtcctccttacagaatgcctgaacagttccattgactcaaagtgaagatcaaaagaaccaaatgacagcaatagccaagtgtaatcatcagtaaccctgtgttctatccacagttaaaagaatattggcagagaaacagccttggtgttccagcaggagtgaagaggaacaggaaaacgagtggcagtagccctgaaacagccacttctggtggttgccactcacctgaggatgattttaagcttgactttggcaattcccaaggcaaaacaagtcaaacttggcatggagggatagccaccatttttcagagtcctggcgatgaagtgtggggagtagtatggaaaatgaacaaaagcaatttaaattctctggatgagcaagaaggggttaaaagtggaatgtatgttgtaatagaagttaaagttgcaactcaagaaggaaaagaaataacctgtcgaagttatctgatgacaaattacgaaagtgctcccccatccccacagtataaaaagattatttgcatgggtgcaaaagaaaatggtttgccgctggagtatcaagagaagttaaaagcaatagaaccaaatgactatacaggaaaggtctcagaagaaattgaagacatcatcaaaaagggggaaacacaaactctttagaacataacagaatat

SEQ ID NO: 178456 - DNA, 3695 bp, Homo sapiens
  Payload ID: 15165
  Gene Symbol:
  Gene Name: RP5-1021I20.4
  ENST ID: ENST00000556551
  CDS Start-End: 194-1057
actgtggctcccgaagctgcttcgggccccagcggtgaggaagaagactctcaaccagggtgacttctaggcgtcctcccggagctaccggggacactggcgttattgcccgcaacactgagatagggaatgctcgagaaacagaagagtattttatacagaaatcttgtgaaaccactgcccaaccagagcaatgattgttcaaagagtggtattgaattctcgacctggaaaaaatggtaatccagtggcagagaatttccgaatggaagaagtctatttaccagataatattaatgaaggacaagtacaagttagaactctttatctttctgtggatccttacatgcgttgtagaatgaatgaagacactggcactgattatataacaccttggcagctatctcaagtcgttgatggaggaggtattggaattatagaagaaagcaaacacacaaatttgactaaaggcgattttgtgacttctttctattggccctggcaaaccaaggttattctggatggaaatagccttgaaaaggtagacccacaacttgtggatggacacctttcatattttcttggagctataggtatgcctggtttgacttccttgattgggatacaggaaaaaggtcatataactgctggatctaataagacaatggttgtcagtggggccgcaggtgcctgtggatctgtggctgggcagatgaatgagaacagccacatcatcctgtgtggtcaaatttctcagtacaacaaagatgtgccttatcctcccccgctatcccctgctatagaggcaatccagaaagaaagaaacatcacaagggaaagatttctggtattaaattataaagacaaatttgagcctggcattctacagctgagtcagtggtttaaagaaggaaagctaaagattaaagagacggtaataaatgggttggaaaacatgggagctgcattccagtccatgatgacaggaggttacattgattacccacctagtacaacatcttacgggaagagcatagtatttcctagaggaatatgaacataacaggaaggtatcattggctctgaattaaatttgaacttgtcccctgaatagctacaggttttggaagctgaatcaatgttatcagatgagttagaatccaaaccagagctcctggtacagtttgttcagaatacgtccatcccattgggacaggggcttgtagaatcagaagctaaagatattacttgcttgtccctccttcccgtgactgaagcctcagaatgcagtcggctaatgttaccagaatgactgttatcttaaagatggaagataacaagtgttggtaaggatatggagaaaagggaacctttgtacactgttggtgggaatgtaagttagtacagccattatggaaaccgtatggaagttcctcagaaaactaaaaatggagccactatatgacccagcaatctcacttgtagatgatactacaaatcattctaactcctccaaggaggtcccttcctcagctgttttgagaagccttcgggtgaatgtgggtccagacggagaggagacgagagctcagactgtacagaaatccccggagtttttgtccacttcagagtcttctagcttgttgcaagatctacagccaagtgatagcacttcttttattcttcttaacctaacaagagcaggtctgggctcttcagctgagcacttagtgtttgtacaggatgaggcagaagattcagggaatgatttcctctccagtgagagcacagacagtagcattccatggttcctccgggttcaggagttggcccatgacagtttgattgctgctactcgtgcacaactggcaaagaatgcaaaaaccagcagcaatggagaaaatgtccaccttggttctggtgatgggcagtcaaaagattctgggccccttcctcaagtggaaaagaagctcaagtgtacagttgaaggttgtgaccggacatttgtatggccagctcactttaaataccacctcaagactcatcgaaatgaccgctccttcatctgtcctgcagaaggttgtgggaaaagcttctatgtgctgcagaggctgaaggtgcacatgaggacccacaatggagagaagccctttatgtgccatgagtctggctgtggtaagcagtttactacagctggaaacctgaagaaccaccggcgcatccacacaggagagaaacctttcctttgtgaagcccaaggatgtggccgttcctttgctgagtattctagcctccgaaaacatctggtggttcactcaggagagaagcctcatcagtgccaagtctgtgggaagaccttctctcagagtggaagcaggaatgtgcatatgagaaagcatcacctgcagctgggagcagctgggagtcaagagcaggagcaaactgctgagccactaatgggcagtagtttgcttgaagaggcttcagtacccagtaaaaacctggtgtctatgaattcccagcccagccttggtggagagtccttgaacctaccaaataccaattctatcctgggagttgatgatgttatggaagaacttaacttttagaacatttaaacagaacataaccaggttttacagaggagatataaagcaatttctccataccttcaaaagccatatcttctggagaaaagaaagggctctctaggaaacacttgctcctctctggtatagaaatttcacccaagttacacaggccaggccctcttctctgaaaaacttaacagaggtgcttgctgaaggatccccacgttccctgtcttcagtgcctgatgtgacacatcacctggtgaccatgcagtcagggaggcaatcatatgaagtttctgtcttaactgcagtaaatccacaagagttactaaaccaaggagatttaactgaaagacggacatgagcgtgggtgctgactcctggaagagcaactctatctgatctcaaaatgcgtatactgggaacaggatgccttagcccacaacagaaccagaatgaatctttgaaggcacaagactctgcttttgccactcttcctctttcctggtatagaagatggatgtaggagagcttcttttctaactaccatctgatcagacaaggaatgaagcaatgactgtgggctgggaaactgtacctacctctcttcccactgcaaatttctgggatagaccaaaagtgaatttgattatgtgttggctgaagttcttcattctgactgttgaggggaggttttcctttgaagagttttcatcccagactcagctgtcttttcacatggatgaaataattcctgctaccaacaacagagcttcaccaggaagttgagttttcaagatgccttgttgctttgaagaagggagtgatgtcaattctcttgttacattctccctttagcaacctgagtaagagactctctgccactgggctgcaaaaaaataaattacttgaatctccccttggcccaggctgaggtactatcttgtcctatacacttctacttggtcactttgctttcttcgttaatggaacatacagtagcatgttaagagggatttcatgtttttgtttttttaaagttaaaaattacatgatgcagagattcaggttttcctttaaataaacaaaacagcccagtca

SEQ ID NO: 178457 - DNA, 323 bp, Homo sapiens
  Payload ID: 15166
  Gene Symbol:
  Gene Name: RP5-1042K10.14
  ENST ID: ENST00000498234
  CDS Start-End: 1-173
ctttcactggtcgtgcctcccagcaggtgcagagattcttagaagaggaggtgtatcccctgttaaaaccatatgaaagcgtgatgaaggtggtaacacggttcaaaatgaaaaaggtacagaacgagtatgaagtaaaagtctccctgccacctagttcccccaacatgtagcctttattttatatgaaaatttctcccctttttaacaagtattttcacattcttctcactctcctttttttacttagcccctgtcagtgacagctgcacaccattttattctatagatatactgtaattaaacagtcctgtatcagtggg

SEQ ID NO: 178458 - DNA, 546 bp, Homo sapiens
  Payload ID: 15166
  Gene Symbol:
  Gene Name: RP5-1042K10.14
  ENST ID: ENST00000623869
  CDS Start-End: 1-171
atagagcgtatccaggttgatgcctacttcagtcccattcactcccagttggatcatttactggatccttcttctttcactggtcgtgcctcccagcaggtgcagagattcttagaagaggaggtgtatcccctgttaaaaccatatgaaagcgtgatgaagggcagatgattctggaccagatgaagcctgaggagccttccagctctaagatagcaggataggagacttctaagattggagctgcagaagacttgccagcccaccagcacaatgtcaggaagccatacacctgcctgtggccctttctcagccctgactccgagcatatggccccaggagatcttggccaagtacacgcagaaggaagagtcagcagagcaaccagagttctactacgatgagtttggtttccgtgtgtacaaggaagaaggtgatgagcctggctccagtctgctggcgaactcccctctgatggaggatgctccacagaggctgcggtggcaggcccacctggagttcacccataaccacgatgtgggggat

SEQ ID NO: 178459 - DNA, 2013 bp, Homo sapiens
  Payload ID: 15167
  Gene Symbol:
  Gene Name: RP5-1052I5.2
  ENST ID: ENST00000370548
  CDS Start-End: 74-985
tgtggggagggtacctctcacagaagagtcttatgactggcatcaggggaaggtcaccaagtctttcctgtacatgctgtttatcaaattcattcatctcgaagtattcagtatgccagaaagggctattgcaagacacgaagtccgagaaattgagcagcgacatacaatggatggccctcggcaagatgccactttagatgaggaagaggacatggtgatcatttataacagagttcccaaaacggcaagcacttcatttaccaatatcgcctatgacctgtgtgcaaagaataaataccatgtccttcatatcaacactaccaaaaataatccagtgatgtcattgcaagatcaggtgcgctttgtaaagaatataacttcctggaaagagatgaaaccaggattttatcatggacacgtttcttacttggattttgcaaaatttggtgtgaagaagaaaccaatttacattaatgtcataagggatcctattgagaggctagtttcttattattactttctgagatttggagatgattatagaccagggttacggagacgaaaacaaggagacaaaaagacctttgatgaatgtgtagcagaaggtggctcagactgtgctccagagaagctctggcttcaaatcccgttcttctgtggccatagctccgaatgctggaatgtgggaagcaggtgggctatggatcaagccaagtataacctaattaatgaatattttctggtgggagttactgaagaacttgaagattttatcatgttattggaggcagcattgccccggtttttcaggggtgctactgaactctatcgcacagcaccagatactgctacaccatctcatcggcatggacctatatgtggcagcaagtccatctcatcgcttttggtgaaagtcagtccagtttgtaaagattctcattgccttggaaagtgttccaggaatggactttctgcagtatgatgacctgcaaaagcagcccttccatttacatttcaaactccaagtcagccgtgtcaaagtttgaaccagaactgtggaggataatgggtcagatgcaattagcagcccagagaaccacacgttgcagtctgatttatttttttgcccatcagattccaagaatcctagtgcttaaaagcaactaaacaatcgctctattgtactgaaataaagcccggttaattcagaaatcaattgcaccaccaggtggggcacactctggccccaaacagatggggttgaaaactcccctcaaaatgcagtcttgttaaattaaaaacttgatccaggagtggaacaaatagggagccatgaatggaatggagtcaggtccactcaggcggattctttcttctcccactccttttcctttaaaaaagaaaaattccccatttcactttcatcagtgttagcatctatgcagaaacgcagccatccaccctttgcagttgaatgtgttactttaattagtctgaaaattaaagggcaactccgggccaatgtgaatgattatgaaaatacatgtgcatcccatgcaatcttctcatttaattaatagtcttgtaaactatatggctcactttaagtcagtcaagaggtataacaactccattttaaatatccacttaatacttaacaggatgtgaggaacacactatagcatacggtcccttctcaagtttcactgtctgaaatttttcaaagctgacccaagtcaacctgaaaaatgtttaacaccctgggcttgaacacaagaaactctgtgatgaacagacattcaattacattttttaaaagtgagaagcatttttgtaaaatagcgactctggaaactaattggcagccgcaaaacttgtgagcaaaggccaaatcttgtggggaacttttactacagtaacacgactcaaagaaaatgtgaataaaaggcatctttgtttcccagtcaaattagctgattaagaaataaaacatcttaacatgtttttaaa

SEQ ID NO: 178460 - DNA, 2714 bp, Homo sapiens
  Payload ID: 15168
  Gene Symbol:
  Gene Name: RP5-850E9.3
  ENST ID: ENST00000488788
  CDS Start-End: 200-484
agctcccgcgatcccctgtctgcgcgccgccgccgccaagcccgagcccgagccggggccgccgccaccggtgccggctccgagcggcctcccgcgctccagcccgctgggagctgtccagtgctgaaaacccgcgcggacacagccgatcgcgcccggccggccgcctccccgcaccgagccccgcgccggccgcgccatgccgcgctccttcctggtaaagaagatcaaaggggacggcttccagtgcagcggggtgccggcccccacctaccaccccttggagacagcctacgtgctgcctggcgcccgggggcctcccggggacaacgacggggttcagaaagtgtcagcaactggtggaaggcaaagtagaaactcctggctccctccttcgtctccagttttctccagctggcagggaggacccagacagcgtgccccccatcgatgtcctctggatcaaaggggcccagggaggtgactacttctactcctttgggggctgccaccgctacgcggcctaccagcaactgcagcgagagaccatccccgccaagcttgtccagtccactctctcagacctaagggtgtacctgggagcatccacaccagacttgcagtagcagcctccttggcacctgctgccaccttcaagagcccagaagacacacctggcctccagcaggctgggccatgcagaagggatagcaggggtgcattctctttgcacctggcgagagggtctgactctgggcacccctctcaccagctacaaggccttggactcactgtacagtgtgggagccccagttcccacctctgtgacaataggatcatggccttacccttgaagcattaccgagaaggagaacagagatgggcttgaagagccacgtgctgccggctccaaattcccaaggacaaggatccctctgcatttttgtctatgtaacctcttatatggactacattcagctgcaaggaaaggaaaaccttgattgcagtggtttaaacaaacagaagattgtttttccacatagcatggattctggagatgggtggctaatggtattggttcaacaactccacgaaggtaggggtcacgtcttggatccttttgccttaatctcagtgctcgttacttcatggtcccaagatggctgctgtatccccaagaatcatgtctgcgttcaaggaaggaggggtggaggaagaggaagggccaaactagctggacccgtcaccttctatcagaaagtaaaacctcgtcagaagtctgtttcctgctctctccctctgcatatcttcacttagatgcccttggcccgagccagctaccattgcacctctagctgcaaacaaagctaagacagcagggaacagaattgtcatggctgaatagaccaatcgtgttccatctactgagactggcacactgcctcctgcaataaaactgggatcccattaccaagagagaaatgcagaattgtgtaccagttagcttttgctgtgtaacaaaccatccccaaacttggcagctagaaacaaaccctgtattttcccacaatcctatgggttggcaatttgggctgggctcaacagggcagttctgctgctcacacctgggatccctcatggagctaaggtcagctgttacctcagctgggcctggatggtctaggatagccttactcacttgcctggcaggtgacaggctgttggctggaattgcttggttctcctccatgtggcctctccagcaggctagctcaggcttattcacatgatggcttcaggattccaaagagagtgagagtagaagctgaaagacttcttgagttcttggcctggaactgggactaggacagtgtcacttctgctaagttcttttggtcagagcaaatcacaaggctttacccagattcaagggatgagaaacagactacatgtcttgatgaggggaaccacaaagagcttgtggccatttttcacctatcacaaataattttggatgggtatttatttggataaaggtatttccctcttccccctttctctctgtctcatggggcctcactctgccaagttggaaggcactaagacattgtcctggccctcagggtctaggggaagaggtgttggggcaggaagtgagtctctccatgggctggacccactgtagtaggagtgcctccttgtctgcactgctggtatggggttaggccaggtaggacattccagaggggcttctgaaaaccaagagtccctggggaaagggaacagagtaaggcaggccttgttctcactgccctctaagggaacttggtcactcggcacttttaagcctcagtttctccagttcaataataaggacaagagcttttcccatgcattctctttccccgggaaagttgactgaggtgaccagtaatagaattgaaaagggagagtgtcttcagtgcaatgtggcatcctggattgggtcttggaacaaaaacaggacattagtgggaaaattggaaatctgaaaaaagtctgaattttagttaatataccaatttcagtctcttggttttgacagatgtaccatggtgatgtaagatgttgaccttggggtaggctgggtgaagggtatacaggaactctttgtactatctctgcaacttctctgtaaatctagtatcattccaaaataaaagtttatttaattt

SEQ ID NO: 178461 - DNA, 1866 bp, Homo sapiens
  Payload ID: 15169
  Gene Symbol:
  Gene Name: RP5-860F19.8
  ENST ID: ENST00000380593
  CDS Start-End: 84-848
cacaatgccccgggtgcccactcccagaatgctgaccaaagtgggaggagcactaggtcttcccgtcacctccacctctctccatgacccggctctgcttacccagacccgaagcacgtgaggatccgatcccagttcctccaaggggcctgggtgctggggaggggtcaggtagtccagtgcgtccacctgtatccacctggggccctagctgggcccagctcctggacagtgtcctatggctgggggcactaggactgacaatccaggcagtcttttccaccactggcccagccctgctgctgcttctggtcagcttcctcacctttgacctgctccataggtgcaccagacatgatgcagcagccgcgagtggagacagataccatcggggctggcgaggggccacagcaggcagtgccctggtcagcctgggtcacgaggcatggctgggtgcgctggtgggtgagccacatgcccccgagctggatccagtggtggagcacctcgaactggcggcaaccgctgcagcgcctgctgtggggtctggaggggatactctacctgctgctggcactgatgttgtgccatgcactcttcaccactggctcccacctgctgagctccttgtggcctgtcgtggccgcggtgtggcgccacctgctaccggctctcctgctgctggtgctcagtgctctgcctgccctcctcttcacggcctccttcctgctgctcttctccacactgctgagccttgtgggcctcctcacctccatgactcacccaggcgacactcaggatttggatcaatagaagggcaaccccatcccactgcctgtgtctgttgagccctggcctagggcctgagaccccacggggagagggagggcaatgggatcagggctccctgccttggcagggcccagacccctagtccctaacaggtagactggcctgaccccggactccttcctcaagtcaatgctgcaggttcctggtgtgaggggctgggggctttgagaagagggggcaagacagatggcttagccattggtgaaaattgcttagccaggggcagagcttgaccaagccactgatagcgcccatatggatgtgatgatacccgtggggcccccttggcaactgacagcatctttttctcatagccactcagctgtctcagcttcagactcactgagaacttctacctgggtaccactggccttgccattcctcccaccaatcccctctttccacttccaggagaaccacagactctagagagggtcccagtgacaaaaatctatcagggagaaggctggccagaagccccaggagacctcaactcactcgctctccaaaccttgcagcccacgcatcctcctccctagacttcctacttcctgcctcagtctgcatccccaagtctgagaaatgggccaactggggtcagacagcacctactcactctctaagaatcccaaggtctgttatggaaaaatgatcaagaaatcccatttcacccacttacacaatgtgtggccttggccaattaattcatttgagcctcaatgttacgtgggccacttctgtcatggggttgttgtgagtcaaagacaatatctatttgtgaagcattttgtagaagccaaaaacctgtaagatgttgttttgagctctaagaactttctgtaggcgcataagatcttttgaccccaaagactgttgaaggaacaggaagcttctctgggctttcagatcaactctctgtcctggatagaattttggccctaaaatggtaaacaagaggtcggttaagtgtgtacaagatgtaaaaggtcatgtgccatgaaatctcaaaatgtg

SEQ ID NO: 178462 - DNA, 2381 bp, Homo sapiens
  Payload ID: 15170
  Gene Symbol:
  Gene Name: RP5-864K19.6
  ENST ID: ENST00000454994
  CDS Start-End: 282-1826
ttttaaaagcaaggataagcagaaagggacatggattttagttgatggatgactcactcactacattcaactgaactgaatctgctctataccagcaaagggacaaattcagaaaataaattgaagatggccatgctgtaacttctaaacatggtttgcttctcagatttacctaaactaagaaaggtttgctttaagaaatagtgctcccttcagaatggaagaatttatctgcctcttatttgatgtggatcagagctaagatggctgactaaataaacatgggggactggaatctccttggagatactctggaggaagttcacatccactccaccatgattggaaagatctggctcaccatcctgttcatatttcgaatgcttgttctgggtgtagcagctgaagatgtctggaatgatgagcagtctggcttcatctgcaatacagaacaaccaggctgcagaaatgtatgctacgaccaggcctttcctatctccctcattagatactgggttctgcaggtgatatttgtgtcttcaccatccctggtctacatgggccatgcattgtaccgactgagagttcttgaggaagagaggcaaaggatgaaagctcagttaagagtagaactggaggaggtagagtttgaaatgcctagggatcggaggagattggagcaagagctttgtcagctggagaaaaggaaactaaataaagctccactcagaggaaccttgctttgcacttatgtgatacacattttcactcgctctgtggttgaagttggattcatgattggacagtaccttttatatggatttcacttagagccgctatttaagtgccatggccacccgtgtccaaatataatcgactgttttgtctcaagaccaacagaaaagacaatattcctattatttatgcaatctatagccactatttcacttttcttaaacattcttgaaattttccacctaggttttaaaaagattaaaagagggctttggggaaaatacaagttgaagaaggaacataatgaattccatgcaaacaaggcaaaacaaaatgtagccaaataccagagcacatctgcaaattcactgaagcgactcccttctgcccctgattataatctgttagtggaaaagcaaacacacactgcagtgtaccctagtttaaattcatcttctgtattccagccaaatcctgacaatcatagtgtaaatgatgagaaatgcattttggatgaacaggaaactgtactttctaatgagatttccacacttagtactagttgtagtcattttcaacacatcagttcaaacaataacaaagacactcataaaatatttggaaaagaacttaatggtaaccagttaatggaaaaaagagaaactgaaggcaaagacagcaaaaggaactactactctagaggtcaccgttctattccaggtgttgctatagatggagagaacaacatgaggcagtcaccccaaacagttttctccttgccagctaactgcgattggaaaccgcggtggcttagagctacatggggttcctctacagaacatgaaaaccgggggtcacctcctaaagtgcctggctcaaaagctactgcaagctcgttactgctcatcctccagaggcccacatcaagtcagccacgactcaaggagactccaaagataaaagctgaagccaaaatatatgattctaaacaccctcctcggctactgcaaagcactgtgagcactttctcaggacgagagccaagaagcccagcacctatgggtcaccacagtttccgaggtcccagatgaaaaagatgcgctcgctaccaccgtgcggcggtcctttctctcgcaatagtctcaatgctcccgggccctgcctccggacgccaggacagaggccgccgactcgaagcgtgagcagttccggaggtacttggagaagtcgggggtgctggacacgctgaccaaggtgttggtagccttatatgaagaaccagagaaacctaacagtgctttggattttttaaagcatcacttaggagctgctactccagaaaatccagaaatagagctgcttcgcctagaactggccgaaatgaaagagaagtatgaagctattgtagaagaaaataaaaaactgaaagcaaagcttgctcagtatgaaccacctcaggaggagaagcgtgctgaataggattcttctcagtttgaaagacaatgaaaaatggttttgtatgacttgaatagtttgtatagtatataatcttttctgaacagatgctatagaactcttttaatatgtttaattcacctatcacactctgttaaaaacacatagaatcatcaataaaaactcaatat

SEQ ID NO: 178463 - DNA, 609 bp, Homo sapiens
  Payload ID: 15170
  Gene Symbol:
  Gene Name: RP5-864K19.6
  ENST ID: ENST00000621281
  CDS Start-End: 136-468
taagcagaaagggacatggattttagttgatggatgactcactcactacattcaactgaactgaatctgctctataccagcaaagggacaaattcagaaaataaattgaagatggccatgctgtaacttctaaacatggtttgcttctcagatttacctaaactaagaaaggccgccgactcgaagcgtgagcagttccggaggtacttggagaagtcgggggtgctggacacgctgaccaaggtgttggtagccttatatgaagaaccagagaaacctaacagtgctttggattttttaaagcatcacttaggagctgctactccagaaaatccagaaatagagctgcttcgcctagaactggccgaaatgaaagagaagtatgaagctattgtagaagaaaataaaaaactgaaagcaaagcttgctcagtatgaaccacctcaggaggagaagcgtgctgaataggattcttctcagtttgaaagacaatgaaaaatggttttgtatgacttgaatagtttgtatagtatataatcttttctgaacagatgctatagaactcttttaatatgtttaattcacctatcacactctgttaaaaacaca

SEQ ID NO: 178464 - DNA, 557 bp, Homo sapiens
  Payload ID: 15171
  Gene Symbol:
  Gene Name: RP5-874C20.8
  ENST ID: ENST00000621053
  CDS Start-End: 160-414
gaagaaagcgctccgaagagctagagctgacactcggcgatgagctaagacgctgtttcagagcgtttgggtcctctgaggccccttgaccaggagtgtctctgaagatacagtccaaagaaagttctccaaaacaaggagaacagtctgaagctggggatggcaacagcattggacccagaccagccaaagaaacaaaaaatacttgtggaggagatggcccctctgaaaggagtacaggaacagcaggttcggcatgagtgtgaagttacaaagcctgagaaagagaaggccagtgatgaccccgaagacagacatttaccactgtgttggttttcaatcgaaatgatgtacataaatttggggcgtgcttgcaccgtccgaatgggcctggggtccggcggcggagagtgacctgggcggggcaggaggtggcagcgggggtcctcccggctcaccagagagacgagcggccgtgctcctagagaggcagggaacccgccagactccgccactccgctgcgggcgcggcgcagggagaagcttttgtacccgcc

SEQ ID NO: 178465 - DNA, 1531 bp, Homo sapiens
  Payload ID: 15172
  Gene Symbol:
  Gene Name: RP5-877J2.1
  ENST ID: ENST00000509504
  CDS Start-End: 1-1348
agaaacacttacgcttcacagtttgacctgctatgaggacctggtgacttttcttcaacaaagcattcatcagtttgaagtgggcccctatggctgcatcctgctcaccctttctgccatcctgtccaggtctacagagctcatccgccaggactttgatgtccccaccagccacctgattggagcacatggctactgtacacaggaacttgtcaatctgctcctgactgggaaagctgtgtccaacgttttcaacgatgtggttgagctggattctggggatgggaacatcacacttctcagaggcattgctgcacgcagtgatattggcttcttatctctctttgagcattacaacatgtgccaggttggctgcttcctgaagaccccgaggttccccatctgggtggtttgcagtgagagccacttcagcatcctctttagcctgcagccggggctcctgcgtgactggaggactgagaggctctttgacttgtactactacgatggcctggccaaccagcaggagcagatccggctgaccattgacaccacccaaaccatctctgaggacacagacaacgaccttgtcccacccctcgagctctgcatcagaaccaacatcggttctgccctgggcttcaaatacccggtggggaacaaccagacggcggtccaggacaacgtgaaggtgtcgctggccttcgggctgagcatcgccacgctggcgcagagtgtgggccacatcagcggcgcccacctcaacccggctgtcacactggggctgctgctcagctgccagatcagcatcttccgtgccctcatgtacatcatcgcccagtgcgtgggggccatcgtcgccaccgccatcctctcaggcatcacctcctccctgactgggaactcgcttggccgcaatgacctggctgatggtgtgaactcgggccagggcctgggcatcgagatcatcgggaccctccagctggtgctatgcgtgctggctactaccgaccggaggcgccgtgaccttggtggctcagccccccttgccatcggcctctctgtagcccttggacacctcctggctattgactacactggctgtgggattaaccctgctcggtcctttggctccgcggtgatcacacacaacttcagcaaccactggattttctgggtggggccattcatcgggggagccctggctgtactcatctacgacttcatcctggccccacgcagcagtgacctcacagaccgcgtgaaggtgtggaccagcggccaggtggaggagtatgacctggatgccgacgacatcaactccagggtggagatgaagcccaaatagaaggggtctggcccgggcatccacgtagggggcaggggcaggggcgggcggagggaggggaggggtgaaatccatactgtagacactctgacaagctggccaaagtcacttccccaagatctgccagacctgcatggtcaagcctcttatgggggtgtttctatctctttctttctctttctg

SEQ ID NO: 178466 - DNA, 5640 bp, Homo sapiens
  Payload ID: 15173
  Gene Symbol:
  Gene Name: RP5-966M1.6
  ENST ID: ENST00000468472
  CDS Start-End: 782-1072
caccatcgagcatggtttcctccctggtcctttccagaccccttactcccccctctctgaacttgcagttggaataggatagaggacaaggacatcagcaaaaacatgagcaactccccaggctccctttacctcactttctccacctgtgaacctgtggtagcccctctctgagtttgctgcaagggcccagtgagcttgccataatcagacgcagcagacacgggaagctcctgctctgccaccatgcagggatggaaaatctgtccactggaatccaggggaagggatggaagaggaagaaaaacaagcttggagcagtccaacccagctagggccctccattccctcagggacaccccacacccaccccacacactgggatgaacccttgcagaggaacaattcagatggtcacacattccaggacccaaatccgtaaacacaaagcatgtccgtcagtgccagcacctccccccggcgaatcaagcagctgtcccagagggcaaagggtctctgcagccatctgctttcatcagggctgcagcccccaggcagcagtactgggagcccctctcatctccgagaataaactctgaagccagcgaccctgcggacctgaatcatcagggagcctgtcagaggaggggcagtgactctgcgggacaagcaagcaggctatataagtttcagaaggctgggctccactcagatcttttccagcagctgctgcctgccagagaggcgccttcagagacccagcgcttacacaatacccaccatgtcccaggctggtgctcaggaagcccctatcaagaagaagcgcccccctgtgaaggacgaggacctgaagggggcccgaggaaacctgaccaagaaccaggaaatcaagtccaagacctaccaggtcatgcgagagtgtgagcaagctggctcggccgccccgtcggtgttcagccgcacccgcacagaacgcttcctctcccctgctgtctctggggctgccaccctcccccacagtccaggcccttcagccaagggctctgcaccagcaccttggaagcaccaataaagaggatgcccacgtggccccagcaatcagaagcgattcctgggctccctctgctccaccaaatgactccccagtcacccctcaggagctgctggcactgtcagaagcctcctggcagacactggagccacgatgaagcccccaaggcctgtccgtacctgcagcaaagttctcgtcctgctttcactgctggccatccaccagactactactgccgaaaagaatggcatcgacatctacagcctcaccgtggactccagggtctcatcccgatttgcccacacggtcgtcaccagccgagtggtcaatagggccaatactgtgcaggaggccaccttccagatggagctgcccaagaaagccttcatcaccaacttctccatgatcatcgatggcatgacctacccagggatcatcaaggagaaggctgaagcccaggcacagtacagcgcagcagtggccaagggaaagagcgctggcctcgtcaaggccaccgggagaaacatggagcagttccaggtgtcggtcagtgtggctcccaatgccaagatcacctttgagctggtctatgaggagctgctcaagcggcgtttgggggtgtacgagctgctgctgaaagtgcggccccagcagctggtcaagcacctgcagatggacattcacatcttcgagccccagggcatcagctttctggagacagagagcaccttcatgaccaaccagctggtagacgccctcaccacctggcagaataagaccaaggctcacatccggttcaagccaacactttcccagcagcaaaagtccccagagcagcaagaaacagtcctggacggcaacctcattatccgctatgatgtggaccgggccatctccgggggctccattcagatcgagaacggctactttgtacactactttgcccccgagggcctaaccacaatgcccaagaatgtggtctttgtcattgacaagagcggctccatgagtggcaggaaaatccagcagacccgggaagccctaatcaagatcctggatgacctcagccccagagaccagttcaacctcatcgtcttcagtacagaagcaactcagtggaggccatcactggtgccagcctcagccgagaacgtgaacaaggccaggagctttgctgcgggcatccaggccctgggagggaccaacatcaatgatgcaatgctgatggctgtgcagttgctggacagcagcaaccaggaggagcggctgcccgaagggagtgtctcactcatcatcctgctcaccgatggcgaccccactgtgggggagactaaccccaggagcatccagaataacgtgcgggaagctgtaagtggccggtacagcctcttctgcctgggcttcggtttcgacgtcagctatgccttcctggagaagctggcactggacaatggcggcctggcccggcgcatccatgaggactcagactctgccctgcagctccaggacttctaccaggaagtggccaacccactgctgacagcagtgaccttcgagtacccaagcaatgccgtggaggaggtcactcagaacaacttccggctcctcttcaagggctcagagatggtggtggctgggaagctccaggaccgggggcctgatgtgctcacagccacagtcagtgggaagctgcctacacagaacatcactttccaaacggagtccagtgtggcagagcaggaggcggagttccagagccccaagtatatcttccacaacttcatggagaggctctgggcatacctgactatccagcagctgctggagcaaactgtctccgcatccgatgctgatcagcaggccctccggaaccaagcgctgaatttatcacttgcctacagctttgtcacgcctctcacatctatggtagtcaccaaacccgatgaccaagagcagtctcaagttgctgagaagcccatggaaggcgaaagtagaaacaggaatgtccactcaggttccactttcttcaaatattatctccagggagcaaaaataccaaaaccaggtgacaaagtaggaggtggggggaggggagattgacagattgggctcagtcctggctgtggagggtagtgccttgcccagctcctctggctggtgacagccctcgggcctcagttcagttgtatctgatcaggacttgaccacacagaggcttccttttctccaagaagaggatggaatagacaaggtagtttgagggtttctgccagggggaggcatgacatccctgggggggagcttgagggaggtccattattgttcatctcccagctgttgggggagaggctccccaagttggccgggtgtggggagaggggacatagctgccctctccgcacccactcctgggtggatctcaagccctggctgtgaagacccacaccccacctgagagaagactgcatctgtcgatttctccaaagctggagctgctggctcccggatgaatttcagacctggggttctcagctccaggcaacttggactcccaggacctcctgatgttcctgaccatgctgcttaccaccccttccgccgtctggccatctgtaagctgccttccggccctgcgagggcctcggtttcccacggtggtccttgagcctgccccatagaggggggtggggtaaagcacgcaccacagggccaggccagggacggctgctgagggcacgatgtgaagtaattgtgggtcagttcaacctgggatcatttactggggctggggtgggagtgcatttcctaaggaggctgtcctcgccttcccagctctttgcagctgccccctgccccatccttagcgtctcatctcctcagatgcgagctcacccgggtcctttagctgcccctaggttgtcagaccacaggccatgacagagcagcctctcccacactccttgttcagaggggaccctaggccctaagaggggcacggactggccaagcatgcacatcacagcgctctttggagcagtccttgccagcttcctctctctgaaggcccctctccccactacccagtgtatggacatcaggcctcccctccccaaggcaggacttcacctgtcctttactttcactgagtaggatccactatactctagaggctgactcatgaggaaaccttctaggaagggagggcttcctccgttcagaaagccaacagaggtcccttgaactgttttctgatccccaaatctgcactcgaatgcagctgcacagccaggctggacctatccctgacagcatgctcttctgtttgaaaatctcctgtgacaaaggccattctaggtggagtgtatgtgtggcaggatggggggctggagcttggtggcagcgctgctggttgcccgcctcctgactgccttcctgctccctttctgtttccggatgttcctgccctagtgcctgcttcagcaccaccagccacctcaaatcctgatccagctgtgtctcgtgtcatgaatatgaaaatcgaaggtgcccccaaggccagaggccctgtcctaacagggggatcctgggaggggagtgacctgtcacatgtctcgatgttgaagtagtgagggaacccagccacacctagtcactgctccctccctcaacctcccactcctcaggaaggggctgcctaaacccagactttttcttcttttagaaacaaccatgacaacccaaaccccaggtaagttcccagcccccttggcccctttccacatccttgcccccagcctgcccttcctgctccaggagccgtgccccggctgtcccagcccccatacaggctccctctgccatcctgccactgcctgggcagagtgtggagcggctctgtgtggaccccagacaccgccaggggccagtgaacctgctctcagaccctgagcaaggggttgaggtgactggccagtatgagagggagaaggctgggttctcatggatcgaagtgaccttcaagaaccccctggtatgggttcacgcatcccctgaacacgtggtggtgactcggaaccgaagaagctctgcgtacaagtggaaggagacgctattctcagtgatgcccggcctgaagatgaccatggacaagacgggtctcctgctgctcagtgacccagacaaagtgaccatcggcctgttgttctgggatggccgtggggaggggctccggctccttctgcgtgacactgaccgcttctccagccacgttggagggacccttggccagttttaccaggaggtgctctggggatctccagcagcatcagatgacggcagacgcacgctgagggttcagggcaatgaccactctgccaccagagagcgcaggctggattaccaggaggggcccccgggagtggagatttcctgctggtctgtggagctgtagttctgatggaaggagctgtgcccaccctgtacacttggcttccccctgcaactgcagggccgcttctggggcctggaccaccatggggaggaagagtcccactcattacaaataaagaaaggtggtgtgagcctgggaa

SEQ ID NO: 178467 - DNA, 954 bp, Homo sapiens
  Payload ID: 15174
  Gene Symbol:
  Gene Name: RP5-972B16.2
  ENST ID: ENST00000465127
  CDS Start-End: 108-947
agaaataggagcgcgcaggcgcgacgtgcggctcgcagaacggcgagtagcggagcgggacccgctggaatcatcatccagggacgtgccagaaaccacaagaaaacatggggagggttttcctcacgggagaaaaagccaattccatattaaaacgctacccaagagctaatgggttttttgaagaaataagacagggcaacattgagcgtgagtgcaaagaagaattctgtacatttgaagaagcaagagaagcttttgaaaataatgaaaaaactatcactggggtgatcctgctggctgttggagtctggggcaaacttactctgggcacctatatctcccttattgccgagaactccacaaatgctccctatgtgctcatcggaactggcaccactattgttgtctttggcctgtttggatgctttgctacatgtcgtggtagcccatggatgctgaaactgtatgccatgtttctgtccctggtgttcctggctgagctcgtagctggcatttcagggtttgtgtttcgtcatgagatcaaggacaccttcctgaggacttacacggacgctatgcagacttacaatggcaatgatgagaggagccgggcagtggaccatgtgcagcgcagcctgagctgctgtggtgtgcagaactacaccaactggagcaccagcccctacttcctggagcatggcatcccccccagctgctgcatgaacgaaactgattgtaatccccaggatctacacaatctgactgtggccgccaccaaagttaaccagaagggttgttatgatctggtaactagtttcatggagactaacatgggaatcatcgctggagtggcgtttggaatcgcattctcccagttaattggcatgctgctggcctgctgtctgtcccggttcatcacggccaatcagtatgagatggtgtaaggagaag

SEQ ID NO: 178468 - DNA, 563 bp, Homo sapiens
  Payload ID: 15175
  Gene Symbol:
  Gene Name: RP6-24A23.6
  ENST ID: ENST00000563887
  CDS Start-End: 1-114
cgccgggtgccaagacccccggagagagaagattctgacaacgacgacgacactcacgtgagaatggattttgccagacgtgataatcagttcgactctcccaaaagagagtgattatattgccacaaaaacacattttagaagaaaagtgatgcttatggaattttatcttcgtctactccagatctgcctaaaggaaagaaaactcagaggcttctgagtagaaagcaacccaaatttctacaagcctacaagtggactctggcaattgaatgatcctattcatgcagatcattcatactgctgcttatggatccagtgatttctaattaacaatatttacactgtgctttgttttttgttttctggttttcctccccagtctgtccctttgaaaggaaacagatactatacaagtgagcatctcataactctttccctctttaaaaaaaagtaacttagaatacatataaatttggtcaatgccaattttaataatgtaaaatatttagattcaattttgaagttgaaaaactttaaaccagggcacataaagaaaaaac

SEQ ID NO: 178469 - DNA, 815 bp, Homo sapiens
  Payload ID: 15176
  Gene Symbol: RPAIN
  Gene Name: RPA interacting protein
  ENST ID: ENST00000327154
  CDS Start-End: 324-770
atggtggtgctgctggaaatctagcacctggggagagcctgagacttgtgtatctaattgcctattggacacctccatctgggtaaacccaggcatccagaactttccctcaagacttacctccctcagtgcaggtcgggctggcctcacgcatttcgcttggatgcctaaatctgtctccacgtggggccggtcgataaaacaacacttcccagaatacgctgcgatccattcgcggtctgcacccggaaagtacacctcccaggggtctgtgcgcgcctccagggaacgggtcttgtggctttgtctcccgcgaagaggagatggcggagtcgttgaggtctccgcgccgctccctgtacaaactggtgggctcgccgccttggaaagaggctttccggcagagatgcctggagagaatgagaaacagccgggacaggctcctaaacaggtaccgccaggctggaagcagtgggccagggaattctcagaacagctttctagttcaagaggtgatggaagaagagtggaatgctttgcagtcagtggagaattgtccagaagacttggctcagctggaggagctgatagacatggctgtgctggaggaaattcaacaggagctgatcaaccaagagcagtccatcatcagcgagtatgagaagagcttgcagtttgatgaaaagtgtctcagcatcatgctggctgagtgggaggcaaacccactcatctgtcctgtatgtacaaagcctgtgatacttgggctgtgatcctctagagccagcttggactcacatcattctatggggttgaag

SEQ ID NO: 178470 - DNA, 1394 bp, Homo sapiens
  Payload ID: 15176
  Gene Symbol: RPAIN
  Gene Name: RPA interacting protein
  ENST ID: ENST00000381208
  CDS Start-End: 571-1089
cggccgccatcttggcccaactgctcccctcactccagttgctcagcccgccgctgagcacagccaatccgcggccgtccactcactgtttcggccaatcaccgagcagacggcccggaagctcgagaggctcgtgccaggtcggggggcgaaggcgaggccagcccaccaagcaggggcgtcaccaagggaaagccaatcaccattatttctgaagcccaagggggcgggacgagaagtcaacataatggtggtgctgctggaaatctagcacctggggagagcctgagacttgtgtatctaattgcctattggacacctccatctgggtaaacccaggcatccagaactttccctcaagacttacctccctcagtgcaggtcgggctggcctcacgcatttcgcttggatgcctaaatctgtctccacgtggggccggtcgataaaacaacacttcccagaatacgctgcgatccattcgcggtctgcacccggaaagtacacctcccaggggtctgtgcgcgcctccagggaacgggtcttgtggctttgtctcccgcgaagaggagatggcggagtcgttgaggtctccgcgccgctccctgtacaaactggtgggctcgccgccttggaaagaggctttccggcagagatgcctggagagaatgagaaacagccgggacaggctcctaaacaggtaccgccaggctggaagcagtgggccagggaattctcagaacagctttctagttcaagaggtgatggaagaagagtggaatgctttgcagtcagtggagaattgtccagaagacttggctcagctggaggagctgatagacatggctgtgctggaggaaattcaacaggagctgatcaaccaagagcagtccatcatcagcgagtatgagaagagcttgcagtttgatgaaaagtgtctcagcatcatgctggctgagtgggaggcaaacccactcatctgtcctgtatgtacaaagtacaacctgagaatcacaagcggtgtggtggtgtgtcagtgtggcctgtccatcccatctcatgcctgtgatacttgggctgtgatcctctagagccagcttggactcacatcattctatggggttgaagacaactcattccctctgaggagccttgtacatacaagccttttatttataacttattttgtattgaaacttttaaacaatactgaagaaaaaaaaacttttccgacatctgttcttggtcttttgtgacgcaggttgaagggggaggaatagaaaaagacaaactgccttggaggagataaaccaattttatgtctatcatgttatacaaaaatctagaaataatagatttgtacagaaaaaaatgataataaatgagaacacaaaac

SEQ ID NO: 178471 - DNA, 1535 bp, Homo sapiens
  Payload ID: 15176
  Gene Symbol: RPAIN
  Gene Name: RPA interacting protein
  ENST ID: ENST00000381209
  CDS Start-End: 571-1230
cggccgccatcttggcccaactgctcccctcactccagttgctcagcccgccgctgagcacagccaatccgcggccgtccactcactgtttcggccaatcaccgagcagacggcccggaagctcgagaggctcgtgccaggtcggggggcgaaggcgaggccagcccaccaagcaggggcgtcaccaagggaaagccaatcaccattatttctgaagcccaagggggcgggacgagaagtcaacataatggtggtgctgctggaaatctagcacctggggagagcctgagacttgtgtatctaattgcctattggacacctccatctgggtaaacccaggcatccagaactttccctcaagacttacctccctcagtgcaggtcgggctggcctcacgcatttcgcttggatgcctaaatctgtctccacgtggggccggtcgataaaacaacacttcccagaatacgctgcgatccattcgcggtctgcacccggaaagtacacctcccaggggtctgtgcgcgcctccagggaacgggtcttgtggctttgtctcccgcgaagaggagatggcggagtcgttgaggtctccgcgccgctccctgtacaaactggtgggctcgccgccttggaaagaggctttccggcagagatgcctggagagaatgagaaacagccgggacaggctcctaaacaggtaccgccaggctggaagcagtgggccagggaattctcagaacagctttctagttcaagaggtgatggaagaagagtggaatgctttgcagtcagtggagaattgtccagaagacttggctcagctggaggagctgatagacatggctgtgctggaggaaattcaacaggagctgatcaaccaagagcagtccatcatcagcgagtatgagaagagcttgcagtttgatgaaaagtgtctcagcatcatgctggctgagtgggaggcaaacccactcatctgtcctgtatgtacaaagtacaacctgagaatcacaagcggtgtggtggtgtgtcagtgtggcctgtccatcccatctcattcttctgagttgacagagcagaagcttcgtgcctgtttagagggtagtataaatgagcacagtgcacattgtccccacacacctgaattttcagtcactggaggaacagaagaaaagtccagtcttctcatgagctgtctggcctgtgatacttgggctgtgatcctctagagccagcttggactcacatcattctatggggttgaagacaactcattccctctgaggagccttgtacatacaagccttttatttataacttattttgtattgaaacttttaaacaatactgaagaaaaaaaaacttttccgacatctgttcttggtcttttgtgacgcaggttgaagggggaggaatagaaaaagacaaactgccttggaggagataaaccaattttatgtctatcatgttatacaaaaatctagaaataatagatttgtacagaaaaaaatgataataaatgagaacacaaaac

SEQ ID NO: 178472 - DNA, 1083 bp, Homo sapiens
  Payload ID: 15176
  Gene Symbol: RPAIN
  Gene Name: RPA interacting protein
  ENST ID: ENST00000405578
  CDS Start-End: 12-707
gcgaagaggagatggcggagtcgttgaggtctccgcgccgctccctgtacaaactggtgggctcgccgccttggaaagaggctttccggcagagatgcctggagagaatgagaaacagccgggacaggctcctaaacaggtaccgccaggctggaagcagtgggccagggaattctcagaacagctttctagttcaagaggtgatggaagaagagtggaatgctttgcagtcagtggagaattgtccagaagacttggctcagctggaggagctgatagacatggctgtgctggaggaaattcaacaggagctgatcaaccaagagcagtccatcatcagcgagtatgagaagagcttgcagtttgatgaaaagtgtctcagcatcatgctggctgagtgggaggcaaacccactcatctgtcctgtatgtacaaagtacaacctgagaatcacaagcggtgtggtggtgtgtcagtgtggcctgtccatcccatctcattcttctgagttgacagagcagaagcttcgtgcctgtttagagggtagtataaatgagcacagtgcacattgtccccacacacctgaattttcagtcactggaggaacagaagaaaagtccagtcttctcatgagctgtctggtaagcgtctcctgggacccactctgtggtaagagggacctgtggttggttttattcccaccttgatagaaataatgacctataaacaggtaaatgtttaatgcagtttattatctgaggaatttacctgcatagaaaagtgaaggtaacaagtcatttagactcaaaggccagtcagaaagaagggaagaggcagcatgggatcacggcaagaggattggtctgggagttaggacgcctggctccacacctgctcttctttgatcagtagtagtggttttggattcagctggtcatttcatagtcataagacccagataggccatgctggcaccacttttgcggaaggaaacagggcagaagcatagcagggcagcattaggtttgtctgtcagtggagtttttacagaggtccaagggctattcgctaacctgagtgaca

SEQ ID NO: 178473 - DNA, 1057 bp, Homo sapiens
  Payload ID: 15176
  Gene Symbol: RPAIN
  Gene Name: RPA interacting protein
  Uniprot ID: Q86UA6
  ENST ID: ENST00000536255
  CDS Start-End: 571-891
cggccgccatcttggcccaactgctcccctcactccagttgctcagcccgccgctgagcacagccaatccgcggccgtccactcactgtttcggccaatcaccgagcagacggcccggaagctcgagaggctcgtgccaggtcggggggcgaaggcgaggccagcccaccaagcaggggcgtcaccaagggaaagccaatcaccattatttctgaagcccaagggggcgggacgagaagtcaacataatggtggtgctgctggaaatctagcacctggggagagcctgagacttgtgtatctaattgcctattggacacctccatctgggtaaacccaggcatccagaactttccctcaagacttacctccctcagtgcaggtcgggctggcctcacgcatttcgcttggatgcctaaatctgtctccacgtggggccggtcgataaaacaacacttcccagaatacgctgcgatccattcgcggtctgcacccggaaagtacacctcccaggggtctgtgcgcgcctccagggaacgggtcttgtggctttgtctcccgcgaagaggagatggcggagtcgttgaggtctccgcgccgctccctgtacaaactggtgggctcgccgccttggaaagaggctttccggcagagatgcctggagagaatgagaaacagccgggacaggctcctaaacaggtaccgccaggctggaagcagtgggccagggaattctcagaacagctttctagttcaagaggtgatggaagaagagtggaatgctttgcagtcagtggagaattgtccagaagacttggctcagctggaggagctgatagacatggctgtgctggaggaaattcaacaggagctgatcaaccaaggcctgtgatacttgggctgtgatcctctagagccagcttggactcacatcattctatggggttgaagacaactcattccctctgaggagccttgtacatacaagccttttatttataacttattttgtattgaaacttttaaacaatactgaagaaaaaaaaacttttccgaca

SEQ ID NO: 178474 - DNA, 1471 bp, Homo sapiens
  Payload ID: 15176
  Gene Symbol: RPAIN
  Gene Name: RPA interacting protein
  Uniprot ID: Q86UA6
  ENST ID: ENST00000539417
  CDS Start-End: 571-1008
cggccgccatcttggcccaactgctcccctcactccagttgctcagcccgccgctgagcacagccaatccgcggccgtccactcactgtttcggccaatcaccgagcagacggcccggaagctcgagaggctcgtgccaggtcggggggcgaaggcgaggccagcccaccaagcaggggcgtcaccaagggaaagccaatcaccattatttctgaagcccaagggggcgggacgagaagtcaacataatggtggtgctgctggaaatctagcacctggggagagcctgagacttgtgtatctaattgcctattggacacctccatctgggtaaacccaggcatccagaactttccctcaagacttacctccctcagtgcaggtcgggctggcctcacgcatttcgcttggatgcctaaatctgtctccacgtggggccggtcgataaaacaacacttcccagaatacgctgcgatccattcgcggtctgcacccggaaagtacacctcccaggggtctgtgcgcgcctccagggaacgggtcttgtggctttgtctcccgcgaagaggagatggcggagtcgttgaggtctccgcgccgctccctgtacaaactggtgggctcgccgccttggaaagaggctttccggcagagatgcctggagagaatgagaaacagccgggacaggctcctaaacaggtaccgccaggctggaagcagtgggccagggaattctcagaacagctttctagttcaagaggtgatggaagaagagtggaatgctttgcagtcagtggagaattgtccagaagacttggctcagctggaggagctgatagacatggctgtgctggaggaaattcaacaggagctgatcaaccaagagcagtccatcatcagcgagtatgagaagagcttgcagtttgatgaaaagtgtctcagcatcatgctggctgagtgggaggcaaacccactcatctgtcctgtatgtacaaatcttctgagttgacagagcagaagcttcgtgcctgtttagagggtagtataaatgagcacagtgcacattgtccccacacacctgaattttcagtcactggaggaacagaagaaaagtccagtcttctcatgagctgtctggcctgtgatacttgggctgtgatcctctagagccagcttggactcacatcattctatggggttgaagacaactcattccctctgaggagccttgtacatacaagccttttatttataacttattttgtattgaaacttttaaacaatactgaagaaaaaaaaacttttccgacatctgttcttggtcttttgtgacgcaggttgaagggggaggaatagaaaaagacaaactgccttggaggagataaaccaattttatgtctatcatgttatacaaaaatctagaaataatagatttgtacagaaaaaaatgataataaatgagaacacaaaac

SEQ ID NO: 178475 - DNA, 1359 bp, Homo sapiens
  Payload ID: 15176
  Gene Symbol: RPAIN
  Gene Name: RPA interacting protein
  ENST ID: ENST00000575599
  CDS Start-End: 571-891
cggccgccatcttggcccaactgctcccctcactccagttgctcagcccgccgctgagcacagccaatccgcggccgtccactcactgtttcggccaatcaccgagcagacggcccggaagctcgagaggctcgtgccaggtcggggggcgaaggcgaggccagcccaccaagcaggggcgtcaccaagggaaagccaatcaccattatttctgaagcccaagggggcgggacgagaagtcaacataatggtggtgctgctggaaatctagcacctggggagagcctgagacttgtgtatctaattgcctattggacacctccatctgggtaaacccaggcatccagaactttccctcaagacttacctccctcagtgcaggtcgggctggcctcacgcatttcgcttggatgcctaaatctgtctccacgtggggccggtcgataaaacaacacttcccagaatacgctgcgatccattcgcggtctgcacccggaaagtacacctcccaggggtctgtgcgcgcctccagggaacgggtcttgtggctttgtctcccgcgaagaggagatggcggagtcgttgaggtctccgcgccgctccctgtacaaactggtgggctcgccgccttggaaagaggctttccggcagagatgcctggagagaatgagaaacagccgggacaggctcctaaacaggtaccgccaggctggaagcagtgggccagggaattctcagaacagctttctagttcaagaggtgatggaagaagagtggaatgctttgcagtcagtggagaattgtccagaagacttggctcagctggaggagctgatagacatggctgtgctggaggaaattcaacaggagctgatcaaccaagtcttctgagttgacagagcagaagcttcgtgcctgtttagagggtagtataaatgagcacagtgcacattgtccccacacacctgaattttcagtcactggaggaacagaagaaaagtccagtcttctcatgagctgtctggcctgtgatacttgggctgtgatcctctagagccagcttggactcacatcattctatggggttgaagacaactcattccctctgaggagccttgtacatacaagccttttatttataacttattttgtattgaaacttttaaacaatactgaagaaaaaaaaacttttccgacatctgttcttggtcttttgtgacgcaggttgaagggggaggaatagaaaaagacaaactgccttggaggagataaaccaattttatgtctatcatgttatacaaaaatctagaaataatagatttgtacagaaaaaaatgataataaatgagaacacaaaac

SEQ ID NO: 178476 - DNA, 1423 bp, Homo sapiens
  Payload ID: 15176
  Gene Symbol: RPAIN
  Gene Name: RPA interacting protein
  ENST ID: ENST00000571558
  CDS Start-End: 571-894
cggccgccatcttggcccaactgctcccctcactccagttgctcagcccgccgctgagcacagccaatccgcggccgtccactcactgtttcggccaatcaccgagcagacggcccggaagctcgagaggctcgtgccaggtcggggggcgaaggcgaggccagcccaccaagcaggggcgtcaccaagggaaagccaatcaccattatttctgaagcccaagggggcgggacgagaagtcaacataatggtggtgctgctggaaatctagcacctggggagagcctgagacttgtgtatctaattgcctattggacacctccatctgggtaaacccaggcatccagaactttccctcaagacttacctccctcagtgcaggtcgggctggcctcacgcatttcgcttggatgcctaaatctgtctccacgtggggccggtcgataaaacaacacttcccagaatacgctgcgatccattcgcggtctgcacccggaaagtacacctcccaggggtctgtgcgcgcctccagggaacgggtcttgtggctttgtctcccgcgaagaggagatggcggagtcgttgaggtctccgcgccgctccctgtacaaactggtgggctcgccgccttggaaagaggctttccggcagagatgcctggagagaatgagaaacagccgggacaggctcctaaacaggtaccgccaggctggaagcagtgggccagggaattctcagaacagctttctagttcaagaggtgatggaagaagagtggaatgctttgcagtcagtggagaattgtccagaagacttggctcagctggaggagctgatagacatggctgtgctggaggaaattcaacaggagctgatcaaccaaggtacaacctgagaatcacaagcggtgtggtggtgtgtcagtgtggcctgtccatcccatctcattcttctgagttgacagagcagaagcttcgtgcctgtttagagggtagtataaatgagcacagtgcacattgtccccacacacctgaattttcagtcactggaggaacagaagaaaagtccagtcttctcatgagctgtctggcctgtgatacttgggctgtgatcctctagagccagcttggactcacatcattctatggggttgaagacaactcattccctctgaggagccttgtacatacaagccttttatttataacttattttgtattgaaacttttaaacaatactgaagaaaaaaaaacttttccgacatctgttcttggtcttttgtgacgcaggttgaagggggaggaatagaaaaagacaaactgccttggaggagataaaccaattttatgtctatcatgttatacaaaaatctagaaataatagatttgtacagaaaaaaatgataataaatgagaacacaaaac

SEQ ID NO: 178477 - DNA, 1282 bp, Homo sapiens
  Payload ID: 15176
  Gene Symbol: RPAIN
  Gene Name: RPA interacting protein
  ENST ID: ENST00000573577
  CDS Start-End: 571-894
cggccgccatcttggcccaactgctcccctcactccagttgctcagcccgccgctgagcacagccaatccgcggccgtccactcactgtttcggccaatcaccgagcagacggcccggaagctcgagaggctcgtgccaggtcggggggcgaaggcgaggccagcccaccaagcaggggcgtcaccaagggaaagccaatcaccattatttctgaagcccaagggggcgggacgagaagtcaacataatggtggtgctgctggaaatctagcacctggggagagcctgagacttgtgtatctaattgcctattggacacctccatctgggtaaacccaggcatccagaactttccctcaagacttacctccctcagtgcaggtcgggctggcctcacgcatttcgcttggatgcctaaatctgtctccacgtggggccggtcgataaaacaacacttcccagaatacgctgcgatccattcgcggtctgcacccggaaagtacacctcccaggggtctgtgcgcgcctccagggaacgggtcttgtggctttgtctcccgcgaagaggagatggcggagtcgttgaggtctccgcgccgctccctgtacaaactggtgggctcgccgccttggaaagaggctttccggcagagatgcctggagagaatgagaaacagccgggacaggctcctaaacaggtaccgccaggctggaagcagtgggccagggaattctcagaacagctttctagttcaagaggtgatggaagaagagtggaatgctttgcagtcagtggagaattgtccagaagacttggctcagctggaggagctgatagacatggctgtgctggaggaaattcaacaggagctgatcaaccaaggtacaacctgagaatcacaagcggtgtggtggtgtgtcagtgtggcctgtccatcccatctcatgcctgtgatacttgggctgtgatcctctagagccagcttggactcacatcattctatggggttgaagacaactcattccctctgaggagccttgtacatacaagccttttatttataacttattttgtattgaaacttttaaacaatactgaagaaaaaaaaacttttccgacatctgttcttggtcttttgtgacgcaggttgaagggggaggaatagaaaaagacaaactgccttggaggagataaaccaattttatgtctatcatgttatacaaaaatctagaaataatagatttgtacagaaaaaaatgataataaatgagaacacaaaac

SEQ ID NO: 178478 - DNA, 3817 bp, Homo sapiens
  Payload ID: 15176
  Gene Symbol: RPAIN
  Gene Name: RPA interacting protein
  ENST ID: ENST00000575112
  CDS Start-End: 27-350
gtggctttgtctcccgcgaagaggagatggcggagtcgttgaggtctccgcgccgctccctgtacaaactggtgggctcgccgccttggaaagaggctttccggcagagatgcctggagagaatgagaaacagccgggacaggctcctaaacaggtaccgccaggctggaagcagtgggccagggaattctcagaacagctttctagttcaagaggtgatggaagaagagtggaatgctttgcagtcagtggagaattgtccagaagacttggctcagctggaggagctgatagacatggctgtgctggaggaaattcaacaggagctgatcaaccaaggtacaacctgagaatcacaagcggtgtggtggtgtgtcagtgtggcctgtccatcccatctcattcttctgagttgacagagcagaagcttcgtgcctgtttagagggtagtataaatgagcacagtgcacattgtccccacacacctgaattttcagtcactggaggaacagaagaaaagtccagtcttctcatgagctgtctggtaagcgtctcctgggacccactctgtggtaagagggacctgtggttggttttattcccaccttgatagaaataatgacctataaacaggtaaatgtttaatgcagtttattatctgaggaatttacctgcatagaaaagtgaaggtaacaagtcatttagactcaaaggccagtcagaaagaagggaagaggcagcatgggatcacggcaagaggattggtctgggagttaggacgcctggctccacacctgctcttctttgatcagtagtagtggttttggattcagctggtcatttcatagtcataagacccagataggccatgctggcaccacttttgcggaaggaaacagggcagaagcatagcagggcagcattaggtttgtctgtcagtggagtttttacagaggtccaagggctattcgctaacctgagtgacaactgaggtgtgagggccaggaacacaagtgggtaagggaaccacctgtcttagaagcgtgctataggaaccaatatctcttataatccatgtcctttccatatatgtgtatgtatgtatgtacatgtgtatatatatcacacaaacacacataaaaccaatatgatacgtattattattgcttttagatcccaggcagggggagccttgggattaggagcacactgtacttcaggaagttcatagccatggctttctactgggaatttagaattccttcatggccctgtcattccaaatgcagttaacctacagaggtcatttttattataagcagcattgcctggtaacagccatttcacctttatcaagtttcttccataggtattctactcattcattaaaaaaaaaatgaattgaggactcattaacattgagaaatacacatctctcacagagctcaagccttgggttggtaataagagaacagaataaacaggcagtaccctggagagctgtacaaggagggcttatgggagttcagaggagggtgatctcctttatggtgacaccttcctggaggaggcatttaacttggccttgaagcatggaatcgatctggacagacatggagatctggtgagttgtgggggtagagcttaagtggaagatccccacatagaagaacaaggcagagaagcaggaaactggagtatatacaaagagcatcttgttctacttagctggagcattaggttcatgagggagaggatagttcctgttaggaataggaaacagattcagagaagtgatgtaatctggccaaaattttactactaataagcgatagagctggtgttagaccccaggtctttgtggttccagtgcccctgctgtttcctgctccaggctcaggccttggtggaaggatgccattttccatcagcttgtatggaaagagacatagcaggtgaaagtttaaataaaacccctcactacttcctgttgactacaagcatatgttcccttctgttccagctatccagcactggtagcagatgctcaaatatgcagtgctttcaggcctctgtgctgttgtttaggctgttctgtctgaatgactttgactcctcccactacatttaaggatcatttgcacaaatatttaccaagcactacaatatgccgtgtacttcattcagcctgattcctcacaaggaattggccagtctcagctggccacggtggctcacgcctgtaatcccagcactttgggaggccgaggtgggcagatcacctgaggtcaggagtttaagaccagcctggccaacatggtgaaaccccatctttactaaaaatacaaaacttagctggacatggtggtgggtgcctgtaatctcagctactcgggaggctggggcaggagaatcgcttgaacccgggaggcggaggttgcagtgagctgagatcgtgctgctggattccagcctgggcaacagggtgagattctgtctcaaaaacagaattggtggctgagtgcggtggctcacgcctgtaatccccacactttgggaggctgaggcggtcggatcatctgaggtcaggagttcaagaccagcctggccaatatgatgaaaccctgtctctactaaaaatacaaaaaaattagtcaggcatggtggcacacacctgtaatcccagctactcgcgaggctgaggcaggagaatcacttgaacccaggaagcggaggttgcggtgagcagagattacgccactgctctccagcctgggcaacaagagtgaaactccatctcaaaaaaagcaaaacaaacaaaaaaagaattggccagcctgggaagtccattcctttggagtctgtgttaccattctcaataaacctaatgagggctggcagaggggaactggccagtctctccttgggctttcaccgtacctcatgccatgtcacctgtaacagtgttgtagttacctgcttatgtctttgtccttgagggcaaggcccatatttatttttatttccagtgcttggcatatattaataaagaggtgcttaagatgtttgtacaaatgagttaaggtggagggaggagagttgaggcacaggtcagctggctttggcttctgtcttcttagtaaggtgaacagtgagtcatccacacagattataatggtagcagagctggagtctacagctccttgagtatgaaagtccccttgagtgtgaaagacaaaatgctggtcgggggaagagaaggggaattaaaaggtaagtggaagatggcctaattgccaagtgtacagcttcagctcagcatataattgttatggaccccagttatccactcacctaaccgtcagtgccctgtggctcagagcagcagtgaagctaagtaggaggtgaggtttggaaggtgagtgctgtgcagcagtcttggagatcatagttgacagtgccggctctggggtgggcaggaagaccattgttgggtaagtgaggggaggtgggggtcacagcaaatatgagaaacacagccaggcactgtggttcacacctgtaaccccagcatttaggaaggctgaggtgggaggatcacttgaggccaggaattcaagaccagcctgggcaacatggtgaaaccctgtctctactaaaaatacagaaattagctgggtgtggtggctcgcacctgtactcccagctactcggaaggctgaagtgggaggatggcttgagctcaggaggcagaggttgcagtgagctgagagggcgccattgcgctccaggctgggtgacagcgagattgtgcctt

SEQ ID NO: 178479 - DNA, 561 bp, Homo sapiens
  Payload ID: 15176
  Gene Symbol: RPAIN
  Gene Name: RPA interacting protein
  ENST ID: ENST00000574003
  CDS Start-End: 10-330
gaagaggagatggcggagtcgttgaggtctccgcgccgctccctgtacaaactggtgggctcgccgccttggaaagaggctttccggcagagatgcctggagagaatgagaaacagccgggacaggctcctaaacaggtaccgccaggctggaagcagtgggccagggaattctcagaacagctttctagttcaagaggtgatggaagaagagtggaatgctttgcagtcagtggagaattgtccagaagacttggctcagctggaggagctgatagacatggctgtgctggaggaaattcaacaggagctgatcaaccaagtcttctgagttgacagagcagaagcttcgtgcctgtttagagggtagtataaatgagcacagtgcacattgtccccacacacctgaattttcagtcactggaggaacagaagaaaagtccagtcttctcatgagctgtctggtaagcgtctcctgggacccactctgtggtaagagggacctgtggttggttttattcccaccttgatagaaataatgacctataaacaggtaaatgtt

SEQ ID NO: 178480 - DNA, 8195 bp, Homo sapiens
  Payload ID: 15177
  Gene Symbol: RPGRIP1L
  Gene Name: RPGRIP1-like
  Uniprot ID: Q68CZ1
  ENST ID: ENST00000262135
  CDS Start-End: 95-3802
atgtttctcccgtgctcctctcggccagccgcccgccacgctgtcggcgctatagcaacggtagctagctgcagggccagtggcacgctaggccatgtctggtccaactgatgagactgcaggagacttgcctgtgaaagatacaggtctaaacctctttggaatgggagggttacaagaaacttcaacaacacggacaatgaagtctcgccaggcagtgtcacgtgtcagtcgtgaggaactggaagacagatttttgcgtttgcatgatgagaacattttacttaaacagcatgcccgcaagcaggaggataaaattaaaagaatggccaccaagttaatacggctagttaatgacaagaaaagatatgagcgggttggtggcggccccaagcggctgggacgagatgtggaaatggaagaaatgattgagcagctgcaagagaaagttcatgagcttgaaaaacaaaatgaaaccctcaaaaacagactgatttcagccaaacagcaacttcaaacccagggttacaggcaaactccatacaataatgtacaatctcgtattaacactgggcgtagaaaagcaaatgaaaatgctggtttacaggaatgccccaggaaaggtataaaattccaagatgcagatgtagcagaaactccacatcccatgtttacaaaatatggcaacagtttacttgaagaagccagaggagaaataagaaatttagaaaacgttattcagtcacaaagaggccagatagaggagttagagcacttggctgagatcctgaaaactcagttgaggagaaaagaaaatgaaattgagttatctcttcttcagcttcgagaacagcaagctacagatcaaaggtcaaatattcgggacaatgtagaaatgattaagcttcataaacagctagtagagaaaagcaatgctctttcagcaatggaaggaaaatttattcagcttcaagagaagcaaagaactctcagaatcagccacgatgctttgatggcaaatggggatgaattaaacatgcaacttaaagagcagcgtttaaaatgctgcagtcttgagaaacaattacattctatgaagttttctgaaagaagaatagaagagctgcaggatagaattaatgatttagaaaaggaacgggaacttttaaaggaaaactatgataaactttatgacagtgccttcagtgctgcccatgaagagcaatggaagttaaaggagcaacagctgaaagtgcagattgctcagctcgagactgccttgaagtctgacttaacagacaaaactgaaatccttgacagattaaaaactgaaagagatcaaaatgaaaaactcgttcaagagaatagagaactacagttacagtatctggaacaaaagcaacaacttgatgaacttaaaaaacgcataaaattgtacaaccaggagaatgatattaatgctgatgaattgagtgaagctctcctacttataaaggctcaaaaagaacaaaaaaatggagacctttcctttttagtgaaagtagatagtgaaattaataaagatctagaacgctctatgagagagctgcaagcaactcatgcagaaacggtgcaagagctggaaaagacaagaaacatgctaattatgcaacacaaaattaataaagattatcagatggaggttgaggcagtgacccgtaagatggaaaatttgcagcaagattatgaactcaaagtggaacagtatgttcatcttcttgatatcagggctgcacgtatccataaactagaagcccaattaaaggatattgcctatggcaccaagcagtacaaatttaaaccagaaatcatgccagatgactctgttgatgaatttgatgaaaccatccacttagaacgaggcgaaaatctatttgaaatccatatcaacaaagtaaccttttcttctgaagttttacaggcatctggagataaagagcctgtcactttctgtacctatgctttctatgattttgaactacagacaactcccgtagtgcgaggccttcatcccgaatataacttcacttctcaatatcttgttcatgttaatgacttatttttgcaatatattcagaagaatactatcacccttgaggtccaccaggcttatagcacagaatatgaaacaattgcagcatgtcaattaaaatttcacgaaattcttgaaaaaagcggccgaatattttgtacagcaagtttgattggaacaaaaggagacatcccaaattttggcacagtggaatactggttccgattaagagttcccatggatcaagcaattcgactttatcgagaaagggcaaaggctttggggtatataacatcaaattttaaggggccagagcatatgcagtcgttaagtcagcaagcacccaaaactgctcaactcagttctacagattccacagatggcaacttaaatgaacttcacattacaataagatgttgcaaccacctgcagtcccgagcaagccacctgcagccacacccatatgttgtgtacaagttttttgattttgcagaccatgatacagctatcattcccagtagcaatgatccacagtttgatgatcatatgtatttcccagtgccaatgaatatggacttggatcgataccttaagtcagagtctctgagtttttatgtttttgatgatagtgatacccaggagaatatttacataggaaaagtcaatgtgcctctgatttcgttggcacatgacaggtgtatctcaggaatatttgagttaacagaccatcaaaagcatcctgctggcaccatccatgttatattgaaatggaaatttgcttaccttccaccaagtggatcaataacaactgaagacttaggaaatttcattcgcagcgaagagccagaagttgttcaaagacttcctccagcatcctctgttagcacactagttttagcaccaagacctaaaccaagacaacgtttaacacctgtagataagaaggtatctttcgtggatatcatgccacatcagagtgatgtttcacaagaaggcagtgtagatgaggtaaaagagaatactgagaaaatgcagcaaggaaaagatgatgtgtctttactatctgaaggtcagcttgcagaacaaagcttggcatcttctgaagatgaaacagaaataacagaggacttggaaccagaagttgaagaggacatgtcagcttctgacagtgatgactgtattattccaggtcctatctccaagaatatcaaacagccatcagaaaaaattcggattgagatcatagctctaagccttaatgattctcaagtaaccatggatgacactatccaacggctgtttgttgagtgtcgattctacagtcttcctgctgaagagacacccgtgtcacttccaaaacccaagagtgggcagtgggtctactataactatagcaatgtgatctacgtggataaagaaaacaacaaagcaaagagagacatcttaaaagctatactacaaaaacaagagatgcctaatagaagccttcgcttcaccgtggtcagtgaccctccagaggacgagcaggacctggagtgtgaggacattggcgtggctcacgtcgaccttgccgacatgtttcaggaagggagggacctcattgagcaaaatatcgatgtttttgatgcacgagcagatggtgaaggtattggcaagctcagggtaacagtcgaagctctccatgccctccagtctgtctacaagcaatacagagatgacttggaggcttgaaagcaaatgctccagaggcatctcctactcctcagtaaatgctcacatgaaagttcctacatgagatttttgtaattactctggtgtatataatctataattcatgggaagctgggagcggggagacctgggtttgaagtgttgaagttttgtatactttttcatttgtttatttctctattccctccttctcataactgccacccctcaggacttaagttctccataatgggcagtaccttctcaataatttatacctacgtgatagcgtgagaaagtctatttgcattttcaacattttcttaggaagaaccgaaatgcaattcccatttttatttttaataagcaaaagcataaatcttagaaaacctatgaaaaagaaatacttttatgttatccctaatcgtcccactaaatggaatgcctatgattagcttcattaagagttttatactgtgaagattttattagaagcaatatatgaaaattacttggattaatgtgttaatcttcctctttaaaatgctaatatccattttatgcacattaaagctcagtatgcattttctttgatgcatgcagtttctatcaattaaatataaagaatgaaacttagcaccaacttattcaatgactgcaagttttttgtctttctttcttaaaagttcattctatttgtattattttcatacatttgtaatggtgacccagggatgtatatataaaaaggagatagttatatagatagatgtgaaatttacacgttgaaaacttagtatatgacacagaaagaaattatgaaaagtataactcaaattctgatatgcttagttagacgtgaaaggagtatctttttatcattttttaaatttacatcaagccagtacagtgccagggtgtatctgggtaaccagatcctcgaaaagcagctctgaaagttaattttctagcttttacccaatctcactgaaggatttaattgatatttttaatggagctgtgaatcaatgctgcaaaggaattgtctctagaggtctaggatataatgcatttcattttttaatttacttttttatttgtcattttcttcaaaggatttttataggctgtgggttttcactgtttgcaaacaggctatgttccttcttaagcatatgtaaagtattcagggagataagtaatttattaaaatctacctaatttgccgtgatatattaaatctctgcttcagtgatcacagaccatttcatttagagaattaggcattccctctttgtgtgattaaagctctggaaaatgagttctttgctcctatttgtgaacattcaaagcctgctaatggcaagaagatggaatagattatgagacaattcattacagttcaatagaaaaaaaaagcagctataatgcaaaaatgcaagtatgaatatctgcatatagtttgaaccatctgtgctctaatggcttcaataatgactctcgtctttagaaggctttgaaatgacatccgtacaatattaatttgttgatgtacattgtgggaccagtagagtatgatctgaccacagaaatctataaattctgtctataccactgggcctccctgtcctggggcctgccatctccgagaagaatcttgctctcatccaactctgcaaatcttcataacaactcgttcctctggaaccttctggagaccacaaacatctgcagactaaacctctccagtcctagtaaacaaccacatgtttgttgtcacttcggctggctctgagctcatttttttggcccctttttctagctttctttggctttatgcagttacagtgtcattaaggcccataatattccctgcagtaatttaaaacagccagattataccctgggattaactgagtggtttttgagacatttattgtggtattctcccaggaggtttgtattattgttgtaaaatgttacatcccaaactaaataacccttctgcagggagaagaaccagattgcactgacttcttaggatcattaagtggaaaggaaaagtttttcttagaaaacttatgggacccagtcacctgtatggaatgtatatctcagacaagatgagagaaacagccatgtttctgtcacattgtttactgtcatattaaagatatctagttttaaaatattcagtttcaaactattgcgaattttcacaacactcattttcatagctaattgctgctgacacattttgaagtggcgaggtagtattgaacgctgtcatgtggatacttcagttgggtttcataatctgtttgagaattttgtttgttttatcttgtggtaactggaggccattgaaaagcttaccaccttttgggttaaagagcagtggatttctcttggtgagccaaactggatccattgaagagggcttggcgtcaggggccaccagcagtggccttgccacacagataccagcttaaggtgttgctggtgtgaacatacacttcttggtgtaactagaccagtgcacgcagcacttttttgggctgtaatgcttttagtttggaaatacaaatagagatgtgatgtggtatgtgggagagtgtattttacatgtatttttgcctactgtagtagaaatgtcaaattcccagccactgtcatgaaaagcagttgacaaaaataagttttatggtttacagtgtggtttacgtaaagaacatttctcttcactctcagtttcaccatgttttctaaattatcatggtttactgccatttaacttaaattagtttttttaaaaatacataaagaatatgtttaatcaaataaagaaaggccacactgaaattctgctgttcctgccattcattcgttaccacaaaacacaaataatttctatgtgttatgaagacatgtgggctgagaagtggtcatgtgattggagaggttttgcgtgcactcatgttcccacaacaaaacataaattattttagtaatctgacatcaagagctgtgaaaatgaaaaccagttcttacacatgttctaacaagaatctgattaacatttttgtggatatggaaaattttttttttagtcaaactggcactattgctgaatgtagaatgatttccttatgcactagatagaaaaatgtgaatcatgtctgtgaacaaatatgagaataaaatgtcatctttgtgtaggacaaaacaaccaggagagagattttgggataaaaattatcaagtgattgacaatatcaggatgataattcatccccaactatcagagtacattttaataagtcactcatgcctgaaggcctctgactaccttaacaaagaaaaactaaacccgtgatttattagagattgggcaacatgcctaattaaatccatgaatgggaacaaacagatttacatcccctttgttcagaacaaaaacaacctctaggtcaaccagaaagctagaaaatatcaaagcaagagaaacaagtgtttttaaaactaaaaatatagaattagaaaacatctcctcatcctaatctcttttatcttacaaggtagaattttcacttccatttcaaagtgccaccagtggactgcaccctccagcctgaccgcctggaaaattggacccatattactggtattcttataccttttgttcttgccctttcattttccatatgacattcactaatatatcaagctatgtttttccttcaggcttttggaagtgcaatctggtactcttagacttcgatcatgacctgttttctgaggtagatgctgtttgacttttctgctttttgcctcttctcactctattgagagtcacctttttcatccctagaacagcattacctctgtcttcactgtgcaccatttgttttctttttaaataaaatttaacatcttgatttttatattcctactatctaatttgttcacatctatattcaactgaacatctcctcccatctgtctattctcctgcttatttttatctagtcaaagcacattttttttccttcctctttgctgtttttttcctttctctttactgtttcttttcttggtgagacagccacttcttgagataccgacatctgtgaccagtggccttcccaaaacgttcctttgtgttaagatttgtcttaatttaacatgacaggggcactcttagccattatgaaactgaggaaacagcaagctaatttttgtatctttgcttcttatacgtttttatagtgaagtaacagaggctggaactcagaaagctctcaggaatcactggtaaggaactgaagcataaggaagttttttaaaaattcaaggatatatgtcattaaaatccagctagatttgatgcaaatgttttgtcatagttacacat

SEQ ID NO: 178481 - DNA, 5297 bp, Homo sapiens
  Payload ID: 15177
  Gene Symbol: RPGRIP1L
  Gene Name: RPGRIP1-like
  Uniprot ID: Q68CZ1
  ENST ID: ENST00000379925
  CDS Start-End: 52-3999
tcggcgctatagcaacggtagctagctgcagggccagtggcacgctaggccatgtctggtccaactgatgagactgcaggagacttgcctgtgaaagatacaggtctaaacctctttggaatgggagggttacaagaaacttcaacaacacggacaatgaagtctcgccaggcagtgtcacgtgtcagtcgtgaggaactggaagacagatttttgcgtttgcatgatgagaacattttacttaaacagcatgcccgcaagcaggaggataaaattaaaagaatggccaccaagttaatacggctagttaatgacaagaaaagatatgagcgggttggtggcggccccaagcggctgggacgagatgtggaaatggaagaaatgattgagcagctgcaagagaaagttcatgagcttgaaaaacaaaatgaaaccctcaaaaacagactgatttcagccaaacagcaacttcaaacccagggttacaggcaaactccatacaataatgtacaatctcgtattaacactgggcgtagaaaagcaaatgaaaatgctggtttacaggaatgccccaggaaaggtataaaattccaagatgcagatgtagcagaaactccacatcccatgtttacaaaatatggcaacagtttacttgaagaagccagaggagaaataagaaatttagaaaacgttattcagtcacaaagaggccagatagaggagttagagcacttggctgagatcctgaaaactcagttgaggagaaaagaaaatgaaattgagttatctcttcttcagcttcgagaacagcaagctacagatcaaaggtcaaatattcgggacaatgtagaaatgattaagcttcataaacagctagtagagaaaagcaatgctctttcagcaatggaaggaaaatttattcagcttcaagagaagcaaagaactctcagaatcagccacgatgctttgatggcaaatggggatgaattaaacatgcaacttaaagagcagcgtttaaaatgctgcagtcttgagaaacaattacattctatgaagttttctgaaagaagaatagaagagctgcaggatagaattaatgatttagaaaaggaacgggaacttttaaaggaaaactatgataaactttatgacagtgccttcagtgctgcccatgaagagcaatggaagttaaaggagcaacagctgaaagtgcagattgctcagctcgagactgccttgaagtctgacttaacagacaaaactgaaatccttgacagattaaaaactgaaagagatcaaaatgaaaaactcgttcaagagaatagagaactacagttacagtatctggaacaaaagcaacaacttgatgaacttaaaaaacgcataaaattgtacaaccaggagaatgatattaatgctgatgaattgagtgaagctctcctacttataaaggctcaaaaagaacaaaaaaatggagacctttcctttttagtgaaagtagatagtgaaattaataaagatctagaacgctctatgagagagctgcaagcaactcatgcagaaacggtgcaagagctggaaaagacaagaaacatgctaattatgcaacacaaaattaataaagattatcagatggaggttgaggcagtgacccgtaagatggaaaatttgcagcaagattatgaactcaaagtggaacagtatgttcatcttcttgatatcagggctgcacgtatccataaactagaagcccaattaaaggatattgcctatggcaccaagcagtacaaatttaaaccagaaatcatgccagatgactctgttgatgaatttgatgaaaccatccacttagaacgaggcgaaaatctatttgaaatccatatcaacaaagtaaccttttcttctgaagttttacaggcatctggagataaagagcctgtcactttctgtacctatgctttctatgattttgaactacagacaactcccgtagtgcgaggccttcatcccgaatataacttcacttctcaatatcttgttcatgttaatgacttatttttgcaatatattcagaagaatactatcacccttgaggtccaccaggcttatagcacagaatatgaaacaattgcagcatgtcaattaaaatttcacgaaattcttgaaaaaagcggccgaatattttgtacagcaagtttgattggaacaaaaggagacatcccaaattttggcacagtggaatactggttccgattaagagttcccatggatcaagcaattcgactttatcgagaaagggcaaaggctttggggtatataacatcaaattttaaggggccagagcatatgcagtcgttaagtcagcaagcacccaaaactgctcaactcagttctacagattccacagatggcaacttaaatgaacttcacattacaataagatgttgcaaccacctgcagtcccgagcaagccacctgcagccacacccatatgttgtgtacaagttttttgattttgcagaccatgatacagctatcattcccagtagcaatgatccacagtttgatgatcatatgtatttcccagtgccaatgaatatggacttggatcgataccttaagtcagagtctctgagtttttatgtttttgatgatagtgatacccaggagaatatttacataggaaaagtcaatgtgcctctgatttcgttggcacatgacaggtgtatctcaggaatatttgagttaacagaccatcaaaagcatcctgctggcaccatccatgttatattgaaatggaaatttgcttaccttccaccaagtggatcaataacaactgaagacttaggaaatttcattcgcagcgaagagccagaagttgttcaaagacttcctccagcatcctctgttagcacactagttttagcaccaagacctaaaccaagacaacgtttaacacctgtagataagaaggtatctttcgtggatatcatgccacatcagagtgatgagacttctcctcctcctgaagataggaaggaaatttcaccagaggtagagcatataccagaaatagaaattaatatgctgactgttccacatgttcccaaggtttcacaagaaggcagtgtagatgaggtaaaagagaatactgagaaaatgcagcaaggaaaagatgatgtgtctttactatctgaaggtcagcttgcagaacaaagcttggcatcttctgaagatgaaacagaaataacagaggacttggaaccagaagttgaagaggacatgtcagcttctgacagtgatgactgtattattccaggtcctatctccaagaatatcaaacagagtctcgcattgtctcccgggctggggtgcagtagcgcgatctcagctcactgcaacttccgcctcccgggttccagcgattttcctgcctcagcctcccaagtagatgggattacaggtgcctgccaccacacccagccatcagaaaaaattcggattgagatcatagctctaagccttaatgattctcaagtaaccatggatgacactatccaacggctgtttgttgagtgtcgattctacagtcttcctgctgaagagacacccgtgtcacttccaaaacccaagagtgggcagtgggtctactataactatagcaatgtgatctacgtggataaagaaaacaacaaagcaaagagagacatcttaaaagctatactacaaaaacaagagatgcctaatagaagccttcgcttcaccgtggtcagtgaccctccagaggacgagcaggacctggagtgtgaggacattggcgtggctcacgtcgaccttgccgacatgtttcaggaagggagggacctcattgagcaaaatatcgatgtttttgatgcacgagcagatggtgaaggtattggcaagctcagggtaacagtcgaagctctccatgccctccagtctgtctacaagcaatacagagatgacttggaggcttgaaagcaaatgctccagaggcatctcctactcctcagtaaatgctcacatgaaagttcctacatgagatttttgtaattactctggtgtatataatctataattcatgggaagctgggagcggggagacctgggtttgaagtgttgaagttttgtatactttttcatttgtttatttctctattccctccttctcataactgccacccctcaggacttaagttctccataatgggcagtaccttctcaataatttatacctacgtgatagcgtgagaaagtctatttgcattttcaacattttcttaggaagaaccgaaatgcaattcccatttttatttttaataagcaaaagcataaatcttagaaaacctatgaaaaagaaatacttttatgttatccctaatcgtcccactaaatggaatgcctatgattagcttcattaagagttttatactgtgaagattttattagaagcaatatatgaaaattacttggattaatgtgttaatcttcctctttaaaatgctaatatccattttatgcacattaaagctcagtatgcattttctttgatgcatgcagtttctatcaattaaatataaagaatgaaacttagcaccaacttattcaatgactgcaagttttttgtctttctttcttaaaagttcattctatttgtattattttcatacatttgtaatggtgacccagggatgtatatataaaaaggagatagttatatagatagatgtgaaatttacacgttgaaaacttagtatatgacacagaaagaaattatgaaaagtataactcaaattctgatatgcttagttagacgtgaaaggagtatctttttatcattttttaaatttacatcaagccagtacagtgccagggtgtatctgggtaaccagatcctcgaaaagcagctctgaaagttaattttctagcttttacccaatctcactgaaggatttaattgatatttttaatggagctgtgaatcaatgctgcaaaggaattgtctctagaggtctaggatataatgcatttcattttttaatttacttttttatttgtcattttcttcaaaggatttttataggctgtgggttttcactgtttgcaaacaggctatgttccttcttaagcatatgtaaagtattcagggagataagtaatttattaaaatctacctaatttgccgtgatatattaaatctctgcttcagtgatcacagaccatttcatttagagaattaggcattccctctttgtgtgattaaagctctggaaaat

SEQ ID NO: 178482 - DNA, 1107 bp, Homo sapiens
  Payload ID: 15177
  Gene Symbol: RPGRIP1L
  Gene Name: RPGRIP1-like
  ENST ID: ENST00000562230
  CDS Start-End: 46-1107
ggcgctatagcaacggtagctagctgcagggccagtggcacggccatgtctggtccaactgatgagactgcaggagacttgcctgtgaaagatacaggtctaaacctctttggaatgggagggttacaagaaacttcaacaacacggacaatgaagtctcgccaggcagtgtcacgtgtcagtcgtgaggaactggaagacagatttttgcgtttgcatgatgagaacattttacttaaacagcatgcccgcaagcaggaggataaaattaaaagaatggccaccaagttaatacggctagttaatgacaagaaaagatatgagcgggttggtggcggccccaagcggctgggacgagatgtggaaatggaagaaatgattgagcagctgcaagagaaagttcatgagcttgaaaaacaaaatgaaaccctcaaaaacagactgatttcagccaaacagcaacttcaaacccagggttacaggcaaactccatacaataatgtacaatctcgtattaacactgggcgtagaaaagcaaatgaaaatgctggtttacaggaatgccccaggaaaggtataaaattccaagatgcagatgtagcagaaactccacatcccatgtttacaaaatatggcaacagtttacttgaagaagccagaggagaaataagaaatttagaaaacgttattcagtcacaaagaggccagatagaggagttagagcacttggctgagatcctgaaaactcagttgaggagaaaagaaaatgaaattgagttatctcttcttcagcttcgagaacagcaagctacagatcaaaggtcaaatattcgggacaatgtagaaatgattaagcttcataaacagctagtagagaaaagcaatgctctttcagcaatggaaggaaaatttattcagcttcaagagaagcaaagaactctcagaatcagccacgatgctttgatggcaaatggggatgaattaaacatgcaacttaaagagcagcgtttaaaatgctgcagtcttgagaaacaattacattctatgaagttttctgaaagaagaatagaagagctgcaggatagaattaatgatttagaaaaggaa

SEQ ID NO: 178483 - DNA, 2429 bp, Homo sapiens
  Payload ID: 15177
  Gene Symbol: RPGRIP1L
  Gene Name: RPGRIP1-like
  ENST ID: ENST00000568653
  CDS Start-End: 53-430
gtcggcgctatagcaacggtagctagctgcagggccagtggcacgctaggccatgtctggtccaactgatgagactgcaggagacttgcctgtgaaagatacaggtctaaacctctttggaatgggagggttacaagaaacttcaacaacacggacaatgaagtctcgccaggcagtgtcacgtgtcagtcgtgaggaactggaagacagatttttgcgtttgcatgatgagaacattttacttaaacagcatgcccgcaagcaggaggataaaattaaaaggttcaaagaaaaggtgagacaaccattgaagaatgaaaatagggtttttctgcttagaatccatcctaaggaggtggttccagttcagtttctactctgtggacttcaacaacccactggcatgctatgtgcaggccttttactttgagttgggttttagtcatgatgatggctgttttcaagatttgtgactcacttgcctgattccttttctgaccattatcccacacacatcagccagtcagaatgaggcatgtagtctgctatgaccacctaacaatttttttctttgtaagcctaattggtcagtaaaagaatcgaattcacatccttgacctcattagtaatttgtcatagccagaaaataaaaaacaactgaataatgagccatgtagtttaatgggaaaaggactgagctaggaatcaagttgtatgtatgcattctgttatctctctgccactagcctgtggtatgtatgttcaagccatttaacctcctgaaagttcgttttactttagctacgagaataatgatccaatgaacactatgacccaaaagctctaaatgcctctcgatctcacaccactgactgtgacctagatacatgggtagaactgtctttaaatttatcttttagaagtaaataggccaggcacagtggctcacgcctgtaatcccagcactttgggaggctgaggcgggcggatcacttgaggtcaggagttcaagaccagcctggctaacatgatgaaaccccatttctactaaaaatacaaaaaattagctgggcatggtggcacaagcctgtaatcctagctactcggaggttgaggcaggaaaattgcttgaacccgggaggcagaggttgcagagccaagatcgcgccattggactgagcttgggcaataagagcgaaactctgtctaaaaaacaaaacaaaacaaaaaagtaaatagtttattttctataaatgtagattttataaactacctttttattttttaattttttttttttttttttttgagaggaagtctttgttgcccaggctggagtgcagtggtaagatctcggctcactgcaaccttcgcctcccgggttcaagtgattctcctgcctcagcctcccgagtagctgggatcacaggcgcctgccaccatacctggctaatttttatgttttagtagagacggggtttcaccatgttggccaggctggtctcaaatgaactccagacctcaggtgatccgtctgccttggcctcccaaagtgttgggattacagccatgagccacctcgtctagccaaaactacctttttaaataagcactcagactttgccagatcacgtatgattcattaatatgataaaataatcaaatccagcaaatggaatgtatggctattacgagacaaacagatgcaatcatgtttcttgacaaagtttatttgaatatcatttgaagaatttaaagataccctgccttaaaaattagggtcatttatttttacctgggtgttaactgcctttttatattaaatctgtgtctttcttttgaatgtaatctacatctctgtgtgaaagtctctctgtaacagaaaattcagatatttaggttgacgtctcattcatatgacaaccttacttttgtgcacaggccattgggtggggcttaggaccctaaactcattaaagggccaggtagagtgtgtggccctcttggactgtgatacctggccaaatttcccagtgatatatcattctcggaattaggtggaaaaggaactaatccattgattattttactagagtgtttgtggtactcttggatcttggtttttattatcctgtatcctttataaagcatgcttaatggatgtgcctcaagggaaagagaaaacaatcttaactgattatgttatgcatagctctccctgatgccacatgctgtaggccgagtagccagagtgtggatagacatgtattactaccgcatttacagcggactctgcttagggcagaaaaaaggttgttctatgacatcccaaagctattaaaggtttttttatttcacttttgttcccttaagtaaaagcttctgtccataaccacgctaaaataaagcaaaacccatttaaagaaaaa

SEQ ID NO: 178484 - DNA, 3877 bp, Homo sapiens
  Payload ID: 15177
  Gene Symbol: RPGRIP1L
  Gene Name: RPGRIP1-like
  ENST ID: ENST00000564374
  CDS Start-End: 95-3856
atgtttctcccgtgctcctctcggccagccgcccgccacgctgtcggcgctatagcaacggtagctagctgcagggccagtggcacgctaggccatgtctggtccaactgatgagactgcaggagacttgcctgtgaaagatacaggtctaaacctctttggaatgggagggttacaagaaacttcaacaacacggacaatgaagtctcgccaggcagtgtcacgtgtcagtcgtgaggaactggaagacagatttttgcgtttgcatgatgagaacattttacttaaacagcatgcccgcaagcaggaggataaaattaaaagaatggccaccaagttaatacggctagttaatgacaagaaaagatatgagcgggttggtggcggccccaagcggctgggacgagatgtggaaatggaagaaatgattgagcagctgcaagagaaagttcatgagcttgaaaaacaaaatgaaaccctcaaaaacagactgatttcagccaaacagcaacttcaaacccagggttacaggcaaactccatacaataatgtacaatctcgtattaacactgggcgtagaaaagcaaatgaaaatgctggtttacaggaatgccccaggaaaggtataaaattccaagatgcagatgtagcagaaactccacatcccatgtttacaaaatatggcaacagtttacttgaagaagccagaggagaaataagaaatttagaaaacgttattcagtcacaaagaggccagatagaggagttagagcacttggctgagatcctgaaaactcagttgaggagaaaagaaaatgaaattgagttatctcttcttcagcttcgagaacagcaagctacagatcaaaggtcaaatattcgggacaatgtagaaatgattaagcttcataaacagctagtagagaaaagcaatgctctttcagcaatggaaggaaaatttattcagcttcaagagaagcaaagaactctcagaatcagccacgatgctttgatggcaaatggggatgaattaaacatgcaacttaaagagcagcgtttaaaatgctgcagtcttgagaaacaattacattctatgaagttttctgaaagaagaatagaagagctgcaggatagaattaatgatttagaaaaggaacgggaacttttaaaggaaaactatgataaactttatgacagtgccttcagtgctgcccatgaagagcaatggaagttaaaggagcaacagctgaaagtgcagattgctcagctcgagactgccttgaagtctgacttaacagacaaaactgaaatccttgacagattaaaaactgaaagagatcaaaatgaaaaactcgttcaagagaatagagaactacagttacagtatctggaacaaaagcaacaacttgatgaacttaaaaaacgcataaaattgtacaaccaggagaatgatattaatgctgatgaattgagtgaagctctcctacttataaaggctcaaaaagaacaaaaaaatggagacctttcctttttagtgaaagtagatagtgaaattaataaagatctagaacgctctatgagagagctgcaagcaactcatgcagaaacggtgcaagagctggaaaagacaagaaacatgctaattatgcaacacaaaattaataaagattatcagatggaggttgaggcagtgacccgtaagatggaaaatttgcagcaagattatgaactcaaagtggaacagtatgttcatcttcttgatatcagggctgcacgtatccataaactagaagcccaattaaaggatattgcctatggcaccaagcagtacaaatttaaaccagaaatcatgccagatgactctgttgatgaatttgatgaaaccatccacttagaacgaggcgaaaatctatttgaaatccatatcaacaaagtaaccttttcttctgaagttttacaggcatctggagataaagagcctgtcactttctgtacctatgctttctatgattttgaactacagacaactcccgtagtgcgaggccttcatcccgaatataacttcacttctcaatatcttgttcatgttaatgacttatttttgcaatatattcagaagaatactatcacccttgaggtccaccaggcttatagcacagaatatgaaacaattgcagcatgtcaattaaaatttcacgaaattcttgaaaaaagcggccgaatattttgtacagcaagtttgattggaacaaaaggagacatcccaaattttggcacagtggaatactggttccgattaagagttcccatggatcaagcaattcgactttatcgagaaagggcaaaggctttggggtatataacatcaaattttaaggggccagagcatatgcagtcgttaagtcagcaagcacccaaaactgctcaactcagttctacagattccacagatggcaacttaaatgaacttcacattacaataagatgttgcaaccacctgcagtcccgagcaagccacctgcagccacacccatatgttgtgtacaagttttttgattttgcagaccatgatacagctatcattcccagtagcaatgatccacagtttgatgatcatatgtatttcccagtgccaatgaatatggacttggatcgataccttaagtcagagtctctgagtttttatgtttttgatgatagtgatacccaggagaatatttacataggaaaagtcaatgtgcctctgatttcgttggcacatgacaggtgtatctcaggaatatttgagttaacagaccatcaaaagcatcctgctggcaccatccatgttatattgaaatggaaatttgcttaccttccaccaagtggatcaataacaactgaagacttaggaaatttcattcgcagcgaagagccagaagttgttcaaagacttcctccagcatcctctgttagcacactagttttagcaccaagacctaaaccaagacaacgtttaacacctgtagataagaaggtatctttcgtggatatcatgccacatcagagtgatgagacttctcctcctcctgaagataggaaggaaatttcaccagaggtagagcatataccagaaatagaaattaatatgctgactgttccacatgttcccaaggtttcacaagaaggcagtgtagatgaggtaaaagagaatactgagaaaatgcagcaaggaaaagatgatgtgtctttactatctgaaggtcagcttgcagaacaaagcttggcatcttctgaagatgaaacagaaataacagaggacttggaaccagaagttgaagaggacatgtcagcttctgacagtgatgactgtattattccaggtcctatctccaagaatatcaaacagccatcagaaaaaattcggattgagatcatagctctaagccttaatgattctcaagtaaccatggatgacactatccaacggctgtttgttgagtgtcgattctacagtcttcctgctgaagagacacccgtgtcacttccaaaacccaagagtgggcagtgggtctactataactatagcaatgtgatctacgtggataaagaaaacaacaaagcaaagagagacatcttaaaagctatactacaaaaacaagagatgcctaatagaagccttcgcttcaccgtggtcagtgaccctccagaggacgagcaggacctggagtgtgaggacattggcgtggctcacgtcgaccttgccgacatgtttcaggaagggagggacctcattgagcaaaatatcgatggtatgggtgaaagtgttgctcagtttgtgcaaccaacaattgctgaactccaaactctttattaaaaccttctttttgctggctcc

SEQ ID NO: 178485 - DNA, 4193 bp, Homo sapiens
  Payload ID: 15177
  Gene Symbol: RPGRIP1L
  Gene Name: RPGRIP1-like
  ENST ID: ENST00000563746
  CDS Start-End: 53-3898
gtcggcgctatagcaacggtagctagctgcagggccagtggcacgctaggccatgtctggtccaactgatgagactgcaggagacttgcctgtgaaagatacaggtctaaacctctttggaatgggagggttacaagaaacttcaacaacacggacaatgaagtctcgccaggcagtgtcacgtgtcagtcgtgaggaactggaagacagatttttgcgtttgcatgatgagaacattttacttaaacagcatgcccgcaagcaggaggataaaattaaaagaatggccaccaagttaatacggctagttaatgacaagaaaagatatgagcgggttggtggcggccccaagcggctgggacgagatgtggaaatggaagaaatgattgagcagctgcaagagaaagttcatgagcttgaaaaacaaaatgaaaccctcaaaaacagactgatttcagccaaacagcaacttcaaacccagggttacaggcaaactccatacaataatgtacaatctcgtattaacactgggcgtagaaaagcaaatgaaaatgctggtttacaggaatgccccaggaaaggtataaaattccaagatgcagatgtagcagaaactccacatcccatgtttacaaaatatggcaacagtttacttgaagaagccagaggagaaataagaaatttagaaaacgttattcagtcacaaagaggccagatagaggagttagagcacttggctgagatcctgaaaactcagttgaggagaaaagaaaatgaaattgagttatctcttcttcagcttcgagaacagcaagctacagatcaaaggtcaaatattcgggacaatgtagaaatgattaagcttcataaacagctagtagagaaaagcaatgctctttcagcaatggaaggaaaatttattcagcttcaagagaagcaaagaactctcagaatcagccacgatgctttgatggcaaatggggatgaattaaacatgcaacttaaagagcagcgtttaaaatgctgcagtcttgagaaacaattacattctatgaagttttctgaaagaagaatagaagagctgcaggatagaattaatgatttagaaaaggaacgggaacttttaaaggaaaactatgataaactttatgacagtgccttcagtgctgcccatgaagagcaatggaagttaaaggagcaacagctgaaagtgcagattgctcagctcgagactgccttgaagtctgacttaacagacaaaactgaaatccttgacagattaaaaactgaaagagatcaaaatgaaaaactcgttcaagagaatagagaactacagttacagtatctggaacaaaagcaacaacttgatgaacttaaaaaacgcataaaattgtacaaccaggagaatgatattaatgctgatgaattgagtgaagctctcctacttataaaggctcaaaaagaacaaaaaaatggagacctttcctttttagtgaaagtagatagtgaaattaataaagatctagaacgctctatgagagagctgcaagcaactcatgcagaaacggtgcaagagctggaaaagacaagaaacatgctaattatgcaacacaaaattaataaagattatcagatggaggttgaggcagtgacccgtaagatggaaaatttgcagcaagattatgaactcaaagtggaacagtatgttcatcttcttgatatcagggctgcacgtatccataaactagaagcccaattaaaggatattgcctatggcaccaagcagtacaaatttaaaccagaaatcatgccagatgactctgttgatgaatttgatgaaaccatccacttagaacgaggcgaaaatctatttgaaatccatatcaacaaagtaaccttttcttctgaagttttacaggcatctggagataaagagcctgtcactttctgtacctatgctttctatgattttgaactacagacaactcccgtagtgcgaggccttcatcccgaatataacttcacttctcaatatcttgttcatgttaatgacttatttttgcaatatattcagaagaatactatcacccttgaggtccaccaggcttatagcacagaatatgaaacaattgcagcatgtcaattaaaatttcacgaaattcttgaaaaaagcggccgaatattttgtacagcaagtttgattggaacaaaaggagacatcccaaattttggcacagtggaatactggttccgattaagagttcccatggatcaagcaattcgactttatcgagaaagggcaaaggctttggggtatataacatcaaattttaaggggccagagcatatgcagtcgttaagtcagcaagcacccaaaactgctcaactcagttctacagattccacagatggcaacttaaatgaacttcacattacaataagatgttgcaaccacctgcagtcccgagcaagccacctgcagccacacccatatgttgtgtacaagttttttgattttgcagaccatgatacagctatcattcccagtagcaatgatccacagtttgatgatcatatgtatttcccagtgccaatgaatatggacttggatcgataccttaagtcagagtctctgagtttttatgtttttgatgatagtgatacccaggagaatatttacataggaaaagtcaatgtgcctctgatttcgttggcacatgacaggtgtatctcaggaatatttgagttaacagaccatcaaaagcatcctgctggcaccatccatgttatattgaaatggaaatttgcttaccttccaccaagtggatcaataacaactgaagacttaggaaatttcattcgcagcgaagagccagaagttgttcaaagacttcctccagcatcctctgttagcacactagttttagcaccaagacctaaaccaagacaacgtttaacacctgtagataagaaggtatctttcgtggatatcatgccacatcagagtgatgtttcacaagaaggcagtgtagatgaggtaaaagagaatactgagaaaatgcagcaaggaaaagatgatgtgtctttactatctgaaggtcagcttgcagaacaaagcttggcatcttctgaagatgaaacagaaataacagaggacttggaaccagaagttgaagaggacatgtcagcttctgacagtgatgactgtattattccaggtcctatctccaagaatatcaaacagagtctcgcattgtctcccgggctggggtgcagtagcgcgatctcagctcactgcaacttccgcctcccgggttccagcgattttcctgcctcagcctcccaagtagatgggattacaggtgcctgccaccacacccagccatcagaaaaaattcggattgagatcatagctctaagccttaatgattctcaagtaaccatggatgacactatccaacggctgtttgttgagtgtcgattctacagtcttcctgctgaagagacacccgtgtcacttccaaaacccaagagtgggcagtgggtctactataactatagcaatgtgatctacgtggataaagaaaacaacaaagcaaagagagacatcttaaaagctatactacaaaaacaagagatgcctaatagaagccttcgcttcaccgtggtcagtgaccctccagaggacgagcaggacctggagtgtgaggacattggcgtggctcacgtcgaccttgccgacatgtttcaggaagggagggacctcattgagcaaaatatcgatgtttttgatgcacgagcagatggtgaaggtattggcaagctcagggtaacagtcgaagctctccatgccctccagtctgtctacaagcaatacagagatgacttggaggcttgaaagcaaatgctccagaggcatctcctactcctcagtaaatgctcacatgaaagttcctacatgagatttttgtaattactctggtgtatataatctataattcatgggaagctgggagcggggagacctgggtttgaagtgttgaagttttgtatactttttcatttgtttatttctctattccctccttctcataactgccacccctcaggacttaagttctccataatgggcagtaccttctcaataatttatacctacgtgatagcgtgagaaagtctatttgcattttcaa

SEQ ID NO: 178486 - DNA, 893 bp, Homo sapiens
  Payload ID: 15177
  Gene Symbol: RPGRIP1L
  Gene Name: RPGRIP1-like
  ENST ID: ENST00000566096
  CDS Start-End: 144-380
ctagagtccaaggagaactacatttcccaggaggctacgggagcctgccatgtttctcccgtgctcctctcggccagccgcccgccacgctgtcggcgctatagcaacggtagctagctgcagggccagtggcacgctaggccatgtctggtccaactgatgagactgcaggagacttgcctgtgaaagatacaggtctaaacctctttggaatgggagggttacaagaaacttcaacaacacggacaatgaagtctcgccaggcagtgtcacgtgtcagtcgtgaggaactggaagacagatttttgcgtttgcatgatgagaacattttacttaaacagcatgcccgcaagcaggaggataaaattaaaaggttatgataaaaagcttttagctttttttcttgactcagtaaaatttggagggtatggtattttataaacttaattgaataccccaccttgaatcttgtttggaacaaggcaggatgtaaataagtacaatttttaaaaatggaaaatcttgcaaactagaataataaaccaaaaagattatgagtgtttattatgtctgaatttgctatttaaatgaaaaaagctaatagagtgccgttagtatatcatacctataaataacttttggtttaatatttatagtttaataagcaaatggccaaagcatctgttttttaaatgtcttgattttaaaatgaaagttttaaaaagtaactaactattctaacttgttagaatgcacattcccttaagatttggggtttactaatgaaaacatcacttcagtctctggaacatatttaactttgcttgggttatactagattctatattgatttcaaagagtctctactgtttctgaagaaacagtattgtcac

SEQ ID NO: 178487 - DNA, 651 bp, Homo sapiens
  Payload ID: 15177
  Gene Symbol: RPGRIP1L
  Gene Name: RPGRIP1-like
  ENST ID: ENST00000562588
  CDS Start-End: 284-651
ggtagctagctgcagggccagtggcacggtgagtacccgggaggatgggggaggatgagggtgggtggaggttgctgaccctccccactgcagcgcgggccggggtcctagggtccgctctgccgcctggagaaggccctggagttggccctggagttctgctggcgtgaaagcagcccagcccaagacacctccacatcctcaggcctgaatcacaggccgccctttatccccacgtccaggaccaatttgaaatgttatatcccagccatgaagctaggccatgtctggtccaactgatgagactgcaggagacttgcctgtgaaagatacaggtctaaacctctttggaatgggagggttacaagaaacttcaacaacacggacaatgaagtctcgccaggcagtgtcacgtgtcagtcgtgaggaactggaagacagatttttgcgtttgcatgatgagaacattttacttaaacagcatgcccgcaagcaggaggataaaattaaaagaatggccaccaagttaatacggctagttaatgacaagaaaagatatgagcgggttggtggcggccccaagcggctgggacgagatgtggaaatggaagaaatgattgagcagctgcaagagaaagttcatgagcttga

SEQ ID NO: 178488 - DNA, 465 bp, Homo sapiens
  Payload ID: 15177
  Gene Symbol: RPGRIP1L
  Gene Name: RPGRIP1-like
  ENST ID: ENST00000569716
  CDS Start-End: 298-465
gtggcacggtgagtacccgggaggatgggggaggatgagggtgggtggaggttgctgaccctccccactgcagcgcgggccggggtcctagggtccgctctgccgcctggagaaggccctggagttggccctggagttctgctggcgtgaaagcagcccagcccaagacacctccacatcctcaggcctgaatcacaggccgccctttatccccacgtccaggaccaatttgaaatgttatatcccagccatgaaggttcttgctccgttgcccaggctggagtgcagtgctaggccatgtctggtccaactgatgagactgcaggagacttgcctgtgaaagatacaggtctaaacctctttggaatgggagggttacaagaaacttcaacaacacggacaatgaagtctcgccaggcagtgtcacgtgtcagtcgtgaggaactggaagacagatttttgcgt

SEQ ID NO: 178489 - DNA, 6038 bp, Homo sapiens
  Payload ID: 15177
  Gene Symbol: RPGRIP1L
  Gene Name: RPGRIP1-like
  ENST ID: ENST00000621565
  CDS Start-End: 65-3874
gcccgccacgctgtcggcgctatagcaacggtagctagctgcagggccagtggcacgctaggccatgtctggtccaactgatgagactgcaggagacttgcctgtgaaagatacaggtctaaacctctttggaatgggagggttacaagaaacttcaacaacacggacaatgaagtctcgccaggcagtgtcacgtgtcagtcgtgaggaactggaagacagatttttgcgtttgcatgatgagaacattttacttaaacagcatgcccgcaagcaggaggataaaattaaaagaatggccaccaagttaatacggctagttaatgacaagaaaagatatgagcgggttggtggcggccccaagcggctgggacgagatgtggaaatggaagaaatgattgagcagctgcaagagaaagttcatgagcttgaaaaacaaaatgaaaccctcaaaaacagactgatttcagccaaacagcaacttcaaacccagggttacaggcaaactccatacaataatgtacaatctcgtattaacactgggcgtagaaaagcaaatgaaaatgctggtttacaggaatgccccaggaaaggtataaaattccaagatgcagatgtagcagaaactccacatcccatgtttacaaaatatggcaacagtttacttgaagaagccagaggagaaataagaaatttagaaaacgttattcagtcacaaagaggccagatagaggagttagagcacttggctgagatcctgaaaactcagttgaggagaaaagaaaatgaaattgagttatctcttcttcagcttcgagaacagcaagctacagatcaaaggtcaaatattcgggacaatgtagaaatgattaagcttcataaacagctagtagagaaaagcaatgctctttcagcaatggaaggaaaatttattcagcttcaagagaagcaaagaactctcagaatcagccacgatgctttgatggcaaatggggatgaattaaacatgcaacttaaagagcagcgtttaaaatgctgcagtcttgagaaacaattacattctatgaagttttctgaaagaagaatagaagagctgcaggatagaattaatgatttagaaaaggaacgggaacttttaaaggaaaactatgataaactttatgacagtgccttcagtgctgcccatgaagagcaatggaagttaaaggagcaacagctgaaagtgcagattgctcagctcgagactgccttgaagtctgacttaacagacaaaactgaaatccttgacagattaaaaactgaaagagatcaaaatgaaaaactcgttcaagagaatagagaactacagttacagtatctggaacaaaagcaacaacttgatgaacttaaaaaacgcataaaattgtacaaccaggagaatgatattaatgctgatgaattgagtgaagctctcctacttataaaggctcaaaaagaacaaaaaaatggagacctttcctttttagtgaaagtagatagtgaaattaataaagatctagaacgctctatgagagagctgcaagcaactcatgcagaaacggtgcaagagctggaaaagacaagaaacatgctaattatgcaacacaaaattaataaagattatcagatggaggttgaggcagtgacccgtaagatggaaaatttgcagcaagattatgaactcaaagtggaacagtatgttcatcttcttgatatcagggctgcacgtatccataaactagaagcccaattaaaggatattgcctatggcaccaagcagtacaaatttaaaccagaaatcatgccagatgactctgttgatgaatttgatgaaaccatccacttagaacgaggcgaaaatctatttgaaatccatatcaacaaagtaaccttttcttctgaagttttacaggcatctggagataaagagcctgtcactttctgtacctatgctttctatgattttgaactacagacaactcccgtagtgcgaggccttcatcccgaatataacttcacttctcaatatcttgttcatgttaatgacttatttttgcaatatattcagaagaatactatcacccttgaggtccaccaggcttatagcacagaatatgaaacaattgcagcatgtcaattaaaatttcacgaaattcttgaaaaaagcggccgaatattttgtacagcaagtttgattggaacaaaaggagacatcccaaattttggcacagtggaatactggttccgattaagagttcccatggatcaagcaattcgactttatcgagaaagggcaaaggctttggggtatataacatcaaattttaaggggccagagcatatgcagtcgttaagtcagcaagcacccaaaactgctcaactcagttctacagattccacagatggcaacttaaatgaacttcacattacaataagatgttgcaaccacctgcagtcccgagcaagccacctgcagccacacccatatgttgtgtacaagttttttgattttgcagaccatgatacagctatcattcccagtagcaatgatccacagtttgatgatcatatgtatttcccagtgccaatgaatatggacttggatcgataccttaagtcagagtctctgagtttttatgtttttgatgatagtgatacccaggagaatatttacataggaaaagtcaatgtgcctctgatttcgttggcacatgacaggtgtatctcaggaatatttgagttaacagaccatcaaaagcatcctgctggcaccatccatgttatattgaaatggaaatttgcttaccttccaccaagtggatcaataacaactgaagacttaggaaatttcattcgcagcgaagagccagaagttgttcaaagacttcctccagcatcctctgttagcacactagttttagcaccaagacctaaaccaagacaacgtttaacacctgtagataagaaggtatctttcgtggatatcatgccacatcagagtgatgagacttctcctcctcctgaagataggaaggaaatttcaccagaggtagagcatataccagaaatagaaattaatatgctgactgttccacatgttcccaaggtttcacaagaaggcagtgtagatgaggtaaaagagaatactgagaaaatgcagcaaggaaaagatgatgtgtctttactatctgaaggtcagcttgcagaacaaagcttggcatcttctgaagatgaaacagaaataacagaggacttggaaccagaagttgaagaggacatgtcagcttctgacagtgatgactgtattattccaggtcctatctccaagaatatcaaacagccatcagaaaaaattcggattgagatcatagctctaagccttaatgattctcaagtaaccatggatgacactatccaacggctgtttgttgagtgtcgattctacagtcttcctgctgaagagacacccgtgtcacttccaaaacccaagagtgggcagtgggtctactataactatagcaatgtgatctacgtggataaagaaaacaacaaagcaaagagagacatcttaaaagctatactacaaaaacaagagatgcctaatagaagccttcgcttcaccgtggtcagtgaccctccagaggacgagcaggacctggagtgtgaggacattggcgtggctcacgtcgaccttgccgacatgtttcaggaagggagggacctcattgagcaaaatatcgatgtttttgatgcacgagcagatggtgaaggtattggcaagctcagggtaacagtcgaagctctccatgccctccagtctgtctacaagcaatacagagatgacttggaggcttgaaagcaaatgctccagaggcatctcctactcctcagtaaatgctcacatgaaagttcctacatgagatttttgtaattactctggtgtatataatctataattcatgggaagctgggagcggggagacctgggtttgaagtgttgaagttttgtatactttttcatttgtttatttctctattccctccttctcataactgccacccctcaggacttaagttctccataatgggcagtaccttctcaataatttatacctacgtgatagcgtgagaaagtctatttgcattttcaacattttcttaggaagaaccgaaatgcaattcccatttttatttttaataagcaaaagcataaatcttagaaaacctatgaaaaagaaatacttttatgttatccctaatcgtcccactaaatggaatgcctatgattagcttcattaagagttttatactgtgaagattttattagaagcaatatatgaaaattacttggattaatgtgttaatcttcctctttaaaatgctaatatccattttatgcacattaaagctcagtatgcattttctttgatgcatgcagtttctatcaattaaatataaagaatgaaacttagcaccaacttattcaatgactgcaagttttttgtctttctttcttaaaagttcattctatttgtattattttcatacatttgtaatggtgacccagggatgtatatataaaaaggagatagttatatagatagatgtgaaatttacacgttgaaaacttagtatatgacacagaaagaaattatgaaaagtataactcaaattctgatatgcttagttagacgtgaaaggagtatctttttatcattttttaaatttacatcaagccagtacagtgccagggtgtatctgggtaaccagatcctcgaaaagcagctctgaaagttaattttctagcttttacccaatctcactgaaggatttaattgatatttttaatggagctgtgaatcaatgctgcaaaggaattgtctctagaggtctaggatataatgcatttcattttttaatttacttttttatttgtcattttcttcaaaggatttttataggctgtgggttttcactgtttgcaaacaggctatgttccttcttaagcatatgtaaagtattcagggagataagtaatttattaaaatctacctaatttgccgtgatatattaaatctctgcttcagtgatcacagaccatttcatttagagaattaggcattccctctttgtgtgattaaagctctggaaaatgagttctttgctcctatttgtgaacattcaaagcctgctaatggcaagaagatggaatagattatgagacaattcattacagttcaatagaaaaaaaaagcagctataatgcaaaaatgcaagtatgaatatctgcatatagtttgaaccatctgtgctctaatggcttcaataatgactctcgtctttagaaggctttgaaatgacatccgtacaatattaatttgttgatgtacattgtgggaccagtagagtatgatctgaccacagaaatctataaattctgtctataccactgggcctccctgtcctggggcctgccatctccgagaagaatcttgctctcatccaactctgcaaatcttcataacaactcgttcctctggaaccttctggagaccacaaacatctgcagactaaacctctccagtcctagtaaacaaccacatgtttgttgtcacttcggctggctctgagctcatttttttggcccctttttctagctttctttggctttatgcagttacagtgtcattaaggcccataatattccctgcagtaatttaaaacagccagattataccctgggattaactgagtggtttttgagacatttattgtggtattctcccaggaggtttgtattattgttgtaaaatgttacatcccaaactaaataacccttctgcagggagaagaaccagattgcactgacttcttaggatcattaagtggaaaggaaaagtttttcttagaaaacttatgggacccagtcacctgtatggaatgtatatctcagacaagatgagagaaacagccatgtttctgtcacattgtttactgtcatattaaagatatctagtttt

SEQ ID NO: 178490 - DNA, 948 bp, Homo sapiens
  Payload ID: 15178
  Gene Symbol: RPL17-C18orf32
  Gene Name: RPL17-C18orf32 readthrough
  ENST ID: ENST00000332968
  CDS Start-End: 109-681
ctctttccctaagcagcctgaggtgatctgtgaaaatggttcgctattcacttgacccggagaaccccacgaaataacactcgtgaaactgctcaggccatcaagggtatgcatatacgaaaagccacgaagtatctgaaagatgtcactttacagaaacagtgtgtaccattccgacgttacaatggtggagttggcaggtgtgcgcaggccaagcaatggggctggacacaaggtcggtggcccaaaaagagtgctgaatttttgctgcacatgcttaaaaacgcagagagtaatgctgaacttaagggtttagatgtagattctctggtcattgagcatatccaagtgaacaaagcacctaagatgcgccgccggacctacagagctcatggtcggattaacccatacatgagctctccctgccacattgagatgatccttacggaaaaggaacagattgttcctaaaccagaagaggaggttgcccagaagaaaaagttgaggagctcaagcttgggaaaatggtgtgcattccttgtatcgtcattccagttctgctctggatctacaaaaaattcctggagccatatatataccctctggtttcccccttcgttagtcgtatatggcctaagaaagcaatacaagaatccaatgatacaaacaaaggcaaagtaaactttaagggtgcagacatgaatggattaccaacaaaaggaccaacagaaatctgtgataaaaagaaagactaaagaaattttcctaaaggaccccatcatttaaaaaatggacctgataatatgaagcatcttccttgtaattgtctctgacctttttatctgagaccggaattcaggataggagtctagatatttacctgatactaatcaggaaatatatgatatccgtatttaaaatgtagttagttatatttaatgacctcat

SEQ ID NO: 178491 - DNA, 1012 bp, Homo sapiens
  Payload ID: 15178
  Gene Symbol: RPL17-C18orf32
  Gene Name: RPL17-C18orf32 readthrough
  ENST ID: ENST00000577910
  CDS Start-End: 16-570
aggtgatctgtgaaaatggttcgctattcacttgacccggagaaccccacgaaatcatgcaaatcaagaggttccaatcttcgtgttcactttaagaacactcgtgaaactgctcaggccatcaagggtatgcatatacgaaaagccacgaagtatctgaaagatgtcactttacagaaacagtgtgtaccattccgacgttacaatggtggagttggcaggtgtgcgcaggccaagcaatggggctggacacaaggtcggtggcccaaaaagagtgctgaatttttgctgcacatgcttaaaaacgcagagagtaatgctgaacttaagggtttagatgtagattctctggtcattgagcatatccaagtgaacaaagcacctaagatgcgccgccggacctacagagctcatggtcggattaacccatacatgagctctccctgccacattgagatgatccttacggaaaaggaacagattgttcctaaaccagaagaggaggttgcccagaagaaaaagatatcccagaagaaactgaagaaacaaaaacttatggcacgggagtaaattcagcattaaaataaatttgaggagctcaagcttgggaaaatggtgtgcattccttgtatcgtcattccagttctgctctggatctacaaaaaattcctggagccatatatataccctctggtttcccccttcgttagtcgtatatggcctaagaaagcaatacaagaatccaatgatacaaacaaaggcaaagtaaactttaagggtgcagacatgaatggattaccaacaaaaggaccaacagaaatctgtgataaaaagaaagactaaagaaattttcctaaaggaccccatcatttaaaaaatggacctgataatatgaagcatcttccttgtaattgtctctgacctttttatctgagaccggaattcaggataggagtctagatatttacctgatactaatcaggaaatatatgatatccgtatttaaaatgta

SEQ ID NO: 178492 - DNA, 1440 bp, Homo sapiens
  Payload ID: 15178
  Gene Symbol: RPL17-C18orf32
  Gene Name: RPL17-C18orf32 readthrough
  ENST ID: ENST00000584895
  CDS Start-End: 16-702
aggtgatctgtgaaaatggttcgctattcacttgacccggagaaccccacgaaatcatgcaaatcaagaggttccaatcttcgtgttcactttaagaacactcgtgaaactgctcaggccatcaagggtatgcatatacgaaaagccacgaagtatctgaaagatgtcactttacagaaacagtgtgtaccattccgacgttacaatggtggagttggcaggtgtgcgcaggccaagcaatggggctggacacaaggtcggtggcccaaaaagagtgctgaatttttgctgcacatgcttaaaaacgcagagagtaatgctgaacttaagggtttagatgtagattctctggtcattgagcatatccaagtgaacaaagcacctaagatgcgccgccggacctacagagctcatggtcggattaacccatacatgagctctccctgccacattgagatgatccttacggaaaaggaacagattgttcctaaaccagaagaggaggttgcccagaagaaaaagttgaggagctcaagcttgggaaaatggtgtgcattccttgtatcgtcattccagttctgctctggatctacaaaaaattcctggagccatatatataccctctggtttcccccttcgttagtcgtatatggcctaagaaagcaatacaagaatccaatgatacaaacaaaggcaaagtaaactttaagggtgcagacatgaatggattaccaacaaaaggaccaacagaaatctgtgataaaaagaaagactaaagaaattttcctaaaggaccccatcatttaaaaaatggacctgataatatgaagcatcttccttgtaattgtctctgacctttttatctgagaccggaattcaggataggagtctagatatttacctgatactaatcaggaaatatatgatatccgtatttaaaatgtagttagttatatttaatgacctcattcctaagttcctttttcgttaatgtagctttcatttctgttattgctgtttgaataatatgattaaatagaaggtttgtgccagtagacattatgttactaaatcagcactttaaaatctttggttctctaattcatatgaatttgctgtttgctctaatttctttgggctcttctaatttgagtggagtacaattttgttgtgaaacagtccagtgaaactgtgcagggaaatgaaggtagaattttgggaggtaataatgatgtgaaacataaagatttaataattactgtccaacacagtggagcagcttgtccacaaatatagtaattactatttattgctctaaggaagattaaaaaaagatagggaaaagggggaaacttctttgaaaaatgaaacatctgttacattaatgtctaattataaaattttaatccttactgcatttcttctgttcctacaaatgta

SEQ ID NO: 178493 - DNA, 562 bp, Homo sapiens
  Payload ID: 15179
  Gene Symbol: RPL36A-HNRNPH2
  Gene Name: RPL36A-HNRNPH2 readthrough
  ENST ID: ENST00000409170
  CDS Start-End: 33-389
tttctttccgcgccgatagcgctcacgcaagcatggttaacgtccctaaaacccgccggactttctgtaagaagtgtggcaagcaccaaccccataaagtgacacagtacaagaagggcaaggattctctgtacgcccagggaaagcggcgttatgacaggaagcagagtggctatggtgggcaaactaagccgattttccggaaaaaggctaaaactacaaagaagattgtgctaaggcttgagtgcgttgagcccaactgcagatctaagagaatgctggctattaaaagatgcaagcattttgaactgggaggagataagaagagaaagctacaccaaaattgcattgagccaaacttgccaccaagagcccaacaatcaccatgatgctgagcacggaaggcagggaggggttcgtggtgaaggtcaggggcctaccctggtcctgctcagccgatgaagtgatgcgcttcttctctgattgcaagatccaaaatggcacatcaggtattcgtttcatctacaccagagaaggcagaccaagtggtgaagcatttgtt

SEQ ID NO: 178494 - DNA, 572 bp, Homo sapiens
  Payload ID: 15179
  Gene Symbol: RPL36A-HNRNPH2
  Gene Name: RPL36A-HNRNPH2 readthrough
  ENST ID: ENST00000409338
  CDS Start-End: 34-267
ctttctttccgcgccgatagcgctcacgcaagcatggttaacgtccctaaaacccgccggactttctgtaagaagtgtggcaagcaccaaccccataaagtgacacagtacaagaagggcaaggattctctgtacgcccagggaaagcggcgttatgacaggaagcagagtggctatggtgggcaaactaagccgattttccggaaaaagctacaccaaaattgcattgagccaaacttgccaccaagagcccaacaatcaccatgatgctgagcacggaaggcagggaggggttcgtggtgaaggtcaggggcctaccctggtcctgctcagccgatgaagtgatgcgcttcttctctgattgcaagatccaaaatggcacatcaggtattcgtttcatctacaccagagaaggcagaccaagtggtgaagcatttgttgaacttgaatctgaagaggaagtgaaattggctttgaagaaggacagagaaaccatgggacacagatacgttgaagtattcaagtctaacagtgttgaaatggattgggtgttgaagcatacaggtccgaat

SEQ ID NO: 178495 - DNA, 876 bp, Homo sapiens
  Payload ID: 15180
  Gene Symbol: RPS10-NUDT3
  Gene Name: RPS10-NUDT3 readthrough
  ENST ID: ENST00000605528
  CDS Start-End: 18-876
accctgcagccgcagagatgttgatgcctaagaagaaccggattgccatttatgaactcctttttaaggagggagtcatggtggccaagaaggatgtccacatgcctaagcacccggagctggcagacaagaatgtgcccaaccttcatgtcatgaaggccatgcagtctctcaagtcccgaggctacgtgaaggaacagtttgcctggagacatttctactggtaccttaccaatgagggtatccagtatctccgtgattaccttcatctgcccccggagattgtgcctgccaccctacgccgtagccgtccagagactggcaggcctcggcctaaaggtctggagggtgagcgacctgcgagactcacaagaggggaagctgacagagatacctacagacggagtgctgtgccacctggtgccgacaagaaagccgaggctggggctgggtcagcaaccgaattccagtttgtgctactcgtgagcagtagtcgccatccagacagatggattgtccctggaggaggcatggagcccgaggaggagccaagtgtggcagcagttcgtgaagtctgtgaggaggctggagtaaaagggacattgggaagattagttggaatttttgagaaccaggagaggaagcacaggacgtatgtctatgtgctcattgtcactgaagtgctggaagactgggaagattcagttaacattggaaggaagagggaatggtttaaaatagaagacgccataaaagtgctgcagtatcacaaacccgtgcaggcatcatattttgaaacattgaggcaaggctactcagccaacaatggcaccccagtcgtggccaccacatactcggtttctgctcagagctcga

SEQ ID NO: 178496 - DNA, 7505 bp, Homo sapiens
  Payload ID: 15181
  Gene Symbol: RICTOR
  Gene Name: RPTOR independent companion of MTOR, complex 2
  Uniprot ID: Q6R327
  ENST ID: ENST00000296782
  CDS Start-End: 23-5221
gttgtgactgaaacccgtcaatatggcggcgatcggccgcggccgctctctgaagaacctccgagtacgagggcggaatgacagcggcgaggagaacgtcccgctggatctgacccgagaaccttctgataacttaagagagattctccaaaatgtggccagattgcagggagtatcaaatatgagaaagctaggccatctgaataactttactaagcttctttgtgatattggccacagtgaagaaaaactgggctttcactatgaggatatcataatttgtttgcggttagctttattaaatgaagcaaaagaagtgcgagcagcagggctacgagcgcttcgatatctcatccaagactccagtattctccagaaggtgctaaaattgaaagtggactatttaatagctaggtgcattgacatacaacagagcaacgaggtagagaggacacaagcacttcgattagtcagaaagatgattactgtgaatgcttccttgtttcctagttctgtgaccaactcattaattgcagttggaaatgatggacttcaagaaagagacagaatggtccgagcatgcattgccattatctgtgaactagcacttcagaatccagaggtggtggcccttcgaggtggactaaacaccatcttgaaaaatgtgatcgattgccaattaagtcgaataaatgaggccctaattactacaattttgcaccttcttaatcatccaaagactcgacagtatgtgcgagctgatgtagaattagagagaattttagcaccctatactgattttcactacagacatagtccagatacagctgaaggacagctcaaagaagacagagaagcacgatttctagccagtaaaatgggaatcatagcaacattccgatcatgggcaggtattattaatttatgtaaacctggaaattctgggatccagtctctaataggagtactttgcataccaaatatggaaataaggcgaggtctacttgaagtgctttatgatatatttcgtcttcctctacctgttgtgactgaggagttcatagaagcactactcagtgtagatccagggaggttccaagacagttggaggctttcagatggctttgtggcagctgaggcaaaaactattcttcctcatcgtgccagatccaggccagacctcatggataattatttggcactgatactctctgcatttattcgtaatggacttttagagggtctagttgaagtgataacaaacagtgatgatcatatctcagttagagctaccatccttttaggagagcttttacatatggcaaacacaattcttcctcattcacatagccatcatttacactgcttgccaaccctaatgaatatggctgcatcctttgatatccccaaggaaaagagactgcgagccagtgcagccttgaactgtttaaaacgcttccatgaaatgaagaaacgaggacctaagccttatagtcttcatttagaccacattattcagaaagcaattgcaacacaccagaaacgggatcagtatctccgagttcagaaagatatatttatccttaaggatacagaggaagctcttttaattaaccttagagatagccaagtccttcaacataaagagaatcttgaatggaattggaatcttatagggaccattcttaagtggccaaatgtaaatctaagaaactataaagatgaacagttacacaggtttgtacgaagactactttatttttacaagcccagcagtaaattatatgccaacctggatctggattttgccaaggccaaacagctcacggttgtaggttgccagtttacagaatttcttcttgaatctgaagaggatgggcaaggctacttagaagatctagtaaaggatattgttcagtggctcaatgcttcatctggaatgaaacccgaaagaagtcttcaaaataatggtttattgaccacccttagtcaacactactttttatttattggaacactttcttgccaccctcatggagttaaaatgctggaaaaatgcagtgtatttcagtgtctccttaatctttgctccttgaaaaaccaagatcacttgctaaaacttactgtttctagcttggactatagcagagatggattggctagagtcatcctttccaaaattttaactgcagctactgatgcctgcagactctatgcaacaaaacatttaagggtattattgagagctaatgttgaattctttaataattggggaattgagttgttagtgacccagctacatgataaaaacaaaacgatttcctctgaagctcttgatatcctcgatgaagcatgtgaagacaaggccaatcttcatgctctcattcagatgaaaccagcgttatcccaccttggagacaagggtttgcttctcctgctgagatttctctccattccaaaaggattttcctatctgaatgaaagaggttatgtagcaaaacaattggaaaagtggcacagggaatacaactccaaatatgttgacttgattgaggaacaactcaatgaagcacttactacttaccggaagcctgttgatggtgataactatgttcgtcggagtaaccaaagattacagcgtcctcacgtctacctgcctatacacctttatggacaactagtacaccataaaacaggctgccatttgttggaagtacagaatattattacagaactctgtcgtaatgttcgtacaccagatttggataagtgggaagaaattaaaaaactgaaagcatctctttgggccttgggaaatatcggctcatcaaattggggtctcaatttgctacaggaagaaaacgtgattccagatatactaaaacttgcaaaacagtgtgaagttctttccatcagagggacctgtgtatatgtacttgggctcatagctaaaaccaaacaaggctgtgatattctaaaatgtcacaactgggatgctgtgaggcatagtcgcaaacatctgtggccagtggttccagatgatgtggaacaactctgtaatgaactttcatctatcccaagcactctaagtttgaactcggagtcaaccagctctagacataatagtgaaagtgaatctgtgccatcgagtatgttcatattggaggatgaccggtttggcagcagctctactagcacatttttccttgatatcaatgaagatacagagccaacattttatgaccgatctggacccataaaggataaaaattcattccctttctttgcttctagtaaacttgtgaagaatcgtatcttaaattcgcttactttgcctaacaaaaaacatcgtagtagcagtgatccaaaaggagggaaattatcatctgaaagtaagacaagcaacaggcgaatcagaacacttacggagcccagtgttgattttaatcatagtgatgattttacacccatatccactgtacagaaaacattacaattagagacttcatttatggggaataagcacattgaagacactggtagtacaccaagcattggagaaaatgacttaaaattcaccaagaattttggtacagagaatcacagagaaaatacaagccgagagaggttagtagtagaaagttcaacgagctcacatatgaagatacgtagccaaagtttcaatacagacactacaacaagtggcataagttcaatgagctcaagtccttcacgagagacagtaggtgtagatgctacaactatggacacagactgtggaagcatgagtactgtggtaagtactaaaactattaagacaagccactatttgacgccacagtctaaccatctgtctctctccaaatcaaattcggtgtccctggtgcctccaggttcttctcatacgcttcctagaagagcacagtcccttaaagcaccctctattgctacaattaaaagtctagcagattgtaactttagttacacaagttctagagatgcttttggctatgctacactgaaaagactacagcaacaaagaatgcatccatccttatctcactctgaagctttggcatctccagcaaaagatgtgctatttactgataccatcaccatgaaggccaacagttttgagtccagattaacaccaagcaggatcgattttaaaaagaagcatgtcgggggaatcaggagcttaagacctacaataacaaacaaccttttcaggttcatgaaagccttaagttatgcatcattagataaagaagatttattgagtcctattaatcaaaataccctgcaacgatcttcctcagtgcggtccatggtgtccagtgccacatatgggggttcagatgattacattggtcttgctctcccggtggatataaatgatatattccaggtaaaggatattccctattttcagacaaaaaacataccaccacatgatgatcgaggtgcaagagcatttgcccatgatgcaggaggtcttccatctggaactggaggtcttgtaaaaaattcttttcacttgctacgacagcagatgagtcttacggaaataatgaattcaatccattcagatgcctctctgtttttagaaagtacagaagacactggactacaggaacatacagatgataactgcctttattgtgtctgtattgaaattctgggtttccagcccagcaaccaactgagtgcaatatgtagtcattcagactttcaagatattccatattctgattggtgtgagcagactatccataatcctttagaagtggttccctctaagttttcggggatttctggatgcagtgatggggtgtctcaagaaggctcagctagcagcaccaaaagcacagaattgttactaggtgttaaaacaattccagatgatacaccaatgtgccgtatactccttcgcaaagaagttctaagattagtcattaatttgagtagttcagtttcaactaaatgtcatgagactgggcttttaacaattaaggagaagtatcctcaaacatttgatgacatatgcctttactctgaggtttcccatttgctgtcacactgcacattcagacttccgtgtcggaggttcatacaagaattatttcaagatgtacagtttctacaaatgcatgaagaagcagaggctgtgttggcaacaccaccaaagcaacctatagttgatacatctgctgaatcctgacctcatatttatgatggatatagatacatactatatatattcatatttgtggatttcctaaaagcctcagaaaatacgactgactaggcagcaaagacaggagtatcttctgtacactgttccgcagttactggtacatgaacagttggaactgctgactttcctaaccaaaacaacttccttctctcctttgttgagccttttgaggggttcatgattcattaccacagttttaagagtttcagttaccattgtatgcaagagccaagcactgaatacctacataggttttctattttctttcattttaaaagcataatgacagtggaacaataatgggatatgcagaagcacccttcacaagttatttctgaatgatttttagggtaaataatacagatgccttgtttgttaactaacttgtggaaagcaggaatcagtgtctctaaggctgcatcctattaccacaatggggtgtgctataactgctggtattagagagggaactttggccctttcacgtttttcttaatgtttgtaacactacttcagaggtttataacctcaaagcagaagaagagcctcaacaacccgggacttataagttatttttatgttactagacttgcataaagattcttgttttccaactcttcattttgttgcaatgtgttattacaggatatatgaaccaattaaggtttttcactacagttcttgaataaaatttaaaaatcattttttattttaattaaaaatatttcccatttatagaatgcatatatttgcaatggacttccactttcatcaactttccatctcatcgctttaaacaggaacttgaacaagcactgttagtttagacctaaaggataggaaagcattaaataatactttggatctcctgaggaaaagataagtttgcttgcaatttacacattccatggggaaagaagagccatatttccttaaaaaaaacattaataaagcttgttattgagaaaaattgtagtgaaaagccttaagtaccaaattttaaagcagcagtaacttaatttttatatcagtgtttttgttttgcacaaactaaatgcagtggtaggtgggtttatgagtatattaattgcctttatccatttgtgaagttaagttgatgagggcaaggtttttgtttgtttaatttgtatatgtctaaaggtatttggaactttttacaggaattaaacatatatgcaaatttgtatataaaaatagcatggccatcatttgaatgcttgtaaatgaaaggattatcttttttgagatctatatataaatagaaatagaaaatccagctggactgattaggattcttttttaattcatttgtgtataacatttttattacaattacacatcagttttgacacagtcatagcaacattaatattttcccatgatgcagatcctttttgtaatgggcttgttctttgagatctctgtaaagaaccctgtgaactagaaaacataactcacagagatacttttttaaaaaatttatttactggaactgaaagttccagttgggatgaagcatttcatctcacttcataacacctctttgactgcacttcagtgaattgttcttatgtgcactgtgtagcaacttacattataacaaagcagataagggctgtaagctgctgcttatgttgaaaagtggttcttcagattttctctcataaaatccagttgaagataaataatttttttatactttatcactgaacccaagtgtttatttaaatgtcaacagtacttctaagaacgttgcctgtcatcgtggtctttggtcttggataactaaactgcctttccagagaaccaaatgtcagagttactagaccaaatagtggttaaaacctccaaaggaagtaatgtaatcttattcataatgggattaacatattttagacattcattttaaacactacctcagttaatatagagtataaaaatctgtggtttaatccctcaaaagttaacagtaattttttttttgtcttacacacacacacaccccctcccccaccatcactatccctgtaccctcaccttggtcatctatcctgaaataaggcttagttagtattggcctgaatgttttgtgtttttttttttgttttttttttttactgttactttgaaaaatatgtatgtataccttatcatatctgcctatatcacttactttggggagatactcagagctttgtggttatcagtatactaaaaaaaaaaaaaa

SEQ ID NO: 178497 - DNA, 9543 bp, Homo sapiens
  Payload ID: 15181
  Gene Symbol: RICTOR
  Gene Name: RPTOR independent companion of MTOR, complex 2
  Uniprot ID: Q6R327
  ENST ID: ENST00000357387
  CDS Start-End: 32-5158
gtttccggtgttgtgactgaaacccgtcaatatggcggcgatcggccgcggccgctctctgaagaacctccgagtacgagggcggaatgacagcggcgaggagaacgtcccgctggatctgacccgagaaccttctgataacttaagagagattctccaaaatgtggccagattgcagggagtatcaaatatgagaaagctaggccatctgaataactttactaagcttctttgtgatattggccacagtgaagaaaaactgggctttcactatgaggatatcataatttgtttgcggttagctttattaaatgaagcaaaagaagtgcgagcagcagggctacgagcgcttcgatatctcatccaagactccagtattctccagaaggtgctaaaattgaaagtggactatttaatagctaggtgcattgacatacaacagagcaacgaggtagagaggacacaagcacttcgattagtcagaaagatgattactgtgaatgcttccttgtttcctagttctgtgaccaactcattaattgcagttggaaatgatggacttcaagaaagagacagaatggtccgagcatgcattgccattatctgtgaactagcacttcagaatccagaggtggtggcccttcgaggtggactaaacaccatcttgaaaaatgtgatcgattgccaattaagtcgaataaatgaggccctaattactacaattttgcaccttcttaatcatccaaagactcgacagtatgtgcgagctgatgtagaattagagagaattttagcaccctatactgattttcactacagacatagtccagatacagctgaaggacagctcaaagaagacagagaagcacgatttctagccagtaaaatgggaatcatagcaacattccgatcatgggcaggtattattaatttatgtaaacctggaaattctgggatccagtctctaataggagtactttgcataccaaatatggaaataaggcgaggtctacttgaagtgctttatgatatatttcgtcttcctctacctgttgtgactgaggagttcatagaagcactactcagtgtagatccagggaggttccaagacagttggaggctttcagatggctttgtggcagctgaggcaaaaactattcttcctcatcgtgccagatccaggccagacctcatggataattatttggcactgatactctctgcatttattcgtaatggacttttagagggtctagttgaagtgataacaaacagtgatgatcatatctcagttagagctaccatccttttaggagagcttttacatatggcaaacacaattcttcctcattcacatagccatcatttacactgcttgccaaccctaatgaatatggctgcatcctttgatatccccaaggaaaagagactgcgagccagtgcagccttgaactgtttaaaacgcttccatgaaatgaagaaacgaggacctaagccttatagtcttcatttagaccacattattcagaaagcaattgcaacacaccagaaacgggatcagtatctccgagttcagaaagatatatttatccttaaggatacagaggaagctcttttaattaaccttagagatagccaagtccttcaacataaagagaatcttgaatggaattggaatcttatagggaccattcttaagtggccaaatgtaaatctaagaaactataaagatgaacagttacacaggtttgtacgaagactactttatttttacaagcccagcagtaaattatatgccaacctggatctggattttgccaaggccaaacagctcacggttgtaggttgccagtttacagaatttcttcttgaatctgaagaggatgggcaaggctacttagaagatctagtaaaggatattgttcagtggctcaatgcttcatctggaatgaaacccgaaagaagtcttcaaaataatggtttattgaccacccttagtcaacactactttttatttattggaacactttcttgccaccctcatggagttaaaatgctggaaaaatgcagtgtatttcagtgtctccttaatctttgctccttgaaaaaccaagatcacttgctaaaacttactgtttctagcttggactatagcagagatggattggctagagtcatcctttccaaaattttaactgcagctactgatgcctgcagactctatgcaacaaaacatttaagggtattattgagagctaatgttgaattctttaataattggggaattgagttgttagtgacccagctacatgataaaaacaaaacgatttcctctgaagctcttgatatcctcgatgaagcatgtgaagacaaggccaatcttcatgctctcattcagatgaaaccagcgttatcccaccttggagacaagggtttgcttctcctgctgagatttctctccattccaaaaggattttcctatctgaatgaaagaggttatgtagcaaaacaattggaaaagtggcacagggaatacaactccaaatatgttgacttgattgaggaacaactcaatgaagcacttactacttaccggaagcctgttgatggtgataactatgttcgtcggagtaaccaaagattacagcgtcctcacgtctacctgcctatacacctttatggacaactagtacaccataaaacaggctgccatttgttggaagtacagaatattattacagaactctgtcgtaatgttcgtacaccagatttggataagtgggaagaaattaaaaaactgaaagcatctctttgggccttgggaaatatcggctcatcaaattggggtctcaatttgctacaggaagaaaacgtgattccagatatactaaaacttgcaaaacagtgtgaagttctttccatcagagggacctgtgtatatgtacttgggctcatagctaaaaccaaacaaggctgtgatattctaaaatgtcacaactgggatgctgtgaggcatagtcgcaaacatctgtggccagtggttccagatgatgtggaacaactctgtaatgaactttcatctatcccaagcactctaagtttgaactcggagtcaaccagctctagacataatagtgaaagtgaatctgtgccatcgagtatgttcatattggaggatgaccggtttggcagcagctctactagcacatttttccttgatatcaatgaagatacagagccaacattttatgaccgatctggacccataaaggataaaaattcattccctttctttgcttctagtaaacttgtgaagaatcgtatcttaaattcgcttactttgcctaacaaaaaacatcgtagtagcagtgatccaaaaggagggaaattatcatctgaaagtaagacaagcaacaggcgaatcagaacacttacggagcccagtgttgattttaatcatagtgatgattttacacccatatccactgtacagaaaacattacaattagagacttcatttatggggaataagcacattgaagacactggtagtacaccaagcattggagaaaatgacttaaaattcaccaagaattttggtacagagaatcacagagaaaatacaagccgagagaggttagtagtagaaagttcaacgagctcacatatgaagatacgtagccaaagtttcaatacagacactacaacaagtggcataagttcaatgagctcaagtccttcacgagagacagtaggtgtagatgctacaactatggacacagactgtggaagcatgagtactgtggtaagtactaaaactattaagacaagccactatttgacgccacagtctaaccatctgtctctctccaaatcaaattcggtgtccctggtgcctccaggttcttctcatacgcttcctagaagagcacagtcccttaaagcaccctctattgctacaattaaaagtctagcagattgtaactttagttacacaagttctagagatgcttttggctatgctacactgaaaagactacagcaacaaagaatgcatccatccttatctcactctgaagctttggcatctccagcaaaagatgtgctatttactgataccatcaccatgaaggccaacagttttgagtccagattaacaccaagcaggttcatgaaagccttaagttatgcatcattagataaagaagatttattgagtcctattaatcaaaataccctgcaacgatcttcctcagtgcggtccatggtgtccagtgccacatatgggggttcagatgattacattggtcttgctctcccggtggatataaatgatatattccaggtaaaggatattccctattttcagacaaaaaacataccaccacatgatgatcgaggtgcaagagcatttgcccatgatgcaggaggtcttccatctggaactggaggtcttgtaaaaaattcttttcacttgctacgacagcagatgagtcttacggaaataatgaattcaatccattcagatgcctctctgtttttagaaagtacagaagacactggactacaggaacatacagatgataactgcctttattgtgtctgtattgaaattctgggtttccagcccagcaaccaactgagtgcaatatgtagtcattcagactttcaagatattccatattctgattggtgtgagcagactatccataatcctttagaagtggttccctctaagttttcggggatttctggatgcagtgatggggtgtctcaagaaggctcagctagcagcaccaaaagcacagaattgttactaggtgttaaaacaattccagatgatacaccaatgtgccgtatactccttcgcaaagaagttctaagattagtcattaatttgagtagttcagtttcaactaaatgtcatgagactgggcttttaacaattaaggagaagtatcctcaaacatttgatgacatatgcctttactctgaggtttcccatttgctgtcacactgcacattcagacttccgtgtcggaggttcatacaagaattatttcaagatgtacagtttctacaaatgcatgaagaagcagaggctgtgttggcaacaccaccaaagcaacctatagttgatacatctgctgaatcctgacctcatatttatgatggatatagatacatactatatatattcatatttgtggatttcctaaaagcctcagaaaatacgactgactaggcagcaaagacaggagtatcttctgtacactgttccgcagttactggtacatgaacagttggaactgctgactttcctaaccaaaacaacttccttctctcctttgttgagccttttgaggggttcatgattcattaccacagttttaagagtttcagttaccattgtatgcaagagccaagcactgaatacctacataggttttctattttctttcattttaaaagcataatgacagtggaacaataatgggatatgcagaagcacccttcacaagttatttctgaatgatttttagggtaaataatacagatgccttgtttgttaactaacttgtggaaagcaggaatcagtgtctctaaggctgcatcctattaccacaatggggtgtgctataactgctggtattagagagggaactttggccctttcacgtttttcttaatgtttgtaacactacttcagaggtttataacctcaaagcagaagaagagcctcaacaacccgggacttataagttatttttatgttactagacttgcataaagattcttgttttccaactcttcattttgttgcaatgtgttattacaggatatatgaaccaattaaggtttttcactacagttcttgaataaaatttaaaaatcattttttattttaattaaaaatatttcccatttatagaatgcatatatttgcaatggacttccactttcatcaactttccatctcatcgctttaaacaggaacttgaacaagcactgttagtttagacctaaaggataggaaagcattaaataatactttggatctcctgaggaaaagataagtttgcttgcaatttacacattccatggggaaagaagagccatatttccttaaaaaaaacattaataaagcttgttattgagaaaaattgtagtgaaaagccttaagtaccaaattttaaagcagcagtaacttaatttttatatcagtgtttttgttttgcacaaactaaatgcagtggtaggtgggtttatgagtatattaattgcctttatccatttgtgaagttaagttgatgagggcaaggtttttgtttgtttaatttgtatatgtctaaaggtatttggaactttttacaggaattaaacatatatgcaaatttgtatataaaaatagcatggccatcatttgaatgcttgtaaatgaaaggattatcttttttgagatctatatataaatagaaatagaaaatccagctggactgattaggattcttttttaattcatttgtgtataacatttttattacaattacacatcagttttgacacagtcatagcaacattaatattttcccatgatgcagatcctttttgtaatgggcttgttctttgagatctctgtaaagaaccctgtgaactagaaaacataactcacagagatacttttttaaaaaatttatttactggaactgaaagttccagttgggatgaagcatttcatctcacttcataacacctctttgactgcacttcagtgaattgttcttatgtgcactgtgtagcaacttacattataacaaagcagataagggctgtaagctgctgcttatgttgaaaagtggttcttcagattttctctcataaaatccagttgaagataaataatttttttatactttatcactgaacccaagtgtttatttaaatgtcaacagtacttctaagaacgttgcctgtcatcgtggtctttggtcttggataactaaactgcctttccagagaaccaaatgtcagagttactagaccaaatagtggttaaaacctccaaaggaagtaatgtaatcttattcataatgggattaacatattttagacattcattttaaacactacctcagttaatatagagtataaaaatctgtggtttaatccctcaaaagttaacagtaattttttttttgtcttacacacacacacaccccctcccccaccatcactatccctgtaccctcaccttggtcatctatcctgaaataaggcttagttagtattggcctgaatgttttgtgtttttttttttgttttttttttttactgttactttgaaaaatatgtatgtataccttatcatatctgcctatatcacttactttggggagatactcagagctttgtggttatcagtatactaaaaaaaaaaaaaagtctacgcttaaatttatagtgctatttggtttctccatgatttcactgacaggtctaatacattttctttgagtacttgtttgtaaaaagtagactttatggtgaaaaatacatgcagtgccaagtgattaacttaagtgtttaaaaatattaaattatagcagaagaggttaggaatgatatcagcagtaatagaaataattgagaaaatcatctataaataatagatattacagactatagaataccaaaataatgtcaatactgtagtttttaaagattttaggattaatcttagtccatataaatttgtactattggtaattattgaataattgggaggaatctgggcagttgtgctggttgtaaactatgaatttctaatcgtaaagtgaattgttatttctaattgaactttttttcaagaacagatttcagcctcacatactaagtaaatactgataaataaggaaattagaaatttagtattcataattaaatatgctctaaaatttcctatacttttatttcctgtttattcttaggtagattggaagggggaaacagtctgttctccctaattaaattttttctaataacgattagtagaatatggacattctatatgacagtgacattaaaagaggctctttggaagtatatacattattaacataatgtgtacaagtccttttgaaatgacaactttaatgggtttcagctcttttatctagagcttgagataattcaagctgagtttttcagggcatatcacaacggccaagtgttcagcagtgggatatcaatgcttatttacattttcctactgctatttatataaaatgttattccattcagaggatgccttttatccccacattaaagcacagatcattaagcaataaaaaccaaattgtctgtcattcaaattataactgcagttatttttgcatggtaagagtgaggtgctaattttgtgtgagatgaactttgtaaactactttgggaaatgttctttggaagtaaggttttttctcctttagtcttatgcttccacttttgtctcagattcacaatccattaaaacatggggaaaaaagaaaaggtaaaattgagagacttttgttagaggagctatttggaatgaaccaacatttcagattttccaaaatgtaagttaggaagtctccattgtctctgcattaacaaaatacactgttactatcttaatctcaagagtgtcattacagtgagaatctcatttaaaagcataccagtgaaattaatagcagtgcttatcaaagaacactgaaatctgtgagaatctttctaggagcattcttttcttcttttagttccaagttccagggtatttttcattcctagtaggtttatatgactcacagaatgtggacttttttcctgtttggagtatttttgtaatgtaagtatcggatagctgcaccacagcatgcataaattgcacattttgttttactttctttatagaatatttaatttcaaaaatataatttatgccaaaaaaagcatacctttcaattttgctacttggttgatttagcacaaaatgcaaagtcttggggcagagagggggagtgaaaaaaattttataggtaattgttacaaaaatacctgtcagaaaccctaaagctgcattgtaaaacaaatggtgtaaactagttttgaaaagtggtaaggaattgtgaaaaaaatctcagacttaatgctctctaaccacatgagtttcttcttttttatttagtaatacgctgctacatatttggaggttctggtgtttgtaggtcactgaacagacattgaaatctgatttatattgtataactgtaacatagaaagaaaaagtatttatattttttctgtaagaatatttcattgagttgtgtataatttaaataagatttgtccccaaatggttttgctcaccttgattttttttgttgtgattttcttgtttttgtataatgtgtatagtttatgtcaagggcattaaaagcctcctgaagcataatcttatcaaagggatacattgttaataaaatgtacttaaaattcttaaac

SEQ ID NO: 178498 - DNA, 7312 bp, Homo sapiens
  Payload ID: 15181
  Gene Symbol: RICTOR
  Gene Name: RPTOR independent companion of MTOR, complex 2
  Uniprot ID: Q6R327
  ENST ID: ENST00000511516
  CDS Start-End: 13-786
aaacccgtcaatatggcggcgatcggccgcggccgctctctgaagaacctccgagtacgagggcggaatgacagcggcgaggagaacgtcccgctggatctgacccgagaaccttctgataacttaagagagattctccaaaatgtggccagattgcagggagtatcaaatatgagaaagctaggccatctgaataactttactaagcttctttgtgatattggccacagtgaagaaaaactgggctttcactatgaggatatcataatttgtttgcggttagctttattaaatgaagcaaaagaagtgcgagcagcagggctacgagcgcttcgatatctcatccaagactccagtattctccagaaggtgctaaaattgaaagtggactatttaatagctaggtgcattgacatacaacagagcaacgaggtagagaggacacaagcacttcgattagtcagaaagatgattactgtgaatgcttccttgtttcctagttctgtgaccaactcattaattgcagttggaaatgatggacttcaagaaagagacagaatggtccgagcatgcattgccattatctgtgaactagcacttcagaatccagaggtggtggcccttcgaggtggactaaacaccatcttgaaaaatgtgatcgattgccaattaagtcgaataaatgaggccctaattactacaattttgcaccttcttaatcatccaaagactcgacagtatgtgcgagctgatgtagaattagagaattttagcaccctatactgattttcactacagacatagtccagatacagctgaaggacagctcaaagaagacagagaagcacgatttctagccagtaaaatgggaatcatagcaacattccgatcatgggcaggtattattaatttatgtaaacctggaaattctgggatccagtctctaataggagtactttgcataccaaatatggaaataaggcgaggtctacttgaagtgctttatgatatatttcgtcttcctctacctgttgtgactgaggagttcatagaagcactactcagtgtagatccagggaggttccaagacagttggaggctttcagatggctttgtggcagctgaggcaaaaactattcttcctcatcgtgccagatccaggccagacctcatggataattatttggcactgatactctctgcatttattcgtaatggacttttagagggtctagttgaagtgataacaaacagtgatgatcatatctcagttagagctaccatccttttaggagagcttttacatatggcaaacacaattcttcctcattcacatagccatcatttacactgcttgccaaccctaatgaatatggctgcatcctttgatatccccaaggaaaagagactgcgagccagtgcagccttgaactgtttaaaacgcttccatgaaatgaagaaacgaggacctaagccttatagtcttcatttagaccacattattcagaaagcaattgcaacacaccagaaacgggatcagtatctccgagttcagaaagatatatttatccttaaggatacagaggaagctcttttaattaaccttagagatagccaagtccttcaacataaagagaatcttgaatggaattggaatcttatagggaccattcttaagtggccaaatgtaaatctaagaaactataaagatgaacagttacacaggtttgtacgaagactactttatttttacaagcccagcagtaaattatatgccaacctggatctggattttgccaaggccaaacagctcacggttgtaggttgccagtttacagaatttcttcttgaatctgaagaggatgggcaaggctacttagaagatctagtaaaggatattgttcagtggctcaatgcttcatctggaatgaaacccgaaagaagtcttcaaaataatggtttattgaccacccttagtcaacactactttttatttattggaacactttcttgccaccctcatggagttaaaatgctggaaaaatgcagtgtatttcagtgtctccttaatctttgctccttgaaaaaccaagatcacttgctaaaacttactgtttctagcttggactatagcagagatggattggctagagtcatcctttccaaaattttaactgcagctactgatgcctgcagactctatgcaacaaaacatttaagggtattattgagagctaatgttgaattctttaataattggggaattgagttgttagtgacccagctacatgataaaaacaaaacgatttcctctgaagctcttgatatcctcgatgaagcatgtgaagacaaggccaatcttcatgctctcattcagatgaaaccagcgttatcccaccttggagacaagggtttgcttctcctgctgagatttctctccattccaaaaggattttcctatctgaatgaaagaggttatgtagcaaaacaattggaaaagtggcacagggaatacaactccaaatatgttgacttgattgaggaacaactcaatgaagcacttactacttaccggaagcctgttgatggtgataactatgttcgtcggagtaaccaaagattacagcgtcctcacgtctacctgcctatacacctttatggacaactagtacaccataaaacaggctgccatttgttggaagtacagaatattattacagaactctgtcgtaatgttcgtacaccagatttggataagtgggaagaaattaaaaaactgaaagcatctctttgggccttgggaaatatcggctcatcaaattggggtctcaatttgctacaggaagaaaacgtgattccagatatactaaaacttgcaaaacagtgtgaagttctttccatcagagggacctgtgtatatgtacttgggctcatagctaaaaccaaacaaggctgtgatattctaaaatgtcacaactgggatgctgtgaggcatagtcgcaaacatctgtggccagtggttccagatgatgtggaacaactctgtaatgaactttcatctatcccaagcactctaagtttgaactcggagtcaaccagctctagacataatagtgaaagtgaatctgtgccatcgagtatgttcatattggaggatgaccggtttggcagcagctctactagcacatttttccttgatatcaatgaagatacagagccaacattttatgaccgatctggacccataaaggataaaaattcattccctttctttgcttctagtaaacttgtgaagaatcgtatcttaaattcgcttactttgcctaacaaaaaacatcgtagtagcagtgatccaaaaggagggaaattatcatctgaaagtaagacaagcaacaggcgaatcagaacacttacggagcccagtgttgattttaatcatagtgatgattttacacccatatccactgtacagaaaacattacaattagagacttcatttatggggaataagcacattgaagacactggtagtacaccaagcattggagaaaatgacttaaaattcaccaagaattttggtacagagaatcacagagaaaatacaagccgagagaggttagtagtagaaagttcaacgagctcacatatgaagatacgtagccaaagtttcaatacagacactacaacaagtggcataagttcaatgagctcaagtccttcacgagagacagtaggtgtagatgctacaactatggacacagactgtggaagcatgagtactgtggtaagtactaaaactattaagacaagccactatttgacgccacagtctaaccatctgtctctctccaaatcaaattcggtgtccctggtgcctccaggttcttctcatacgcttcctagaagagcacagtcccttaaagcaccctctattgctacaattaaaagtctagcagattgtaactttagttacacaagttctagagatgcttttggctatgctacactgaaaagactacagcaacaaagaatgcatccatccttatctcactctgaagctttggcatctccagcaaaagatgtgctatttactgataccatcaccatgaaggccaacagttttgagtccagattaacaccaagcaggttcatgaaagccttaagttatgcatcattagataaagaagatttattgagtcctattaatcaaaataccctgcaacgatcttcctcagtgcggtccatggtgtccagtgccacatatgggggttcagatgattacattggtcttgctctcccggtggatataaatgatatattccaggtaaaggatattccctattttcagacaaaaaacataccaccacatgatgatcgaggtgcaagagcatttgcccatgatgcaggagaaagtacagaagacactggactacaggaacatacagatgataactgcctttattgtgtctgtattgaaattctgggtttccagcccagcaaccaactgagtgcaatatgtagtcattcagactttcaagatattccatattctgattggtgtgagcagactatccataatcctttagaagtggttccctctaagttttcggggatttctggatgcagtgatggggtgtctcaagaaggctcagctagcagcaccaaaagcacagaattgttactaggtgttaaaacaattccagatgatacaccaatgtgccgtatactccttcgcaaagaagttctaagattagtcattaatttgagtagttcagtttcaactaaatgtcatgagactgggcttttaacaattaaggagaagtatcctcaaacatttgatgacatatgcctttactctgaggtttcccatttgctgtcacactgcacattcagacttccgtgtcggaggttcatacaagaattatttcaagatgtacagtttctacaaatgcatgaagaagcagaggctgtgttggcaacaccaccaaagcaacctatagttgatacatctgctgaatcctgacctcatatttatgatggatatagatacatactatatatattcatatttgtggatttcctaaaagcctcagaaaatacgactgactaggcagcaaagacaggagtatcttctgtacactgttccgcagttactggtacatgaacagttggaactgctgactttcctaaccaaaacaacttccttctctcctttgttgagccttttgaggggttcatgattcattaccacagttttaagagtttcagttaccattgtatgcaagagccaagcactgaatacctacataggttttctattttctttcattttaaaagcataatgacagtggaacaataatgggatatgcagaagcacccttcacaagttatttctgaatgatttttagggtaaataatacagatgccttgtttgttaactaacttgtggaaagcaggaatcagtgtctctaaggctgcatcctattaccacaatggggtgtgctataactgctggtattagagagggaactttggccctttcacgtttttcttaatgtttgtaacactacttcagaggtttataacctcaaagcagaagaagagcctcaacaacccgggacttataagttatttttatgttactagacttgcataaagattcttgttttccaactcttcattttgttgcaatgtgttattacaggatatatgaaccaattaaggtttttcactacagttcttgaataaaatttaaaaatcattttttattttaattaaaaatatttcccatttatagaatgcatatatttgcaatggacttccactttcatcaactttccatctcatcgctttaaacaggaacttgaacaagcactgttagtttagacctaaaggataggaaagcattaaataatactttggatctcctgaggaaaagataagtttgcttgcaatttacacattccatggggaaagaagagccatatttccttaaaaaaaacattaataaagcttgttattgagaaaaattgtagtgaaaagccttaagtaccaaattttaaagcagcagtaacttaatttttatatcagtgtttttgttttgcacaaactaaatgcagtggtaggtgggtttatgagtatattaattgcctttatccatttgtgaagttaagttgatgagggcaaggtttttgtttgtttaatttgtatatgtctaaaggtatttggaactttttacaggaattaaacatatatgcaaatttgtatataaaaatagcatggccatcatttgaatgcttgtaaatgaaaggattatcttttttgagatctatatataaatagaaatagaaaatccagctggactgattaggattcttttttaattcatttgtgtataacatttttattacaattacacatcagttttgacacagtcatagcaacattaatattttcccatgatgcagatcctttttgtaatgggcttgttctttgagatctctgtaaagaaccctgtgaactagaaaacataactcacagagatacttttttaaaaaatttatttactggaactgaaagttccagttgggatgaagcatttcatctcacttcataacacctctttgactgcacttcagtgaattgttcttatgtgcactgtgtagcaacttacattataacaaagcagataagggctgtaagctgctgcttatgttgaaaagtggttcttcagattttctctcataaaatccagttgaagataaataatttttttatactttatcactgaacccaagtgtttatttaaatgtcaacagtacttctaagaacgttgcctgtcatcgtggtctttggtcttggataactaaactgcctttccagagaaccaaatgtcagagttactagaccaaatagtggttaaaacctccaaaggaagtaatgtaatcttattcataatgggattaacatattttagacattcattttaaacactacctcagttaatatagagtataaaaatctgtggtttaatccctcaaaagttaacagtaattttttttttgtcttacacacacacacaccccctcccccaccatcactatccctgtaccctcaccttggtcatctatcctgaaataaggcttagttagtattggcctgaatgttttgtgtttttttttttgttttttttttttactgttactttgaaaaatatgtatgtataccttatcatatctgcctatatcacttactttggggagatactcagagctttgtggttatcagtatactaaaaaaaaaaaaaagtcta

SEQ ID NO: 178499 - DNA, 686 bp, Homo sapiens
  Payload ID: 15181
  Gene Symbol: RICTOR
  Gene Name: RPTOR independent companion of MTOR, complex 2
  ENST ID: ENST00000514735
  CDS Start-End: 13-686
aaacccgtcaatatggcggcgatcggccgcggccgctctctgaagaacctccgagtacgagaaccttctgataacttaagagagattctccaaaatgtggccagattgcagggagtatcaaatatgagaaagctaggccatctgaataactttactaagcttctttgtgatattggccacagtgaagaaaaactgggctttcactatgaggatatcataatttgtttgcggttagctttattaaatgaagcaaaagaagtgcgagcagcagggctacgagcgcttcgatatctcatccaagactccagtattctccagaaggtgctaaaattgaaagtggactatttaatagctaggtgcattgacatacaacagagcaacgaggtagagaggacacaagcacttcgattagtcagaaagatgattactgtgaatgcttccttgtttcctagttctgtgaccaactcattaattgcagttggaaatgatggacttcaagaaagagacagaatggtccgagcatgcattgccattatctgtgaactagcacttcagaatccagaggtggtggcccttcgaggtggactaaacaccatcttgaaaaatgtgatcgattgccaattaagtcgaataaatgaggccctaattactacaattttgcaccttcttaatcatccaaagactcg

SEQ ID NO: 178500 - DNA, 3762 bp, Homo sapiens
  Payload ID: 15182
  Gene Symbol: RRN3
  Gene Name: RRN3 homolog, RNA polymerase I transcription factor
  Uniprot ID: Q9NYV6
  ENST ID: ENST00000198767
  CDS Start-End: 85-2040
acgcgcaacttccgggacagaggctgtggctggaaggagctgggcatccggcctgaggcgcagcggtcgcgttagttcggcccaatggcggcaccgctgcttcacacgcgtttgccgggagatgcggccgcttcgtcctctgcagttaagaagctgggcgcgtcgaggactgggatttcaaatatgcgtgcattagagaatgactttttcaattctcccccaagaaaaactgttcggtttggtggaactgtgacagaagtcttgctgaagtacaaaaagggtgaaacaaatgactttgagttgttgaagaaccagctgttagatccagacataaaggatgaccagatcatcaactggctgctagaattccgttcttctatcatgtacttgacaaaagactttgagcaacttatcagtattatattaagattgccttggttgaatagaagtcaaacagtagtggaagagtatttggcttttcttggtaatcttgtatcagcacagactgttttcctcagaccgtgtctcagcatgattgcttcccattttgtgcctccccgagtgatcattaaggaaggcgatgtagatgtttcagattctgatgatgaagatgataatcttcctgcaaattttgacacatgtcacagagccttgcaaataatagcaagatatgtaccatcgacaccgtggtttctcatgccaatactggtggaaaaatttccatttgttcgaaaatcagagagaacactggaatgttacgttcataacttactaaggattagtgtatattttccaaccttgaggcatgaaattctggagcttattattgaaaaactactcaagttggatgtgaatgcatcccggcagggtattgaagatgctgaagaaacagcaactcaaacttgtggtgggacagattccacggaaggattgtttaatatggatgaagatgaagaaactgaacatgaaacaaaggctggtcctgaacggctcgaccagatggtgcatcctgtagccgagcgcctggacatcctgatgtctttggttttgtcctacatgaaggatgtctgctatgtagatggtaaggttgataacggcaaaacaaaggatctatatcgcgacctgataaacatctttgacaaactcctgttgcccacccatgcctcctgccatgtacagtttttcatgttttacctctgtagtttcaaattgggattcgcagaggcatttttggaacatctctggaaaaaattgcaggacccaagtaatcctgccatcatcaggcaggctgctggaaattatattggaagctttttggcaagagctaaatttattcctcttattactgtaaaatcatgcctagatcttttggttaactggctgcacatataccttaataaccaggattcgggaacaaaggcattctgcgatgttgctctccatggaccattttactcagcctgccaagctgtgttctacacctttgtttttagacacaagcagcttttgagcggaaacctgaaagaaggtttgcagtatcttcagagtctgaattttgagcggatagtgatgagccagctaaatcccctgaagatttgcctgccctcagtggttaacttttttgctgcaatcacaaataagtaccagctcgtcttctgctacaccatcattgagaggaacaatcgccagatgctgccagtcattaggagtaccgctggaggagactcagtgcagatctgcacaaacccgctggacaccttcttcccctttgatccctgtgtgctgaagaggtcaaagaaattcattgatcctatttatcaggtgtgggaagacatgagtgctgaagagctacaggagttcaagaaacccatgaaaaaggacatagtggaagatgaagatgatgactttctgaaaggcgaagtgccccagaatgataccgtgattgggatcacaccaagctcctttgacacgcatttccgaagtccttcaagtagtgtgggctccccacccgtgttgtacatgcaacccagtcccctctgacggcagaaatttgtgactgagatgtgacatttgggattccccatcacttgtcatgccctcagcacccagcttgtgccattgggcattgatggcattgaactagagcgagtgcctgcctcggctgtggcacttccaggttcgactgaatcaagcatctgaagactgggtttttttgttgttgttgttccccttacagacaaaatgaagactatcatgtgcaatcttttacagtggggttgatgatacatttggaaggatttgcttgtttaatatgtacattttttgtgttaacagctttttgacacaattactgggtaatttctaatataggcagcagactgttttacgggttgctgttttaacatgggtttttgtcagatccatggtcttaggacttgactgatgagctttcagtgaagaatcctctaagataaaacttctatttaaagactttaactagaaagtgtttattttggctacattgttcaccttctgctgtattggtatttgtctgttgggatttcaagggagtgtagagaagacagaaggaaagctgagagctggcccgacatggtctgggacacagagttggagctggcactgaagatctccagggacttcagagaccaataaaagcccatagggaagagagagaggatatagggaaacagaatcagatgtgtaatatacttggcacagcgaaaaaatggatttaaaagacaaaaatggaggtccaggtagatgtaattcacacagactgaaagtgagttcgggcttgtgtaaaacacatgagattggatttgaccccttggctctcaagtgtccccttagatctagaactgctccttggtggccattagatcgagtcagttttgatctgcatcacttagttattgggaatttctttgttggaaacaggaaaatttttttagattatttggtgtacggttttgctcacaacaataggtggaagttgctagtgcagtcttggtctgatggctgtgtgcatcgcacattcggcttggtgaaatccttctctaaagcctctttttgtatttttataactaaacagaggaagtcttcagaagacctcgctttaaaacaaatttgtgcaaacactgctagagtcattttgaagctcaagcattttcactttgtttcttacatgtgtacttttttgtttacttgtgaaaatggccatctttaagcatatttattttctgccactttatttaaaggcaagcaatattttcttgatcataaatattttgtaatgaaatacttcctcttttccagggctttgtatgcacttgtataattacattgatggcaatgtagagtttgaatttcagtctgtaaatacttttttggaaaatagaaatttttattgctttaaagttttggatatgggtggttttcttttccgggtttggtggaaagtaatttgagaactttaaggttgtctttttaactgctggcaaaatgttgattttttaatattagataaaacgagtaaacgaaattccccagaaattagtagtaagtggggtctttgtgggttgggaagtagttttaatgtagaaagacatttacatataagtctgtttaatttcaaaggagtttgtgaaaaaaaatccatggtgaaaatgaaacaatgacatggttaatctggaacttacgttcttataccaataaaaggtacctcaatacatgttctttcaa

SEQ ID NO: 178501 - DNA, 2039 bp, Homo sapiens
  Payload ID: 15182
  Gene Symbol: RRN3
  Gene Name: RRN3 homolog, RNA polymerase I transcription factor
  Uniprot ID: Q9NYV6
  ENST ID: ENST00000327307
  CDS Start-End: 68-1924
acagaaatgagctcattcctcctaactgggtaatagacatgggtggggcctggaaaagatttcaaatatgcgtgcattagagaatgactttttcaattctcccccaagaaaaactgttcggtttggtggaactgtgacagaagtcttgctgaagtacaaaaagggtgaaacaaatgactttgagttgttgaagaaccagctgttagatccagacataaaggatgaccagatcatcaactggctgctagaattccgttcttctatcatgtacttgacaaaagactttgagcaacttatcagtattatattaagattgccttggttgaatagaagtcaaacagtagtggaagagtatttggcttttcttggtaatcttgtatcagcacagactgttttcctcagaccgtgtctcagcatgattgcttcccattttgtgcctccccgagtgatcattaaggaaggcgatgtagatgtttcagattctgatgatgaagatgataatcttcctgcaaattttgacacatgtcacagagccttgcaaataatagcaagatatgtaccatcgacaccgtggtttctcatgccaatactggtggaaaaatttccatttgttcgaaaatcagagagaacactggaatgttacgttcataacttactaaggattagtgtatattttccaaccttgaggcatgaaattctggagcttattattgaaaaactactcaagttggatgtgaatgcatcccggcagggtattgaagatgctgaagaaacagcaactcaaacttgtggtgggacagattccacggaaggattgtttaatatggatgaagatgaagaaactgaacatgaaacaaaggctggtcctgaacggctcgaccagatggtgcatcctgtagccgagcgcctggacatcctgatgtctttggttttgtcctacatgaaggatgtctgctatgtagatggtaaggttgataacggcaaaacaaaggatctatatcgcgacctgataaacatctttgacaaactcctgttgcccacccatgcctcctgccatgtacagtttttcatgttttacctctgtagtttcaaattgggattcgcagaggcatttttggaacatctctggaaaaaattgcaggacccaagtaatcctgccatcatcaggcaggctgctggaaattatattggaagctttttggcaagagctaaatttattcctcttattactgtaaaatcatgcctagatcttttggttaactggctgcacatataccttaataaccaggattcgggaacaaaggcattctgcgatgttgctctccatggaccattttactcagcctgccaagctgtgttctacacctttgtttttagacacaagcagcttttgagcggaaacctgaaagaaggtttgcagtatcttcagagtctgaattttgagcggatagtgatgagccagctaaatcccctgaagatttgcctgccctcagtggttaacttttttgctgcaatcacaaataagtaccagctcgtcttctgctacaccatcattgagaggaacaatcgccagatgctgccagtcattaggagtaccgctggaggagactcagtgcagatctgcacaaacccgctggacaccttcttcccctttgatccctgtgtgctgaagaggtcaaagaaattcattgatcctatttatcaggtgtgggaagacatgagtgctgaagagctacaggagttcaagaaacccatgaaaaaggacatagtggaagatgaagatgatgactttctgaaaggcgaagtgccccagaatgataccgtgattgggatcacaccaagctcctttgacacgcatttccgaagtccttcaagtagtgtgggctccccacccgtgttgtacatgcaacccagtcccctctgacggcagaaatttgtgactgagatgtgacatttgggattccccatcacttgtcatgccctcagcacccagcttgtgccattgggcattgatggcattgaactagagcgagtgcctg

SEQ ID NO: 178502 - DNA, 2198 bp, Homo sapiens
  Payload ID: 15182
  Gene Symbol: RRN3
  Gene Name: RRN3 homolog, RNA polymerase I transcription factor
  ENST ID: ENST00000429751
  CDS Start-End: 17-1882
gcgttagttcggcccaatggcggcaccgctgcttcacacgcgtttgccgggagatgcggccgcttcgtcctctgcagttaagaagctgggcgcgtcgaggactgggatttcaaatatgcgtgcattagagaatgactttttcaattctcccccaagaaaaactgttcggtttggtggaactgtgacagaagtcttgctgaagtacaaaaagggtgaaacaaatgactttgagttgttgaagaaccagctgttagatccagacataaagagattgccttggttgaatagaagtcaaacagtagtggaagagtatttggcttttcttggtaatcttgtatcagcacagactgttttcctcagaccgtgtctcagcatgattgcttcccattttgtgcctccccgagtgatcattaaggaaggcgatgtagatgtttcagattctgatgatgaagatgataatcttcctgcaaattttgacacatgtcacagagccttgcaaataatagcaagatatgtaccatcgacaccgtggtttctcatgccaatactggtggaaaaatttccatttgttcgaaaatcagagagaacactggaatgttacgttcataacttactaaggattagtgtatattttccaaccttgaggcatgaaattctggagcttattattgaaaaactactcaagttggatgtgaatgcatcccggcagggtattgaagatgctgaagaaacagcaactcaaacttgtggtgggacagattccacggaaggattgtttaatatggatgaagatgaagaaactgaacatgaaacaaaggctggtcctgaacggctcgaccagatggtgcatcctgtagccgagcgcctggacatcctgatgtctttggttttgtcctacatgaaggatgtctgctatgtagatggtaaggttgataacggcaaaacaaaggatctatatcgcgacctgataaacatctttgacaaactcctgttgcccacccatgcctcctgccatgtacagtttttcatgttttacctctgtagtttcaaattgggattcgcagaggcatttttggaacatctctggaaaaaattgcaggacccaagtaatcctgccatcatcaggcaggctgctggaaattatattggaagctttttggcaagagctaaatttattcctcttattactgtaaaatcatgcctagatcttttggttaactggctgcacatataccttaataaccaggattcgggaacaaaggcattctgcgatgttgctctccatggaccattttactcagcctgccaagctgtgttctacacctttgtttttagacacaagcagcttttgagcggaaacctgaaagaaggtttgcagtatcttcagagtctgaattttgagcggatagtgatgagccagctaaatcccctgaagatttgcctgccctcagtggttaacttttttgctgcaatcacaaataagtaccagctcgtcttctgctacaccatcattgagaggaacaatcgccagatgctgccagtcattaggagtaccgctggaggagactcagtgcagatctgcacaaacccgctggacaccttcttcccctttgatccctgtgtgctgaagaggtcaaagaaattcattgatcctatttatcaggtgtgggaagacatgagtgctgaagagctacaggagttcaagaaacccatgaaaaaggacatagtggaagatgaagatgatgactttctgaaaggcgaagtgccccagaatgataccgtgattgggatcacaccaagctcctttgacacgcatttccgaagtccttcaagtagtgtgggctccccacccgtgttgtacatgcaacccagtcccctctgacggcagaaatttgtgactgagatgtgacatttgggattccccatcacttgtcatgccctcagcacccagcttgtgccattgggcattgatggcattgaactagagcgagtgcctgcctcggctgtggcacttccaggttcgactgaatcaagcatctgaagactgggtttttttgttgttgttgttccccttacagacaaaatgaagactatcatgtgcaatcttttacagtggggttgatgatacatttggaaggatttgcttgtttaatatgtacattttttgtgttaacagctttttgacacaattactgggt

SEQ ID NO: 178503 - DNA, 1001 bp, Homo sapiens
  Payload ID: 15182
  Gene Symbol: RRN3
  Gene Name: RRN3 homolog, RNA polymerase I transcription factor
  Uniprot ID: Q9NYV6
  ENST ID: ENST00000564131
  CDS Start-End: 21-938
ggtcgcgttagttcggcccaatggcggcaccgctgcttcacacgcgtttgccgggagatgcggccgcttcgtcctctgcagttaagaagctgggcgcgtcgaggactgggatttcaaatatgcgtgcattagagaatgactttttcaattctcccccaagaaaaactgttcggtttggtggaactgtgacagaagtcttgctgaagtacaaaaagggtgaaacaaatgactttgagttgttgaagaaccagctgttagatccagacataaaggatgaccagatcatcaactggctgctagaattccgttcttctatcatgtacttgacaaaagactttgagcaacttatcagtattatattaagattgccttggttgaatagaagtcaaacagtagtggaagagtatttggcttttcttggtaatcttgtatcagcacagactgttttcctcagaccgtgtctcagcatgattgcttcccattttgtgcctccccgagtgatcattaaggaaggcgatgtagatgtttcagattctgatgatgaagatgataatcttcctgcaaattttgacacatgtcacagagccttgcaaataatagcaagatatgtaccatcgacaccgtggtttctcatgccaatactggtggaaaaatttccatttgttcgaaaatcagagagaacactggaatgttacgttcataacttactaaggattagtgtatattttccaaccttgaggcatgaaattctggagcttattattgaaaaactactcaagttggatgtgaatgcatcccggcagggtattgaagatgctgaagaaacagcaactcaaacttgtggtgggacagattccacggaaggattgtttaatatggttagcagtttattaatgaaagtggagatgaagtttatcataaagggtggaaacagctagtgctgctcatctttgttaaggctttagattgaaagaattaaaatagttcagcaaacttgaaaa

SEQ ID NO: 178504 - DNA, 2128 bp, Homo sapiens
  Payload ID: 15182
  Gene Symbol: RRN3
  Gene Name: RRN3 homolog, RNA polymerase I transcription factor
  ENST ID: ENST00000563559
  CDS Start-End: 79-1995
aacttccgggacagaggctgtggctggaaggagctgggcatccggcctgaggcgcagcggtcgcgttagttcggcccaatggcggcaccgctgcttcacacgcgtttgccgggagatgcggccgcttcgtcctctgcagttaagaagctgggcgcgtcgaggactgggatttcaaatatgcgtgcattagagaatgactttttcaattctcccccaagaaaaactgttcggtttggtggaactgtgacagaagtcttgctgaagtacaaaaagggtgaaacaaatgactttgagttgttgaagaaccagctgttagatccagacataaaggatgaccagatcatcaactggctgctagaattccgttcttctatcatgtacttgacaaaagactttgagcaacttatcagtattatattaagattgccttggttgaatagaagtcaaacagtagtggaagagtatttggcttttcttggtaatcttgtatcagcacagactgttttcctcagaccgtgtctcagcatgattgcttcccattttgtgcctccccgagtgatcattaaggaaggcgatgtagatgtttcagattctgatgatgaagatgataatcttcctgcaaattttgacacatgtcacagagccttgcaaataatagcaagatatgtaccatcgacaccgtggtttctcatgccaatactggtggaaaaatttccatttgttcgaaaatcagagagaacactggaatgttacgttcataacttactaaggattagtgtatattttccaaccttgaggcatgaaattctggagcttattattgaaaaactactcaagttggatgtgaatgcatcccggcagggtattgaagatgctgaagaaacagcaactcaaacttgtggtgggacagattccacggaaggattgtttaatatggatgaagatgaagaaactgaacatgaaacaaaggctggtcctgaacggctcgaccagatggtgcatcctgtagccgagcgcctggacatcctgatgtctttggttttgtcctacatgaaggatgtctgctatgtagatggtaaggttgataacggcaaaacaaaggatctatatcgcgacctgataaacatctttgacaaactcctgttgcccacccatgcctcctgccatgtacagtttttcatgttttacctctgtagtttcaaattgggattcgcagaggcatttttggaacatctctggaaaaaattgcaggacccaagtaatcctgccatcatcaggcaggctgctggaaattatattggaagctttttggcaagagctaaatttattcctcttattactgtaaaatcatgcctagatcttttggttaactggctgcacatataccttaataaccaggattcgggaacaaaggcattctgcgatgttgctctccatggaccattttactcagcctgccaagctgtgttctacacctttgtttttagacacaagcagcttttgagcggaaacctgaaagaaggtttgcagtatcttcagagtctgaattttgagcggatagtgatgagccagctaaatcccctgaagatttgcctgccctcagtggttaacttttttgctgcaatcacaaataagtaccagctcgtcttctgctacaccatcattgagaggaacaatcgccagatgctgccagtcattaggagtaccgctggaggagactcagtgcagatctgcacaaacccgctggacaccttcttcccctttgatccctgtgtgctgaagaggtcaaagaaattcattgatcctatttatcaggtgtgggaagacatgagtgctgaagagctacaggagttcaagaaacccatgaaaaaggacatagtggaagatgaagatgatgactttctgaaaggcgaagtgccccagaatgataccgtgattgggatcacaccaagctcctttgacacgcatttccgaagtccttcaagtagtttttaatgtagaaagacatttacatataagtctgtttaatttcaaaggagtttgtgaaaaaaaatccatggtgaaaatgaaacaatgacatggttaatctggaacttacgttcttataccaataaaaggtacctcaata

SEQ ID NO: 178505 - DNA, 3762 bp, Homo sapiens; identical to SEQ ID NO: 178500
  Payload ID: 15182
  Gene Symbol: RRN3
  Gene Name: RRN3 homolog, RNA polymerase I transcription factor
  Uniprot ID: Q9NYV6
  ENST ID: ENST00000616334
  CDS Start-End: 85-2040

SEQ ID NO: 178506 - DNA, 2128 bp, Homo sapiens; identical to SEQ ID NO: 178504
  Payload ID: 15182
  Gene Symbol: RRN3
  Gene Name: RRN3 homolog, RNA polymerase I transcription factor
  ENST ID: ENST00000632447
  CDS Start-End: 79-1995

SEQ ID NO: 178507 - DNA, 1001 bp, Homo sapiens; identical to SEQ ID NO: 178503
  Payload ID: 15182
  Gene Symbol: RRN3
  Gene Name: RRN3 homolog, RNA polymerase I transcription factor
  Uniprot ID: Q9NYV6
  ENST ID: ENST00000634151
  CDS Start-End: 21-938

SEQ ID NO: 178508 - DNA, 2198 bp, Homo sapiens; identical to SEQ ID NO: 178502
  Payload ID: 15182
  Gene Symbol: RRN3
  Gene Name: RRN3 homolog, RNA polymerase I transcription factor
  ENST ID: ENST00000631800
  CDS Start-End: 17-1882

SEQ ID NO: 178509 - DNA, 2039 bp, Homo sapiens; identical to SEQ ID NO: 178501
  Payload ID: 15182
  Gene Symbol: RRN3
  Gene Name: RRN3 homolog, RNA polymerase I transcription factor
  Uniprot ID: Q9NYV6
  ENST ID: ENST00000632541
  CDS Start-End: 68-1924

SEQ ID NO: 178510 - DNA, 2621 bp, Homo sapiens
  Payload ID: 15183
  Gene Symbol: RSPO1
  Gene Name: R-spondin 1
  Uniprot ID: Q2MKA7
  ENST ID: ENST00000356545
  CDS Start-End: 714-1505
attccctccctggtgctcgcagaggactggcccctctccgggctgggagctccggccgagcggaggcgcgacggagagcaccagcgcagggcagagagcccggagcgaccggccagagtagggcatccgctcgggtgctgcggagaacgagggcagctccgagccgccccggaggaccgatgcgccgggtggggcgctggccccgagggcgtgagccgtccgcagattgagcaacttgggaacgggcgggcggagcgcaggcgagccgggcgcccaggacagtcccgcagcgggcgggtgagcgggccgcgccctcgcccctcccgggcctgcccccgtcgcgactggcagcacgaagctgagattgtggtttcctggtgattcaggtgggagtgggccagaagatcaccgctggcaaggactgggttggtttttggagtagtccctgctgacgtgacaaaaagatctctcatatgatattccgaggtatctttgaggaagtctctctttgaggacctccctttgagctgatggagaactgggctccccacaccctctctgtccccagctgagattatggtggatttgggctacggcccaggcctgggcctcctgctgctgacccagccccagaggtgttagcaagagccgtgtgctatccaccctccccgagaccacccctccgaccaggggcctggagctggcgcgtgactatgcggcttgggctgtgtgtggtggccctggttctgagctggacgcacctcaccatcagcagccgggggatcaaggggaaaaggcagaggcggatcagtgccgaggggagccaggcctgtgccaaaggctgtgagctctgctctgaagtcaacggctgcctcaagtgctcacccaagctgttcatcctgctggagaggaacgacatccgccaggtgggcgtctgcttgccgtcctgcccacctggatacttcgacgcccgcaaccccgacatgaacaagtgcatcaaatgcaagatcgagcactgtgaggcctgcttcagccataacttctgcaccaagtgtaaggagggcttgtacctgcacaagggccgctgctatccagcttgtcccgagggctcctcagctgccaatggcaccatggagtgcagtagtcctgcgcaatgtgaaatgagcgagtggtctccgtgggggccctgctccaagaagcagcagctctgtggtttccggaggggctccgaggagcggacacgcagggtgctacatgcccctgtgggggaccatgctgcctgctctgacaccaaggagacccggaggtgcacagtgaggagagtgccgtgtcctgaggggcagaagaggaggaagggaggccagggccggcgggagaatgccaacaggaacctggccaggaaggagagcaaggaggcgggtgctggctctcgaagacgcaaggggcagcaacagcagcagcagcaagggacagtggggccactcacatctgcagggcctgcctagggacactgtccagcctccaggcccatgcagaaagagttcagtgctactctgcgtgattcaagctttcctgaactggaacgtcgggggcaaagcatacacacacactccaatccatccatgcatacatagacacaagacacacacgctcaaacccctgtccacatatacaaccatacatacttgcacatgtgtgttcatgtacacacgcagacacagacaccacacacacacatacacacacacacacacacacacctgaggccaccagaagacacttccatccctcgggcccagcagtacacacttggtttccagagctcccagtggacatgtcagagacaacacttcccagcatctgagaccaaactgcagaggggagccttctggagaagctgctgggatcggaccagccactgtggcagatgggagccaagcttgaggactgctggtgacctgggaagaaaccttcttcccatcctgttcagcactcccagctgtgtgactttatcgttggagagtattgttacccttccaggatacatatcagggttaacctgactttgaaaactgcttaaaggtttatttcaaattaaaacaaaaaaatcaacgacagcagtagacacaggcaccacattcctttgcagggtgtgagggtttggcgaggtatgcgtaggagcaagaagggacagggaatttcaagagaccccaaatagcctgctcagtagagggtcatgcagacaaggaagaaaacttaggggctgctctgacggtggtaaacaggctgtctatatccttgttactcagagcatggcccggcagcagtgttgtcacagggcagcttgttaggaatgagaatctcaggtctcattccagacctggtgagccagagtctaaattttaagattcctgatgattggcatgttacccaaatttgagaagtgctgctgtaattccccttaaaggacgggagaaagggccccggccatcttgcagcaggagggattctggtcagctataaaggaggactttccatctgggagaggcagaatctatatactgaagggctagtggcactgccaggggaagggagtgcgtaggcttccagtgatggttggg

SEQ ID NO: 178511 - DNA, 2320 bp, Homo sapiens
  Payload ID: 15183
  Gene Symbol: RSPO1
  Gene Name: R-spondin 1
  Uniprot ID: Q2MKA7
  ENST ID: ENST00000401068
  CDS Start-End: 586-1377
cgcgccctcgcccctcccgggcctgcccccgtcgcgactggcagcacgaagctgagattgtggtttcctggtgattcaggtgggagtgggccagaagatcaccgctggcaaggactggtgtttgtcaactgtaaggactcatggaacagatctaccagggattctcagaccttagtttgagaaatgctgcaattaaaggcaaatcctatcactctgagtgatcgctttggtgtcgaggcaatcaaccataaagataaatgcaaatatggaaattgcataacagtactcagtattaaggttggtttttggagtagtccctgctgacgtgacaaaaagatctctcatatgatattccgaggtatctttgaggaagtctctctttgaggacctccctttgagctgatggagaactgggctccccacaccctctctgtccccagctgagattatggtggatttgggctacggcccaggcctgggcctcctgctgctgacccagccccagaggtgttagcaagagccgtgtgctatccaccctccccgagaccacccctccgaccaggggcctggagctggcgcgtgactatgcggcttgggctgtgtgtggtggccctggttctgagctggacgcacctcaccatcagcagccgggggatcaaggggaaaaggcagaggcggatcagtgccgaggggagccaggcctgtgccaaaggctgtgagctctgctctgaagtcaacggctgcctcaagtgctcacccaagctgttcatcctgctggagaggaacgacatccgccaggtgggcgtctgcttgccgtcctgcccacctggatacttcgacgcccgcaaccccgacatgaacaagtgcatcaaatgcaagatcgagcactgtgaggcctgcttcagccataacttctgcaccaagtgtaaggagggcttgtacctgcacaagggccgctgctatccagcttgtcccgagggctcctcagctgccaatggcaccatggagtgcagtagtcctgcgcaatgtgaaatgagcgagtggtctccgtgggggccctgctccaagaagcagcagctctgtggtttccggaggggctccgaggagcggacacgcagggtgctacatgcccctgtgggggaccatgctgcctgctctgacaccaaggagacccggaggtgcacagtgaggagagtgccgtgtcctgaggggcagaagaggaggaagggaggccagggccggcgggagaatgccaacaggaacctggccaggaaggagagcaaggaggcgggtgctggctctcgaagacgcaaggggcagcaacagcagcagcagcaagggacagtggggccactcacatctgcagggcctgcctagggacactgtccagcctccaggcccatgcagaaagagttcagtgctactctgcgtgattcaagctttcctgaactggaacgtcgggggcaaagcatacacacacactccaatccatccatgcatacatagacacaagacacacacgctcaaacccctgtccacatatacaaccatacatacttgcacatgtgtgttcatgtacacacgcagacacagacaccacacacacacatacacacacacacacacacacacctgaggccaccagaagacacttccatccctcgggcccagcagtacacacttggtttccagagctcccagtggacatgtcagagacaacacttcccagcatctgagaccaaactgcagaggggagccttctggagaagctgctgggatcggaccagccactgtggcagatgggagccaagcttgaggactgctggtgacctgggaagaaaccttcttcccatcctgttcagcactcccagctgtgtgactttatcgttggagagtattgttacccttccaggatacatatcagggttaacctgactttgaaaactgcttaaaggtttatttcaaattaaaacaaaaaaatcaacgacagcagtagacacaggcaccacattcctttgcagggtgtgagggtttggcgaggtatgcgtaggagcaagaagggacagggaatttcaagagaccccaaatagcctgctcagtagagggtcatgcagacaaggaagaaaacttaggggctgctctgacggtggtaaacaggctgtctatatccttgttactcagagcatggcccggcagcagtgttgtcacagggcagcttgttaggaatgagaatctcaggtctcattccagacctggtgagccagagtctaaattttaagattcctgatgattggcatgttacccaaatttgagaagtgct

SEQ ID NO: 178512 - DNA, 2463 bp, Homo sapiens
  Payload ID: 15183
  Gene Symbol: RSPO1
  Gene Name: R-spondin 1
  Uniprot ID: Q2MKA7
  ENST ID: ENST00000612451
  CDS Start-End: 456-1058
aggcgagccgggcgcccaggacagtcccgcagcgggcgggtgagcgggccgcgccctcgcccctcccgggcctgcccccgtcgcgactggcagcacgaagctgagattgtggtttcctggtgattcaggtgggagtgggccagaagatcaccgctggcaaggactgggttggtttttggagtagtccctgctgacgtgacaaaaagatctctcatatgatattccgaggtatctttgaggaagtctctctttgaggacctccctttgagctgatggagaactgggctccccacaccctctctgtccccagctgagattatggtggatttgggctacggcccaggcctgggcctcctgctgctgacccagccccagaggtgttagcaagagccgtgtgctatccaccctccccgagaccacccctccgaccaggggcctggagctggcgcgtgactatgcggcttgggctgtgtgtggtggccctggttctgagctggacgcacctcaccatcagcagccgggggatcaaggggaaaaggcagaggcggatcagtgccgaggggagccaggcctgtgccaaaggctgtgagctctgctctgaagtcaacggctgcctcaagtgctcacccaagctgttcatcctgctggagaggaacgacatccgccaggtgggcgtctgcttgccgtcctgcccacctggatacttcgacgcccgcaaccccgacatgaacaagtgcatcaaatgcaagatcgagcactgtgaggcctgcttcagccataacttctgcaccaagtgtaaggagggcttgtacctgcacaagggccgctgctatccagcttgtcccgagggctcctcagctgccaatggcaccatggagtgcagtagtcctgggcagaagaggaggaagggaggccagggccggcgggagaatgccaacaggaacctggccaggaaggagagcaaggaggcgggtgctggctctcgaagacgcaaggggcagcaacagcagcagcagcaagggacagtggggccactcacatctgcagggcctgcctagggacactgtccagcctccaggcccatgcagaaagagttcagtgctactctgcgtgattcaagctttcctgaactggaacgtcgggggcaaagcatacacacacactccaatccatccatgcatacatagacacaagacacacacgctcaaacccctgtccacatatacaaccatacatacttgcacatgtgtgttcatgtacacacgcagacacagacaccacacacacacatacacacacacacacacacacacctgaggccaccagaagacacttccatccctcgggcccagcagtacacacttggtttccagagctcccagtggacatgtcagagacaacacttcccagcatctgagaccaaactgcagaggggagccttctggagaagctgctgggatcggaccagccactgtggcagatgggagccaagcttgaggactgctggtgacctgggaagaaaccttcttcccatcctgttcagcactcccagctgtgtgactttatcgttggagagtattgttacccttccaggatacatatcagggttaacctgactttgaaaactgcttaaaggtttatttcaaattaaaacaaaaaaatcaacgacagcagtagacacaggcaccacattcctttgcagggtgtgagggtttggcgaggtatgcgtaggagcaagaagggacagggaatttcaagagaccccaaatagcctgctcagtagagggtcatgcagacaaggaagaaaacttaggggctgctctgacggtggtaaacaggctgtctatatccttgttactcagagcatggcccggcagcagtgttgtcacagggcagcttgttaggaatgagaatctcaggtctcattccagacctggtgagccagagtctaaattttaagattcctgatgattggcatgttacccaaatttgagaagtgctgctgtaattccccttaaaggacgggagaaagggccccggccatcttgcagcaggagggattctggtcagctataaaggaggactttccatctgggagaggcagaatctatatactgaagggctagtggcactgccaggggaagggagtgcgtaggcttccagtgatggttggggacaatcctgcccaaaggcagggcagtggatggaataactccttgtggcattctgaagtgtgtgccaggctctggactaggtgctaggtttccagggaggagccaaacacgggccttgctcttgtggagcttagaggttggtggggaagaaaataggcatgcaccaaggaattgtacaaacacatatataactacaaaaggatggtgccaagggcaggtgaccactggcatctatgcttagctatgaaagtgaataaagcagaataaaaataaaatactttctctcagg

SEQ ID NO: 178513 - DNA, 2331 bp, Homo sapiens
  Payload ID: 15183
  Gene Symbol: RSPO1
  Gene Name: R-spondin 1
  Uniprot ID: Q2MKA7
  ENST ID: ENST00000615459
  CDS Start-End: 216-926
aggcgagccgggcgcccaggacagtcccgcagcgggcgggtgagcgggccgcgccctcgcccctcccgggcctgcccccgtcgcgactggcagcacgaagctgagattgtggtttcctggtgattcaggtgggagtgggccagaagatcaccgctggcaaggactgggttggtttttggagtagtccctgctgacgtgacaaaaagatctctcatatgatattccgagtcagtgccgaggggagccaggcctgtgccaaaggctgtgagctctgctctgaagtcaacggctgcctcaagtgctcacccaagctgttcatcctgctggagaggaacgacatccgccaggtgggcgtctgcttgccgtcctgcccacctggatacttcgacgcccgcaaccccgacatgaacaagtgcatcaaatgcaagatcgagcactgtgaggcctgcttcagccataacttctgcaccaagtgtaaggagggcttgtacctgcacaagggccgctgctatccagcttgtcccgagggctcctcagctgccaatggcaccatggagtgcagtagtcctgcgcaatgtgaaatgagcgagtggtctccgtgggggccctgctccaagaagcagcagctctgtggtttccggaggggctccgaggagcggacacgcagggtgctacatgcccctgtgggggaccatgctgcctgctctgacaccaaggagacccggaggtgcacagtgaggagagtgccgtgtcctgaggggcagaagaggaggaagggaggccagggccggcgggagaatgccaacaggaacctggccaggaaggagagcaaggaggcgggtgctggctctcgaagacgcaaggggcagcaacagcagcagcagcaagggacagtggggccactcacatctgcagggcctgcctagggacactgtccagcctccaggcccatgcagaaagagttcagtgctactctgcgtgattcaagctttcctgaactggaacgtcgggggcaaagcatacacacacactccaatccatccatgcatacatagacacaagacacacacgctcaaacccctgtccacatatacaaccatacatacttgcacatgtgtgttcatgtacacacgcagacacagacaccacacacacacatacacacacacacacacacacacctgaggccaccagaagacacttccatccctcgggcccagcagtacacacttggtttccagagctcccagtggacatgtcagagacaacacttcccagcatctgagaccaaactgcagaggggagccttctggagaagctgctgggatcggaccagccactgtggcagatgggagccaagcttgaggactgctggtgacctgggaagaaaccttcttcccatcctgttcagcactcccagctgtgtgactttatcgttggagagtattgttacccttccaggatacatatcagggttaacctgactttgaaaactgcttaaaggtttatttcaaattaaaacaaaaaaatcaacgacagcagtagacacaggcaccacattcctttgcagggtgtgagggtttggcgaggtatgcgtaggagcaagaagggacagggaatttcaagagaccccaaatagcctgctcagtagagggtcatgcagacaaggaagaaaacttaggggctgctctgacggtggtaaacaggctgtctatatccttgttactcagagcatggcccggcagcagtgttgtcacagggcagcttgttaggaatgagaatctcaggtctcattccagacctggtgagccagagtctaaattttaagattcctgatgattggcatgttacccaaatttgagaagtgctgctgtaattccccttaaaggacgggagaaagggccccggccatcttgcagcaggagggattctggtcagctataaaggaggactttccatctgggagaggcagaatctatatactgaagggctagtggcactgccaggggaagggagtgcgtaggcttccagtgatggttggggacaatcctgcccaaaggcagggcagtggatggaataactccttgtggcattctgaagtgtgtgccaggctctggactaggtgctaggtttccagggaggagccaaacacgggccttgctcttgtggagcttagaggttggtggggaagaaaataggcatgcaccaaggaattgtacaaacacatatataactacaaaaggatggtgccaagggcaggtgaccactggcatctatgcttagctatgaaagtgaataaagcagaataaaaataaaatactttctctcagg

SEQ ID NO: 178514 - DNA, 3111 bp, Homo sapiens
  Payload ID: 15184
  Gene Symbol: RSPO2
  Gene Name: R-spondin 2
  Uniprot ID: Q6UXX9
  ENST ID: ENST00000276659
  CDS Start-End: 622-1353
acttatagaagcatcccaagcctcagccggtctgcatctccatcggaaagtgcgcttgccacatcccttcggatcacttcgtcctcccgagagcgttctgccttctacagctcggaaagaaagaaatcttagctgtgaagtgaccgtggagaaagcgcaggaagcgacacaattggttagggaggcagagagtgtgagcgggcgcaccccttgcctggggaccgcgctcgcgggcggggacggagcatcccagtggctgcacccgccgctccgcgctcctgcctggcgtcgccaaccccgcggcggccgctggaattccagagctgccaggcgctcccagccggtctcggcaaacttttccccagcccacgtgctaaccaagcggctcgcttcccgagcccgggatggagcaccgcgcctagggaggccgcgccgcccgagacgtgcgcacggttcgtggcggagagatgctgatcgcgctgaactgaccggtgcggcccgggggtgagtggcgagtctccctctgagtcctccccagcagcgcggccggcgccggctctttgggcgaaccctccagttcctagactttgagaggcgtctctcccccgcccgaccgcccagatgcagtttcgccttttctcctttgccctcatcattctgaactgcatggattacagccactgccaaggcaaccgatggagacgcagtaagcgagctagttatgtatcaaatcccatttgcaagggttgtttgtcttgttcaaaggacaatgggtgtagccgatgtcaacagaagttgttcttcttccttcgaagagaagggatgcgccagtatggagagtgcctgcattcctgcccatccgggtactatggacaccgagccccagatatgaacagatgtgcaagatgcagaatagaaaactgtgattcttgctttagcaaagacttttgtaccaagtgcaaagtaggcttttatttgcatagaggccgttgctttgatgaatgtccagatggttttgcaccattagaagaaaccatggaatgtgtggaaggatgtgaagttggtcattggagcgaatggggaacttgtagcagaaataatcgcacatgtggatttaaatggggtctggaaaccagaacacggcaaattgttaaaaagccagtgaaagacacaatactgtgtccaaccattgctgaatccaggagatgcaagatgacaatgaggcattgtccaggagggaagagaacaccaaaggcgaaggagaagaggaacaagaaaaagaaaaggaagctgatagaaagggcccaggagcaacacagcgtcttcctagctacagacagagctaaccaataaaacaagagatccggtagatttttaggggtttttgtttttgcaaatgtgcacaaagctactctccactcctgcacactggtgtgcagcctttgtgctgctctgcccagtatctgttcccagtaacatggtgaaaggaagcaccaccagcatggcccctgtgttatttatgctttgatttgaatctggagactgtgaaggcaggagtaagtgcacagcccgtgacttggctcagtgtgtgctgagagaatccgtccccggcaccatggacatgctagaggtgtgaggctgcagaacaccgctggaggacggacttgtgcctatttatgtgaaagaagatgcttggcaggcaatgcgctactcactcgtgacctttatttctcacattgtgcattttcaaggatatgtttgtgtggatatctgcttagtgttaccacatggtattctcagcatgttaccttcacactgttgtgcgatgaaactgcttttagctgaggatatgctctggaaattcctgctcagtttcactgcagccctaatatgtacatatactgcaggagctacatataaagctcttatttactgtatatttatgctttcttgtgggtaacaagtcatacctgattaatatgatgccactttgtttctagtggttcctaacccattgtctgataaatgacttttctagtttggggaattgacacttgttttgttgcctcttgaaactttttttttttcccctcattgtgggcttatttctcattgtaagggtaggataaactagtttttgtatatagagtcaaatgaccagtgtcaaagagtttgcatattgggtagaccttctccactccacatgtcccacacatatagataaagcagcaggcggcatctggcaatcagaagcccaaactgcctttgagtctaagatgtgatgactttgatgaaacacaactgaaaacatgagggactatatccagtcacttgtagccagtttcacaggccagctacagaattgtccaaacaaacattatttctgactgcaatttttttcccccaaatttaaagcaatccctggctttaaatgacaaggcacctaccaatgttcttgggtcactgaagaagctactaccatgagcctgggcatagaattttaggagataaaaggatgaatttctgtgactgccagtcagatcttaacaggtttctgttgagccagaatctgtttcagatccaagatggagaggaacactatggaaacttcccaggtgactttcagagcagttgtttcaaacacatcattgtccttttaggggaaccagtttttagaaggttgtgaattggctttttcacaaagcatgattatcttcctggctgatccaggagaaaattagaacagaaaaataatggttgtggattttgaaacaaagcaaggtaaagccttttttttttcaccttgcattggcaaaactacctcttcagtgtttttaacttttgattcaaaagcatcttaccaataaggataaatatcatatacatcgttatgaaaatattgctatgagataataagccacatatgaatgttgtatacaactttagggtttacatttaatcctgaagtgttacctcctttcatgtctatttacactattttcccatttactaagtggggagggggtctccttatatagtgcttcatcgttaataagtcaatacctgttgttcctgggatgttcttttttgtgcattaaaaacttcaaaatt

SEQ ID NO: 178515 - DNA, 2748 bp, Homo sapiens
  Payload ID: 15184
  Gene Symbol: RSPO2
  Gene Name: R-spondin 2
  Uniprot ID: Q6UXX9
  ENST ID: ENST00000517781
  CDS Start-End: 450-989
gcgcacggtaggcaacccacaccaaggcagccgcagctgcggcgcttgggtacaccgccgtggactccaaatggcctaagagcgttcttttagccctgcgctctcagtgcctttagagttctttcctttccccggagcgccggcacaacgcattatgccgctgggtcggagcttagggctcggcagaggttgctaattcactgattataatcaccttcctctccaactcgtccgcagctgcccgctctggattaagccgctccgcggctcgtgctaggcagttcgtggcggagagatgctgatcgcgctgaactgaccggtgcggcccgggggtgagtggcgagtctccctctgagtcctccccagcagcgcggccggcgccggctctttgggcgaaccctccagttcctagactttgagaggcgtctctcccccgcccgaccgcccagatgcagtttcgccttttctcctttgccctcatcattctgaactgcatggattacagccactgccaaggcaaccgatggagacgcagtaagcgaggatgcagaatagaaaactgtgattcttgctttagcaaagacttttgtaccaagtgcaaagtaggcttttatttgcatagaggccgttgctttgatgaatgtccagatggttttgcaccattagaagaaaccatggaatgtgtgggatgtgaagttggtcattggagcgaatggggaacttgtagcagaaataatcgcacatgtggatttaaatggggtctggaaaccagaacacggcaaattgttaaaaagccagtgaaagacacaatactgtgtccaaccattgctgaatccaggagatgcaagatgacaatgaggcattgtccaggagggaagagaacaccaaaggcgaaggagaagaggaacaagaaaaagaaaaggaagctgatagaaagggcccaggagcaacacagcgtcttcctagctacagacagagctaaccaataaaacaagagatccggtagatttttaggggtttttgtttttgcaaatgtgcacaaagctactctccactcctgcacactggtgtgcagcctttgtgctgctctgcccagtatctgttcccagtaacatggtgaaaggaagcaccaccagcatggcccctgtgttatttatgctttgatttgaatctggagactgtgaaggcaggagtaagtgcacagcccgtgacttggctcagtgtgtgctgagagaatccgtccccggcaccatggacatgctagaggtgtgaggctgcagaacaccgctggaggacggacttgtgcctatttatgtgaaagaagatgcttggcaggcaatgcgctactcactcgtgacctttatttctcacattgtgcattttcaaggatatgtttgtgtggatatctgcttagtgttaccacatggtattctcagcatgttaccttcacactgttgtgcgatgaaactgcttttagctgaggatatgctctggaaattcctgctcagtttcactgcagccctaatatgtacatatactgcaggagctacatataaagctcttatttactgtatatttatgctttcttgtgggtaacaagtcatacctgattaatatgatgccactttgtttctagtggttcctaacccattgtctgataaatgacttttctagtttggggaattgacacttgttttgttgcctcttgaaactttttttttttcccctcattgtgggcttatttctcattgtaagggtaggataaactagtttttgtatatagagtcaaatgaccagtgtcaaagagtttgcatattgggtagaccttctccactccacatgtcccacacatatagataaagcagcaggcggcatctggcaatcagaagcccaaactgcctttgagtctaagatgtgatgactttgatgaaacacaactgaaaacatgagggactatatccagtcacttgtagccagtttcacaggccagctacagaattgtccaaacaaacattatttctgactgcaatttttttcccccaaatttaaagcaatccctggctttaaatgacaaggcacctaccaatgttcttgggtcactgaagaagctactaccatgagcctgggcatagaattttaggagataaaaggatgaatttctgtgactgccagtcagatcttaacaggtttctgttgagccagaatctgtttcagatccaagatggagaggaacactatggaaacttcccaggtgactttcagagcagttgtttcaaacacatcattgtccttttaggggaaccagtttttagaaggttgtgaattggctttttcacaaagcatgattatcttcctggctgatccaggagaaaattagaacagaaaaataatggttgtggattttgaaacaaagcaaggtaaagccttttttttttcaccttgcattggcaaaactacctcttcagtgtttttaacttttgattcaaaagcatcttaccaataaggataaatatcatatacatcgttatgaaaatattgctatgagataataagccacatatgaatgttgtatacaactttagggtttacatttaatcctgaagtgttacctcctttcatgtctatttacactattttcccatttactaagtggggagggggtctccttatatagtgcttcatcgttaataagtcaatacctgttgttcctgggatgttcttttttgtgcattaaaaacttcaaaatta

SEQ ID NO: 178516 - DNA, 674 bp, Homo sapiens
  Payload ID: 15184
  Gene Symbol: RSPO2
  Gene Name: R-spondin 2
  ENST ID: ENST00000521502
  CDS Start-End: 171-674
acctcactgttttagtatctgtgagacacagatgtgaaagctacagatttaattaacatgcagctagttatgtatcaaatcccatttgcaagggttgtttgtcttgttcaaaggacaatgggtgtagccgatgtcaacagaagttgttcttcttccttcgaagagaagggatgcgccagtatggagagtgcctgcattcctgcccatccgggtactatggacaccgagccccagatatgaacagatgtgcaagatgcagaatagaaaactgtgattcttgctttagcaaagacttttgtaccaagtgcaaagtaggcttttatttgcatagaggccgttgctttgatgaatgtccagatggttttgcaccattagaagaaaccatggaatgtgtggaaggatgtgaagttggtcattggagcgaatggggaacttgtagcagaaataatcgcacatgtggatttaaatggggtctggaaaccagaacacggcaaattgttaaaaagccagtgaaagacacaatactgtgtccaaccattgctgaatccaggagatgcaagatgacaatgaggcattgtccaggagggaagagaacaccaaaggcgaaggagaagaggaacaagaaaaagaaaaggaagctgatagaaagggcccaggagcaacacagcgtcttc

SEQ ID NO: 178517 - DNA, 2487 bp, Homo sapiens
  Payload ID: 15184
  Gene Symbol: RSPO2
  Gene Name: R-spondin 2
  Uniprot ID: Q6UXX9
  ENST ID: ENST00000517939
  CDS Start-End: 198-728
cttttttctggaaactgcgacgagatgggaactttctgaattaagcagcaattcccgcgctggttttctggggagtcctcgcctccagagctagttatgtatcaaatcccatttgcaagggttgtttgtcttgttcaaaggacaatgggtgtagccgatgtcaacagaagttgttcttcttccttcgaagagaagggatgcgccagtatggagagtgcctgcattcctgcccatccgggtactatggacaccgagccccagatatgaacagatgtgcaagatgcagaatagaaaactgtgattcttgctttagcaaagacttttgtaccaagtgcaaagtaggcttttatttgcatagaggccgttgctttgatgaatgtccagatggttttgcaccattagaagaaaccatggaatgtgtggaaggatgtgaagttggtcattggagcgaatggggaacttgtagcagaaataatcgcacatgtggatttaaatggggtctggaaaccagaacacggcaaattgttaaaaagccagtgaaagacacaatactgtgtccaaccattgctgaatccaggagatgcaagatgacaatgaggcattgtccaggagggaagagaacaccaaaggcgaaggagaagaggaacaagaaaaagaaaaggaagctgatagaaagggcccaggagcaacacagcgtcttcctagctacagacagagctaaccaataaaacaagagatccggtagatttttaggggtttttgtttttgcaaatgtgcacaaagctactctccactcctgcacactggtgtgcagcctttgtgctgctctgcccagtatctgttcccagtaacatggtgaaaggaagcaccaccagcatggcccctgtgttatttatgctttgatttgaatctggagactgtgaaggcaggagtaagtgcacagcccgtgacttggctcagtgtgtgctgagagaatccgtccccggcaccatggacatgctagaggtgtgaggctgcagaacaccgctggaggacggacttgtgcctatttatgtgaaagaagatgcttggcaggcaatgcgctactcactcgtgacctttatttctcacattgtgcattttcaaggatatgtttgtgtggatatctgcttagtgttaccacatggtattctcagcatgttaccttcacactgttgtgcgatgaaactgcttttagctgaggatatgctctggaaattcctgctcagtttcactgcagccctaatatgtacatatactgcaggagctacatataaagctcttatttactgtatatttatgctttcttgtgggtaacaagtcatacctgattaatatgatgccactttgtttctagtggttcctaacccattgtctgataaatgacttttctagtttggggaattgacacttgttttgttgcctcttgaaactttttttttttcccctcattgtgggcttatttctcattgtaagggtaggataaactagtttttgtatatagagtcaaatgaccagtgtcaaagagtttgcatattgggtagaccttctccactccacatgtcccacacatatagataaagcagcaggcggcatctggcaatcagaagcccaaactgcctttgagtctaagatgtgatgactttgatgaaacacaactgaaaacatgagggactatatccagtcacttgtagccagtttcacaggccagctacagaattgtccaaacaaacattatttctgactgcaatttttttcccccaaatttaaagcaatccctggctttaaatgacaaggcacctaccaatgttcttgggtcactgaagaagctactaccatgagcctgggcatagaattttaggagataaaaggatgaatttctgtgactgccagtcagatcttaacaggtttctgttgagccagaatctgtttcagatccaagatggagaggaacactatggaaacttcccaggtgactttcagagcagttgtttcaaacacatcattgtccttttaggggaaccagtttttagaaggttgtgaattggctttttcacaaagcatgattatcttcctggctgatccaggagaaaattagaacagaaaaataatggttgtggattttgaaacaaagcaaggtaaagccttttttttttcaccttgcattggcaaaactacctcttcagtgtttttaacttttgattcaaaagcatcttaccaataaggataaatatcatatacatcgttatgaaaatattgctatgagataataagccacatatgaatgttgtatacaactttagggtttacatttaatcctgaagtgttacctcctttcatgtctatttacactattttcccatttactaagtggggagggggtctccttatatagtgcttcatcgttaataagtcaatacctgttgttcctgggatgttcttttttgtgcattaaaaacttcaaaatta

SEQ ID NO: 178518 - DNA, 602 bp, Homo sapiens
  Payload ID: 15184
  Gene Symbol: RSPO2
  Gene Name: R-spondin 2
  ENST ID: ENST00000520026
  CDS Start-End: 334-602
attttttgcctgtgtttagacacagaggttggtgtagtgaccatgtggtagatggagaagttcttgtggaattactaagctattgatttacaacagggagaatgccactaaaatagtggacaatggtgaattaaatggaaaagtctgtttgaggtttggggcaagaagcttcaaattgtaaaaatcacatgggctcttgtccttcagcactgagcagcatcatgattgaagattggagaaagtggggagagagtactcaggttaggtgtggttcacatcacttttgctttaagggaattcctcgtgtgtagggttataaagataacctaagatatggacttggctagttatgtatcaaatcccatttgcaagggttgtttgtcttgttcaaaggacaatgggtgtagccgatgtcaacagaagttgttcttcttccttcgaagagaagggatgcgccagtatggagagtgcctgcattcctgcccatccgggtactatggacaccgagccccagatatgaacagatgtgcaagatgcagaatagaaaactgtgattcttgctttagcaaagacttttgtaccaagtgcaaagtaggctttta

SEQ ID NO: 178519 - DNA, 562 bp, Homo sapiens
  Payload ID: 15184
  Gene Symbol: RSPO2
  Gene Name: R-spondin 2
  ENST ID: ENST00000521956
  CDS Start-End: 199-562
acaccctgttttcgcttcttgtctctcaggttcgtggcggagagatgctgatcgcgctgaactgaccggtgcggcccgggggtgagtggcgagtctccctctgagtcctccccagcagcgcggccggcgccggctctttgggcgaaccctccagttcctagactttgagaggcgtctctcccccgcccgaccgcccagatgcagtttcgccttttctcctttgccctcatcattctgaactgcatggattacagccactgccaaggcaaccgatggagacgcagtaagcgagctagttatgtatcaaatcccatttgcaagggttgtttgtcttgttcaaaggacaatgggtgtagccgatgtcaacagaagttgttcttcttccttcgaagagaagggatgcgccagtatggagagtgcctgcattcctgcccatccgggtactatggacaccgagccccagatatgaacagatgtgcaagatgcagaatagaaaactgtgattcttgctttagcaaagacttttgtaccaagtgcaaagtaggcttttatttgcatagag

SEQ ID NO: 178520 - DNA, 579 bp, Homo sapiens
  Payload ID: 15184
  Gene Symbol: RSPO2
  Gene Name: R-spondin 2
  ENST ID: ENST00000521757
  CDS Start-End: 313-579
atttcttggcctgggttgaggaccttgccctaagttctacctctgtctggtctgacatccccatgagccattcagctttagcttctggcctcaactctgcctctgagtttcctctttgtttctaagtttggttgtgtattaacaactttttgggtggaggaggtagagggaagaaggggagggatattttatttagtatttctatctagttatgtatcaaatcccatttgcaagggttgtttgtcttgttcaaaggacaatgggtgtagccgatgtcaacagaagttgttcttcttccttcgaagagaagggatgcgccagtatggagagtgcctgcattcctgcccatccgggtactatggacaccgagccccagatatgaacagatgtgcaagatgcagaatagaaaactgtgattcttgctttagcaaagacttttgtaccaagtgcaaagtaggcttttatttgcatagaggccgttgctttgatgaatgtccagatggttttgcaccattagaagaaaccatggaatgtgtggaaggatgtgaagttggtcattggagcgaatggggaacttgt

SEQ ID NO: 178521 - DNA, 568 bp, Homo sapiens
  Payload ID: 15184
  Gene Symbol: RSPO2
  Gene Name: R-spondin 2
  ENST ID: ENST00000522333
  CDS Start-End: 339-568
agaagcatcccaagcctcagccggtctgcatctccatcggaaagtgcgcttgccacatcccttcggatcacttcgtcctcccgagagcgttctgccttctacagctcggaaagaaagaaatcttagctgtgaagtgaccgtggagaaagcgcaggaagcgacacaattggttcgtggcggagagatgctgatcgcgctgaactgaccggtgcggcccgggggtgagtggcgagtctccctctgagtcctccccagcagcgcggccggcgccggctctttgggcgaaccctccagttcctagactttgagaggcgtctctcccccgcccgaccgcccagatgcagtttcgccttttctcctttgccctcatcattctgaactgcatggattacagccactgccaaggcaaccgatggagacgcagtaagcgagctagttatgtatcaaatcccatttgcaagggttgtttgtcttgttcaaaggacaatgggtgtagccgatgtcaacagaagttgttcttcttccttcgaagagaagggatgcgccagtatggagagtgcctgcattc

SEQ ID NO: 178522 - DNA, 2697 bp, Homo sapiens
  Payload ID: 15185
  Gene Symbol: RSPO3
  Gene Name: R-spondin 3
  Uniprot ID: Q9BXY4
  ENST ID: ENST00000356698
  CDS Start-End: 590-1408
tccctcccccctccctgccctcctcctcctcctcccctatgtggtgctcccgggagcccagcccaacactggagcgtctcctgctcgcgcacgccagaagcagctcggggtctctccgccgccccttggccatggccgctgtgccgacggcgcccgctcccctgcgctccaggggcccccgccgctgcagccgcagccgccgcagcttctgagcccaaggggccgccgctgcagccgccgccgccgccgctcgcccgcccggatcccgcctgcggcagttgccgcacaacatgctacctgcggccgccccggcggctcctggaaccccggttcgcggcgatgccagccaccccagcgaagccgccgcagttcagtgcttggataatttgaaagtacaatagttggtttccctgtccacccgccccacttcgcttgccatcacagcacgcctatcggatgtgagaggagaagtcccgctgctcgggcactgtctatatacgcctaacacctacatatattttaaaaacattaaatataattaacaatcaaaagaaagaggagaaaggaagggaagcattactgggttactatgcacttgcgactgatttcttggctttttatcattttgaactttatggaatacatcggcagccaaaacgcctcccggggaaggcgccagcgaagaatgcatcctaacgttagtcaaggctgccaaggaggctgtgcaacatgctcagattacaatggatgtttgtcatgtaagcccagactattttttgctctggaaagaattggcatgaagcagattggagtatgtctctcttcatgtccaagtggatattatggaactcgatatccagatataaataagtgtacaaaatgcaaagctgactgtgatacctgtttcaacaaaaatttctgcacaaaatgtaaaagtggattttacttacaccttggaaagtgccttgacaattgcccagaagggttggaagccaacaaccatactatggagtgtgtcagtattgtgcactgtgaggtcagtgaatggaatccttggagtccatgcacgaagaagggaaaaacatgtggcttcaaaagagggactgaaacacgggtccgagaaataatacagcatccttcagcaaagggtaacctgtgtcccccaacaaatgagacaagaaagtgtacagtgcaaaggaagaagtgtcagaagggagaacgaggaaaaaaaggaagggagaggaaaagaaaaaaacctaataaaggagaaagtaaagaagcaatacctgacagcaaaagtctggaatccagcaaagaaatcccagagcaacgagaaaacaaacagcagcagaagaagcgaaaagtccaagataaacagaaatcggtatcagtcagcactgtacactagagggttccatgagattattgtagactcatgatgctgctatctcaaccagatgcccaggacaggtgctctagccattaggaccacaaatggacatgtcagttattgctctgtctaaacaacattcccagtagttgctatattcttcatacaagcatagttaacaacaaagagccaaaagatcaaagaagggatactttcagatggttgtcttgtgtgcttctctgcatttttaaaagacaagacattcttgtacatattatcaataggctataagatgtaacaacgaaatgatgacatctggagaagaaacatcttttccttataaaaatgtgttttcaagctgttgttttaagaagcaaaagatagttctgcaaattcaaagatacagtatcccttcaaaacaaataggagttcagggaagagaaacatccttcaaaggacagtgttgttttgaccgggagatctagagagtgctcagaattagggcctggcatttggaatcacaggatttatcatcacagaaacaactgttttaagattagttccatcactctcatcctgtatttttataagaaacacaagagtgcataccagaattgaatataccatatgggattggagaaagacaaatgtggaagaaatcatagagctggagactacttttgtgctttacaaaactgtgaaggattgtggtcacctggaacaggtctccaatctatgttagcactatgtggctcagcctctgttaccccttggattatatatcaacctgtaaacatgtgcctgtaacttacttccaaaaacaaaatcatacttattagaagaaaattctgattttatagaaaaaaaatagagcaaggagaatataacatgtttgcaaagtcatgtgttttctttctcaatgagggaaaaacaattttattacctgcttaatggtccacctggaactaaaagggatactattttctaacaaggtatatctagtaggggagaaagccaccacaataaatatatttgttaatagtttttcaagttttgttcactctgttttattgtttgttttattgagaaattcttactcttagagactcatgaattaagaaagagaattctgctaactcagagaacctggttcctatgtaattcagaatatattacatttctcagtaatatttgttttttgaatccacctttatctgagccaatggagatttacttatagcgtattaggagatatttattccattttcttattttaatcaacattctaattatagacacatgggcct

SEQ ID NO: 178523 - DNA, 1290 bp, Homo sapiens
  Payload ID: 15185
  Gene Symbol: RSPO3
  Gene Name: R-spondin 3
  Uniprot ID: Q9BXY4
  ENST ID: ENST00000368317
  CDS Start-End: 156-1034
gccatcacagcacgcctatcggatgtgagaggagaagtcccgctgctcgggcactgtctatatacgcctaacacctacatatattttaaaaacattaaatataattaacaatcaaaagaaagaggagaaaggaagggaagcattactgggttactatgcacttgcgactgatttcttggctttttatcattttgaactttatggaatacatcggcagccaaaacgcctcccggggaaggcgccagcgaagaatgcatcctaacgttagtcaaggctgccaaggaggctgtgcaacatgctcagattacaatggatgtttgtcatgtaagcccagactattttttgctctggaaagaattggcatgaagcagattggagtatgtctctcttcatgtccaagtggatattatggaactcgatatccagatataaataagtgtacaaaatgcaaagctgactgtgatacctgtttcaacaaaaatttctgcacaaaatgtaaaagtggattttacttacaccttggaaagtgccttgacaattgcccagaagggttggaagccaacaaccatactatggagtgtgtcagtattgtgcactgtgaggtcagtgaatggaatccttggagtccatgcacgaagaagggaaaaacatgtggcttcaaaagagggactgaaacacgggtccgagaaataatacagcatccttcagcaaagggtaacctgtgtcccccaacaaatgagacaagaaagtgtacagtgcaaaggaagaagtgtcagaagggagaacgaggaaaaaaaggaagggagaggaaaagaaaaaaacctaataaaggagaaagtaaagaagcaatacctgacagcaaaagtctggaatccagcaaagaaatcccagagcaacgagaaaacaaacagcagcagaagaagcgaaaagtccaagataaacagaaatcggggattgaagtcaccctagctgaaggcctcaccagtgtttcacagaggacacagcccaccccttgcaggaggaggtatctctgagtgtgcagcacagaatcgcatgacccaccttaaccttcctgttgtcatggaaggatgcacggctgctctgtccactgtgattcctagccctctcaagatcactgctttctgaagaatttgcaatgactctggcttctggctgcttatctctggacacccgttctccaccagttgtacagttcatgtaatctacttggcttaattgattttccacttctctcttcctcttctaagatataaacattttaaatgattt

SEQ ID NO: 178524 - DNA, 2707 bp, Homo sapiens
  Payload ID: 15186
  Gene Symbol: RSPO4
  Gene Name: R-spondin 4
  Uniprot ID: Q2I0M5
  ENST ID: ENST00000217260
  CDS Start-End: 98-802
cacagcagcccccgcgcccgccgtgccgccgccgggacgtggggcccttgggccgtcgggccgcctggggagcgccagcccggatccggctgcccagatgcgggcgccactctgcctgctcctgctcgtcgcccacgccgtggacatgctcgccctgaaccgaaggaagaagcaagtgggcactggcctggggggcaactgcacaggctgtatcatctgctcagaggagaacggctgttccacctgccagcagaggctcttcctgttcatccgccgggaaggcatccgccagtacggcaagtgcctgcacgactgtccccctgggtacttcggcatccgcggccaggaggtcaacaggtgcaaaaaatgtggggccacttgtgagagctgcttcagccaggacttctgcatccggtgcaagaggcagttttacttgtacaaggggaagtgtctgcccacctgcccgccgggcactttggcccaccagaacacacgggagtgccagggggagtgtgaactgggtccctggggcggctggagcccctgcacacacaatggaaagacctgcggctcggcttggggcctggagagccgggtacgagaggctggccgggctgggcatgaggaggcagccacctgccaggtgctttctgagtcaaggaaatgtcccatccagaggccctgcccaggagagaggagccccggccagaagaagggcaggaaggaccggcgcccacgcaaggacaggaagctggaccgcaggctggacgtgaggccgcgccagcccggcctgcagccctgaccgccggctctcccgactctctggtcctagtcctcggcccctgcacacctcctcctgctccttctcctcctctcctcttactctttctcctctgtcttctccatttgtcctctctttctttccacccttctatcatttttctgtcagtctaccttccctttctttttcttttttatttcctttatttcttccacctccattctcctctcctttctccctccctccttcccttccttcctcttctttctcacttatcttttatctttccttttctttcttcctgtgtttcttcctgtccttcaccgcatccttctctctctccctcctcttgtctccctctcacacacactttaagagggaccatgagcctgtgccctcccctgcagctttctctatctacaacttaaagaaagcaaacatcttttcccaggcctttccctgaccccatctttgcagagaaagggtttccagagggcaaagctgggacacagcacaggtgaatcctgaaggccctgcttctgctctgggggaggctccaggaccctgagctgtgagcacctggttctctggacagtccccagaggccatttccacagccttcagccaccagccaccccgaggagctggctggacaaggctccagggcttccagaggcctggcttggacacctcccccagctggccgtggagggtcacaacctggcctctgggtgggcagccagccctggagggcatcctctgcaagctgcctgccaccctcatcggcactcccccacaggcctccctctcatgggttccatgcccctttttcccaagccggatcaggtgagctgtcactgctgggggatccacctgcccagcccagaagaggccactgaaacggaaaggaaagctgagattatccagcagctctgttccccacctcagcgcttcctgcccatgtggggaaacaggtctgagaaggaaggggcttgcccagggtcacacaggaagccttcaggctctgcttctgcctgatggctctgctcagcacattcacggtggagaggagaatttgggggtcacttgaggggggaaatgtagggaattgtgggtggggagcaagggaagatccgtgcactcgtccacacccaccaccacactcgctgacacccacccccacacgctgacacccacccccacacttgcccacacccatcaccgcactcgcccacacccaccaccacactgccccacacccaccaccacactcccccacacccaccaccacactcgcccacacccaccaccagtgacttgagcatctgtgcttcgctgtgacgcccctcgccctaggcaggaacgacgctgggaggagtctccaggtcagacccagcttggaagcaagtctgtcctcactgcctatccttctgccatcataacacccccttcctgctctgctccccggaatcctcagaaacgggatttgtatttgccgtgactggttggcctgaacacgtagggctccgtgactgggacaggaatgggcaggagaagcaagagtcggagctccaaggggcccaggggtggcctggggaaggaagatggtcagcaggctgggggagaggctctaggtgatgaaatattacattcccgaccccaagagagcacccaccctcagacctgccctccacctggcagctggggagccctggcctgaacccccccctcccagcaggcccaccctctctctgacttccctgctctcacctccccgagaacagctagagccccctcctccgcctggccaggccaccagcttctcttctgcaaacgtttgtgcctctgaaatgctccgttgttattgtttcaagaccctaacttttttttaaaactttcttaataaagggaaaagaaacttgtaaa

SEQ ID NO: 178525 - DNA, 722 bp, Homo sapiens
  Payload ID: 15186
  Gene Symbol: RSPO4
  Gene Name: R-spondin 4
  Uniprot ID: Q2I0M5
  ENST ID: ENST00000400634
  CDS Start-End: 101-619
gcccacagcagcccccgcgcccgccgtgccgccgccgggacgtggggcccttgggccgtcgggccgcctggggagcgccagcccggatccggctgcccagatgcgggcgccactctgcctgctcctgctcgtcgcccacgccgtggacatgctcgccctgaaccgaaggaagaagcaagtgggcactggcctggggggcaactgcacaggctgtatcatctgctcagaggagaacggctgttccacctgccagcagaggctcttcctgttcatccgccgggaaggcatccgccagtacggcaagtgcctgcacgactgtccccctgggtacttcggcatccgcggccaggaggtcaacaggtgcaaaaaatgtggggccacttgtgagagctgcttcagccaggacttctgcatccggtgcaagaggcagttttacttgtacaaggggaagtgtctgcccacctgcccgccgggcactttggcccaccagaacacacgggagtgccaggagaggagccccggccagaagaagggcaggaaggaccggcgcccacgcaaggacaggaagctggaccgcaggctggacgtgaggccgcgccagcccggcctgcagccctgaccgccggctctcccgactctctggtcctagtcctcggcccctgcacacctcctcctgctccttctcctcctctcctcttactctttctcctctgtcttctcca

SEQ ID NO: 178526 - DNA, 4824 bp, Homo sapiens
  Payload ID: 15187
  Gene Symbol: RTEL1-TNFRSF6B
  Gene Name: RTEL1-TNFRSF6B readthrough (NMD candidate)
  ENST ID: ENST00000492259
  CDS Start-End: 104-2461
caggagtgcccgagaccctaagatgttcggagtggttttttcgcacagacccgaatagcctgcccctcagccacgctctgtgcccttctgagaacaggctgatatgcccaagatagtcctgaatggtgtgaccgtagacttccctttccagccctacaaatgccaacaggagtacatgaccaaggtcctggaatgtctgcagcagaaggtgaatggcatcctggagagccctacgggtacagggaagacgctgtgcctgctgtgcaccacgctggcctggcgagaacacctccgagacggcatctctgcccgcaagattgccgagagggcgcaaggagagcttttcccggatcgggccttgtcatcctggggcaacgctgctgctgctgctggagaccccatagcttgctacacggacatcccaaagattatttacgcctccaggacccactcgcaactcacacaggtcatcaacgagcttcggaacacctcctaccggcctaaggtgtgtgtgctgggctcccgggagcagctgtgcatccatcctgaggtgaagaaacaagagagtaaccatctacagatccacttgtgccgtaagaaggtggcaagtcgctcctgtcatttctacaacaacgtagaagaaaaaagcctggagcaggagctggccagccccatcctggacattgaggacttggtcaagagcggaagcaagcacagggtgtgcccttactacctgtcccggaacctgaagcagcaagccgacatcatattcatgccgtacaattacttgttggatgccaagagccgcagagcacacaacattgacctgaaggggacagtcgtgatctttgacgaagctcacaacgtggagaagatgtgtgaagaatcggcatcctttgacctgactccccatgacctggcttcaggactggacgtcatagaccaggtgctggaggagcagaccaaggcagcgcagcagggtgagccccacccggagttcagcgcggactcccccagcccagggctgaacatggagctggaagacattgcaaagctgaagagtaagtgttgccctccccgcctccttgcagctgggtggggcctcctccttgcgaggaggtgggtgacacctcctcgacccacagtgatcctgctgcgcctggagggggccatcgatgctgttgagctgcctggagacgacagcggtgtcaccaagccagggagctacatctttgagctgtttgctgaagcccagatcacgtttcagaccaagggctgcatcctggactcgctggaccagatcatccagcacctggcaggacgtgctggagtgttcaccaacacggccggactgcagaagctggcggacattatccagattgtgttcagtgtggacccctccgagggcagccctggttccccagcagggctgggggccttacagtcctataaggtgcacatccatcctgatgctggtcaccggaggacggctcagcggtctgatgcctggagcaccactgcagccagaaagcgagggaaggtgctgagctactggtgcttcagtcccggccacagcatgcacgagctggtccgccagggcgtccgctccctcatccttaccagcggcacgctggccccggtgtcctcctttgctctggagatgcagatccctttcccagtctgcctggagaacccacacatcatcgacaagcaccagatctgggtgggggtcgtccccagaggccccgatggagcccagttgagctccgcgtttgacagacggttttccgaggagtgcttatcctccctggggaaggctctgggcaacatcgcccgcgtggtgccctatgggctcctgatcttcttcccttcctatcctgtcatggagaagagcctggagttctggcgggcccgcgacttggccaggaagatggaggcgctgaagccgctgtttgtggagcccaggagcaaaggcagcttctccgagaccatcagtgcttactatgcaagggttgccgcccctgggtccaccggcgccaccttcctggcggtctgccggggcaaggccagcgaggggctggacttctcagacacgaatggccgtggtgtgattgtcacgggcctcccgtaccccccacgcatggacccccgggttgtcctcaagatgcagttcctggatgagatgaagggccagggtggggctgggggccagttcctctctgggcaggagtggtaccggcagcaggcgtccagggctgtgaaccaggccatcgggcgagtgatccggcaccgccaggactacggagctgtcttcctctgtgaccacagatgccagcgccggccccccgggctacagcacccagtgtgcgtggagaagatgctgtcagcgaggccaagtcgcctggccccttcttctccaccaggaaagctaagagtctggacctgcatgtccccagcctgaagcagaggtcctcagggtcaccagctgccggggaccccgagagtagcctgtgtgtggagtatgagcaggagccagttcctgcccggcagaggcccagggggctgctggccgccctggagcacagcgaacagcgggcggggagccctggcgaggagcaggcccacagctgctccaccctgtccctcctgtctgagaagaggccggcagaagaaccgcgaggagggaggaagaagatccggctggtcagccacccggaggagcccgtggctggtgcacagacggacagggccaagctcttcatggtggccgtgaagcaggagttgagccaagccaactttgccaccttcacccaggccctgcaggactacaagggttccgatgacttcgccgccctggccgcctgtctcggccccctctttgctgaggaccccaagaagcacaacctgctccaaggcttctaccagtttgtgcggccccaccataagcagcagtttgaggaggtctgtatccagctgacaggacgaggctgtggctatcggcctgagcacagcattccccgaaggcagcgggcacagccggtcctggaccccactggaagaacggcgccggatcccaagctgaccgtgtccacggctgcagcccagcagctggacccccaagagcacctgaaccagggcaggccccacctgtcgcccaggccacccccaacaggagaccctggcagccaaccacagtgggggtctggagtgcccagagcagggaagcagggccagcacgccgtgagcgcctacctggctgatgcccgcagggccctggggtccgcgggctgtagccaactcttggcagcgctgacagcctataagcaagacgacgacctcgacaaggtgctggctgtgttggccgccctgaccactgcaaagccagaggacttccccctgctgcacaggttcagcatgtttgtgcgtccacaccacaagcagcgcttctcacagacgtgcacagacctgaccggccggccctacccgggcatggagccaccgggaccccaggaggagaggcttgccgtgcctcctgtgcttacccacagggctccccaaccaggcccctcacggtccgagaagaccgggaagacccagagcaagatctcgtccttccttagacagaggccagcagggactgtgggggcgggcggtgaggatgcaggtcccagccagtcctcaggacctccccacgggcctgcagcatctgagtggggcctctaggatgtgcccagcctgccacaccgcctccaggaagcagagcgtcatgcaggtcttctggccagagccccacaaggaccatgagggcgctggaggggccaggcctgtcgctgctgtgcctggtgttggcgctgcctgccctgctgccggtgccggctgtacgcggagtggcagaaacacccacctacccctggcgggacgcagagacaggggagcggctggtgtgcgcccagtgccccccaggcacctttgtgcagcggccgtgccgccgagacagccccacgacgtgtggcccgtgtccaccgcgccactacacgcagttctggaactacctagagcgctgccgctactgcaacgtcctctgcggggagcgtgaggaggaggcacgggcttgccacgccacccacaaccgtgcctgccgctgccgcaccggcttcttcgcgcacgctggtttctgcttggagcacgcatcgtgtccacctggtgccggcgtgattgccccgggcacccccagccagaacacgcagtgccagccgtgccccccaggcaccttctcagccagcagctccagctcagagcagtgccagccccaccgcaactgcacggccctgggcctggccctcaatgtgccaggctcttcctcccatgacaccctgtgcaccagctgcactggcttccccctcagcaccagggtaccaggagctgaggagtgtgagcgtgccgtcatcgactttgtggctttccaggacatctccatcaagaggctgcagcggctgctgcaggccctcgaggccccggagggctggggtccgacaccaagggcgggccgcgcggccttgcagctgaagctgcgtcggcggctcacggagctcctgggggcgcaggacggggcgctgctggtgcggctgctgcaggcgctgcgcgtggccaggatgcccgggctggagcggagcgtccgtgagcgcttcctccctgtgcactgatcctggccccctcttatttattctacatccttggcaccccacttgcactgaaagaggcttttttttaaatagaagaaatgaggtttcttaaagcttatttttataaagctttttcataaaa

SEQ ID NO: 178527 - DNA, 4931 bp, Homo sapiens
  Payload ID: 15187
  Gene Symbol: RTEL1-TNFRSF6B
  Gene Name: RTEL1-TNFRSF6B readthrough (NMD candidate)
  ENST ID: ENST00000482936
  CDS Start-End: 1-4203
atgcccaagatagtcctgaatggtgtgaccgtagacttccctttccagccctacaaatgccaacaggagtacatgaccaaggtcctggaatgtctgcagcagaaggtgaatggcatcctggagagccctacgggtacagggaagacgctgtgcctgctgtgcaccacgctggcctggcgagaacacctccgagacggcatctctgcccgcaagattgccgagagggcgcaaggagagcttttcccggatcgggccttgtcatcctggggcaacgctgctgctgctgctggagaccccatagcttgctacacggacatcccaaagattatttacgcctccaggacccactcgcaactcacacaggtcatcaacgagcttcggaacacctcctaccggcctaaggtgtgtgtgctgggctcccgggagcagctgtgcatccatcctgaggtgaagaaacaagagagtaaccatctacagatccacttgtgccgtaagaaggtggcaagtcgctcctgtcatttctacaacaacgtagaagaaaaaagcctggagcaggagctggccagccccatcctggacattgaggacttggtcaagagcggaagcaagcacagggtgtgcccttactacctgtcccggaacctgaagcagcaagccgacatcatattcatgccgtacaattacttgttggatgccaagagccgcagagcacacaacattgacctgaaggggacagtcgtgatctttgacgaagctcacaacgtggagaagatgtgtgaagaatcggcatcctttgacctgactccccatgacctggcttcaggactggacgtcatagaccaggtgctggaggagcagaccaaggcagcgcagcagggtgagccccacccggagttcagcgcggactcccccagcccagggctgaacatggagctggaagacattgcaaagctgaagatgatcctgctgcgcctggagggggccatcgatgctgttgagctgcctggagacgacagcggtgtcaccaagccagggagctacatctttgagctgtttgctgaagcccagatcacgtttcagaccaagggctgcatcctggactcgctggaccagatcatccagcacctggcaggacgtgctggagtgttcaccaacacggccggactgcagaagctggcggacattatccagattgtgttcagtgtggacccctccgagggcagccctggttccccagcagggctgggggccttacagtcctataaggtgcacatccatcctgatgctggtcaccggaggacggctcagcggtctgatgcctggagcaccactgcagccagaaagcgagggaaggtgctgagctactggtgcttcagtcccggccacagcatgcacgagctggtccgccagggcgtccgctccctcatccttaccagcggcacgctggccccggtgtcctcctttgctctggagatgcagatccctttcccagtctgcctggagaacccacacatcatcgacaagcaccagatctgggtgggggtcgtccccagaggccccgatggagcccagttgagctccgcgtttgacagacggttttccgaggagtgcttatcctccctggggaaggctctgggcaacatcgcccgcgtggtgccctatgggctcctgatcttcttcccttcctatcctgtcatggagaagagcctggagttctggcgggcccgcgacttggccaggaagatggaggcgctgaagccgctgtttgtggagcccaggagcaaaggcagcttctccgagaccatcagtgcttactatgcaagggttgccgcccctgggtccaccggcgccaccttcctggcggtctgccggggcaaggccagcgaggggctggacttctcagacacgaatggccgtggtgtgattgtcacgggcctcccgtaccccccacgcatggacccccgggttgtcctcaagatgcagttcctggatgagatgaagggccagggtggggctgggggccagttcctctctgggcaggagtggtaccggcagcaggcgtccagggctgtgaaccaggccatcgggcgagtgatccggcaccgccaggactacggagctgtcttcctctgtgaccacaggttcgcctttgccgacgcaagagcccaactgccctcctgggtgcgtccccacgtcagggtgtatgacaactttggccatgtcatccgagacgtggcccagttcttccgtgttgccgagcgaactatgccagcgccggccccccgggctacagcacccagtgtgcgtggagaagatgctgtcagcgaggccaagtcgcctggccccttcttctccaccaggaaagctaagagtctggacctgcatgtccccagcctgaagcagaggtcctcagggtcaccagctgccggggaccccgagagtagcctgtgtgtggagtatgagcaggagccagttcctgcccggcagaggcccagggggctgctggccgccctggagcacagcgaacagcgggcggggagccctggcgaggagcaggcccacagctgctccaccctgtccctcctgtctgagaagaggccggcagaagaaccgcgaggagggaggaagaagatccggctggtcagccacccggaggagcccgtggctggtgcacagacggacagggccaagctcttcatggtggccgtgaagcaggagttgagccaagccaactttgccaccttcacccaggccctgcaggactacaagggttccgatgacttcgccgccctggccgcctgtctcggccccctctttgctgaggaccccaagaagcacaacctgctccaaggcttctaccagtttgtgcggccccaccataagcagcagtttgaggaggtctgtatccagctgacaggacgaggctgtggctatcggcctgagcacagcattccccgaaggcagcgggcacagccggtcctggaccccactggaagaacggcgccggatcccaagctgaccgtgtccacggctgcagcccagcagctggacccccaagagcacctgaaccagggcaggccccacctgtcgcccaggccacccccaacaggagaccctggcagccaaccacagtgggggtctggagtgcccagagcagggaagcagggccagcacgccgtgagcgcctacctggctgatgcccgcagggccctggggtccgcgggctgtagccaactcttggcagcgctgacagcctataagcaagacgacgacctcgacaaggtgctggctgtgttggccgccctgaccactgcaaagccagaggacttccccctgctgcacaggttcagcatgtttgtgcgtccacaccacaagcagcgcttctcacagacgtgcacagacctgaccggccggccctacccgggcatggagccaccgggaccccaggaggagaggcttgccgtgcctcctgtgcttacccacagggctccccaaccaggcccctcacggtccgagaagaccgggaagacccagagcaagatctcgtccttccttagacagaggccagcagggactgtgggggcgggcggtgaggatgcaggtcccagccagtcctcaggacctccccacgggcctgcagcatctgagtggggtgagcctcatgggagagacatcgctgggcagcaggccacgggagctccgggcgggcccctctcagcaggctgtgtgtgccagggctgtggggcagaggacgtggtgcccttccagtgccctgcctgtgacttccagcgctgccaagcctgctggcaacggcaccttcaggcctctaggatgtgcccagcctgccacaccgcctccaggaagcagagcgtcatgcaggtcttctggccagagccccacaaggaccatgagggcgctggaggggccaggcctgtcgctgctgtgcctggtgttggcgctgcctgccctgctgccggtgccggctgtacgcggagtggcagaaacacccacctacccctggcgggacgcagagacaggggagcggctggtgtgcgcccagtgccccccaggcacctttgtgcagcggccgtgccgccgagacagccccacgacgtgtggcccgtgtccaccgcgccactacacgcagttctggaactacctagagcgctgccgctactgcaacgtcctctgcggggagcgtgaggaggaggcacgggcttgccacgccacccacaaccgtgcctgccgctgccgcaccggcttcttcgcgcacgctggtttctgcttggagcacgcatcgtgtccacctggtgccggcgtgattgccccgggcacccccagccagaacacgcagtgccagccgtgccccccaggcaccttctcagccagcagctccagctcagagcagtgccagccccaccgcaactgcacggccctgggcctggccctcaatgtgccaggctcttcctcccatgacaccctgtgcaccagctgcactggcttccccctcagcaccagggtaccaggagctgaggagtgtgagcgtgccgtcatcgactttgtggctttccaggacatctccatcaagaggctgcagcggctgctgcaggccctcgaggccccggagggctggggtccgacaccaagggcgggccgcgcggccttgcagctgaagctgcgtcggcggctcacggagctcctgggggcgcaggacggggcgctgctggtgcggctgctgcaggcgctgcgcgtggccaggatgcccgggctggagcggagcgtccgtgagcgcttcctccctgtgcactgatcctggccccctcttatttattctacatccttggcaccccacttgcactgaaagaggcttttttttaaatagaagaaatgaggtttcttaaagcttatttttataaagctttttcataaaa

SEQ ID NO: 178528 - DNA, 5021 bp, Homo sapiens
  Payload ID: 15188
  Gene Symbol: RTF1
  Gene Name: RTF1 homolog, Paf1/RNA polymerase II complex component
  Uniprot ID: Q92541
  ENST ID: ENST00000389629
  CDS Start-End: 13-2145
agcggagcgcgcatgcgcggtcgcctttgtgtgggtcgagcagcggcggcggcggcggcagtggcggtcccactggcaggcgggcaagaggggagtccgggcggcggccggcgtgggagccgggggaccaccatggtaaagaagcggaaaggccgcgtcgtgatcgactcggacacagaggacagcggcagcgacgagaacctggatcaggagctcttgtccctggcaaagcgaaagcgcagtgactctgaggagaaggagccgcctgtgagtcagcctgcagcctcgtcagactcggagacgtctgacagtgacgatgagtggacatttgggagcaataaaaataagaagaaaggaaaagccagaaaaatagagaagaaaggaaccatgaagaaacaggccaacaaaactgcctcctcaggcagttcagacaaagacagttcagctgagagctcagcccctgaggaaggtgaagtgtcagactctgacagcaacagctcctcttccagttcagattcagactcttcctcagaagatgaagagttccatgatggctatggagaagacctcatgggagatgaggaagacagggcccgtctggaacagatgacagagaaagagagagagcaagaactgttcaatcgcatagagaagagggaggtgttgaaaagaagatttgaaatcaagaaaaaactaaaaacagccaaaaagaaagaaaagaaagaaaagaagaaaaagcaagaagaggagcaagaaaagaaaaaactgacacagattcaagaatctcaggtaacatcccacaacaaggaacggcgttccaagcgggatgagaaactagacaagaaatctcaagccatggaggagctaaaagcagagcgagaaaaacgaaagaacagaacagctgagctccttgccaaaaaacagccattaaaaaccagtgaggtctactctgatgatgaagaggaggaagaggatgacaaatccagtgaaaagtcagaccgctcatcacgaacatcatcgtctgatgaagaagaggagaaagaagagatccctcccaaatcccaaccagtttccttacctgaagaattgaatcgggttcgattatcacggcataagctagaacgctggtgtcacatgcccttctttgctaaaactgtcacaggatgttttgtgcggattggcatcggaaaccacaacagcaaaccagtttaccgggtcgctgagattacgggtgttgtggaaactgccaaagtttaccaactaggtggcaccagaacaaacaaagggctgcaactacggcatggcaatgaccaacgcgtgttccgtttagagtttgtctcaaaccaagaattcaccgaaagtgagtttatgaagtggaaagaagcgatgttctctgctggcatgcagttgcccactctagatgaaatcaataaaaaggaattatctattaaagaagctcttaattataaattcaatgatcaggacattgaagagattgtaaaagagaaagaaaggttcagaaaagctccacccaactacgctatgaagaagactcagctactgaaggaaaaggccatggctgaggacctgggggatcaggacaaggccaaacaaatccaagatcaactgaatgagctggaggaacgggcagaggccctggaccgccagcggaccaagaacatatccgctatcagttacatcaaccagcggaaccgggagtggaacattgtagagtctgagaaggcccttgtggctgaaagtcacaacatgaaaaaccaacagatggatccctttactcggcggcagtgcaagcctaccatcgtttctaattccagagacccagctgttcaagctgccatcttggcccagctgaatgcaaaatacggttctggagtgttaccagatgctccaaaggaaatgagcaagggtcaaggcaaagataaagatttgaattctaagtcagccagtgacctctcagaagatctgttcaaagtacacgattttgatgtgaagattgacttacaagttcccagctcagagtcaaaggctttagccatcacctccaaggctccgccagccaaggatggggctccaaggagatctctgaacttggaagactacaaaaaacgacgagggcttatttgagcacacccagcctgctgcttctgaccctgcatgccccatcgcagcgtcccacctttcctcctttcctttgatttagcctctttgggctggagcagctgttgaactgggaagagactctaaactgccagtcatctgtaatataaaccatttgctgtatagacctcctttgtctgcacaccatctcccaccagcctcccctcccccagggccccacccagtgtgggcctgggctctcttgggctttatccatgtctttagatttgtgtttgccttttgtttttttaaccgcgcagttcattggccactctgcacgcattcagtattaccatggagctgggaatcttgctggagcccctggggcaatagcagcagcaccaggcggtctcctctacagactgccttggcccacccattgaacattcggcacgtgaccttgtggggggagcggggattgggcacctgcgatcctctttcctctcttcatctttctcttctgcccttctttttggaagaaggggtttcaaaaccagtttagtttccaaaaagtgtacatttgtggggggggggggtctaatttgagagcgagagtgtgtatgtgtgtgtgtgtaagtgtgtggatttttttatcatttttttaaaatgcagtactctttgtatcagtctgtcatgggtctatagctgtttcagatttttttcagctgtacttgagcatctgaaactgcaagaaagaaactcattaaatgtgattcttcttactaaacaggcctgactgctgtagctgtgtaacttccccattcccacctactcttcccatcctttcccaactttggagaaaactccccagtttagccccctgacctgcaggctgtgtcctggcaggtgtgggagggaagcccatggccaggtaccagggagggcagtgaatgtcttgctcttcccatgggtacagcccacagcttcttggctgaacgtagaacttctttttctcacccagtataccagcctcttcctggtgattctgttttgctgctttggcaagaactacattttgtttttaagagaaatttctgaatatgaatgtggagagcaaacacaaaaagatttaggttacgccgggtgcagtagctcacgcctgtaatcccagcactttgggaggcctaggcgggtggatcacctgaggtcaggagttcaagaccaatctgactaacacggtgaaaccccatctctactaaaactacaaaacttagccgggcatggtggtgcgtgcctgtaatcccagctactcggggggctgagacaggagaatcccttgaacctgggaggcggaggttgtggtgagccaagatcgtgccactgcactccagtctgggtgacagagtgagactccgcctcaaaaagatttaggttgcaaatgtttcaagcatgtgcagttttgtgtgtgtgtatacatatatatggtcagcatatatattgtgcagctagggcgaagccagcagaggtgtgtgtatgtctttatgaaatgtttgaaaagagataaactgactgcttgataatcactctcaggtgtaaagctccaagtgtaaataaaagtggcatttaacaaatctttcagaacaaagtacagctgactatatataccaagagctaagctaaaggaacagctgagagctccgatctccacgagagactaatctaaaagctctgctttgtacttcctcaccctgctttcgtacaaggaagggggacgatgggaaatcatggacttgtaagttgtatttaaacataaaaatgaacttggtaacttctgggtttagtagagcctcagtgtcgctttaacttagtttactttttttttatttttaaagcagcaatggatggttttaaaggagtattatgattgtaaaattgctaaatatgactgtaacacagctttgtggtagctgtgacacagttcacttgggcaaaggagtggtgatggactcgttaaaatcatatatacttgaatagtccattgaccgaaactctttatagactattgtgtaaatgtggaatcacagactgttaacattgcctggacttcagcagagtcctggagctgctgggacctctcctatcatgatgaacttggacttttttttttgatttctggttttaaaaaacataaaattatagaatccagataattcgctggagtcattctgatccaccatgtagatctgtatttagtatcatttggatttggagaagtgttgattacattatggctgtgtaataaaatttttattaaaactgcatcacactgtagccactttgccaccacctccccacatgtagccgctgaaacccccacgagatgccaatgcacacagcagggagaaaagccaaccaaagaagaccgaagggtatctttccacccgagtagcctctgtagtgattgggaccaagactaaggacttgtctccaatctcagctgaggcagtgcctctgaaccaagatcttggtcaggcattaagacactggctttgtcctaccaactaggatttcttggtggttcacactatttcttgtgctggggaattccctcattgggcccctcctccctccacagtgtggtttcagtgttgaagggtgcagcacccaaggttgtttttatgcattttttcagttccttccaagaagcaaaaaggccagtgtccatctgcctagttcataatgtttataggtctgtttgtctgtcttgcttctggcaggtgtagggaaagtctactgcctgccactcccttcaaaaagaatgtttttgcttttgtgaagtcctgacttgccactcaaactgtaccaatattgtaaataaatgttatgccattttaacaaaggga

SEQ ID NO: 178529 - DNA, 551 bp, Homo sapiens
  Payload ID: 15188
  Gene Symbol: RTF1
  Gene Name: RTF1 homolog, Paf1/RNA polymerase II complex component
  ENST ID: ENST00000560447
  CDS Start-End: 1-515
gtggcaccagaacaaacaaagggctgcaactacggcatggcaatgaccaacgcgtgttccgtttagagtttgtctcaaaccaagaattcaccgaaagtgagtttatgaagtggaaagaagcgatgttctctgctggcatgcagttgcccactctagatgaaatcaataaaaaggaattatctattaaagaagctcttaattataaattcaatgatcaggacattgaagagattgtaaaagagaaagaaaggttcagaaaagctccacccaactacgctatgaagaagactcagctactgaaggaaaaggccatggctgaggacctgggggatcaggacaaggccaaacaaatccaagatcaactgaatgagctggaggaacgggcagaggccctggaccgccagcggaccaagaacatatccgctatcagttacatcaaccagcggaaccgggagtggaacattgtagagtctgagaaggcccttgtggtaagaaaactttatctgaatcactaaaacaaagttaattaataaaccatgacatcttttcta

SEQ ID NO: 178530 - DNA, 2646 bp, Homo sapiens
  Payload ID: 15189
  Gene Symbol: RUFY1
  Gene Name: RUN and FYVE domain containing 1
  Uniprot ID: Q96T51
  ENST ID: ENST00000319449
  CDS Start-End: 13-2139
gacacggccaagatggccgaccgggaaggcggctgcgctgctgggcgggggcgggagctggagccggagctggagccggggccggggcccgggtcagcgcttgagccgggagaagagtttgagatcgtggaccgaagccagctgcccggcccaggcgacctgcggagcgcaacgaggccgcgggcggccgagggctggtcggcgcccatcctgaccctggcacgcagggccaccgggaacctgtcggcgagctgcgggagcgcgctgcgcgcggccgcggggctgggcggcggggacagcggggacggcacggcgcgcgcagcttctaagtgccagatgatggaggagcgtgccaacctgatgcacatgatgaaactcagcatcaaggtgttgctccagtcggctctgagcctgggccgcagcctggatgcggaccatgcccccttgcagcagttctttgtagtgatggagcactgcctcaaacatgggctgaaagttaagaagagttttattggccaaaataaatcattctttggtcctttggagctggtggagaaactttgtccagaagcatcagatatagcgactagtgtcagaaatcttccagaattaaagacagctgtgggaagaggccgagcgtggctttatcttgcactcatgcaaaagaaactggcagattatctgaaagtgcttatagacaataaacatctcttaagcgagttctatgagcctgaggctttaatgatggaggaagaagggatggtgattgttggtctgctggtgggactcaatgttctcgatgccaatctctgcttgaaaggagaagacttggattctcaggttggagtaatagatttttccctctaccttaaggatgtgcaggatcttgatggtggcaaggagcatgaaagaattactgatgtccttgatcaaaaaaattatgtggaagaacttaaccggcacttgagctgcacagttggggatcttcaaaccaagatagatggcttggaaaagactaactcaaagcttcaagaagagctttcagctgcaacagaccgaatttgctcacttcaagaagaacagcagcagttaagagaacaaaatgaattaattcgagaaagaagtgaaaagagtgtagagataacaaaacaggataccaaagttgagctggagacttacaagcaaactcggcaaggtctggatgaaatgtacagtgatgtgtggaagcagctaaaagaggagaagaaagtccggttggaactggaaaaagaactggagttacaaattggaatgaaaaccgaaatggaaattgcaatgaagttactggaaaaggacacccacgagaagcaggacacactagttgccctccgccagcagctggaagaagtcaaagcgattaatttacagatgtttcacaaagctcagaatgcagagagcagtttgcagcagaagaatgaagccatcacatcctttgaaggaaaaaccaaccaagttatgtccagcatgaaacaaatggaagaaaggttgcagcactcggagcgggcgaggcagggggctgaggagcggagccacaagctgcagcaggagctgggcgggaggatcggcgccctgcagctgcagctctcccagctgcacgagcaatgctcaagcctggagaaagaattgaaatcagaaaaagagcaaagacaggctcttcagcgcgaattacagcacgagaaagacacttcctctctactcaggatggagctgcaacaagtggaaggactgaaaaaggagttgcgggagcttcaggacgagaaggcagagctgcagaagatctgcgaggagcaggaacaagccctccaggaaatgggcctgcacctcagccagtccaagctgaagatggaagatataaaagaagtgaaccaggcactgaagggccacgcctggctgaaagatgacgaagcgacacactgtaggcagtgtgagaaggagttctccatttcccggagaaagcaccactgccggaactgtggccacatcttctgcaacacctgctccagcaacgagctggccctgccctcctaccccaagccggtgcgagtgtgcgacagctgccacaccctgctcctgcagcgctgctcctccacggcctcctgaacgtccgtcctcaggagcacagcctcacggacagtgccaaaccctgtgggtctccaggggcttgggaaatgtgttctttcccaagagtatcaaaggaaagaatcaaatttcttgcccggtcactggcactccagaagacagcgtgccggaaccggcagctctcacctttctgtgacttgttcggaattaactcctctggatggaaacttccatcttacttggttacatcacggctctggttcagatacaacttcatgattttgctactatcatttttcacttttcaaagaatttaacctattttacagcagttcagttctgctagtgagtagttttcctctcctaccttccttctaaaaacctgattcatgcacagcgtttgacacacatggagtctgccagtgtgccttctctgcttcagacaagagatctgccatttcatgcccttgtgactacctatcattggccctgcaataaaatcatttatttttcactctggtgcgtgca

SEQ ID NO: 178531 - DNA, 2454 bp, Homo sapiens
  Payload ID: 15189
  Gene Symbol: RUFY1
  Gene Name: RUN and FYVE domain containing 1
  Uniprot ID: Q96T51
  ENST ID: ENST00000393438
  CDS Start-End: 159-1961
aaaaatggaaccggggttgcgggagaagccaaacgcggcgagtcttgctaaagccgtcgccgtagcaacgcgcggagccgtctgggagaggcctctggagcaggaggcccagtggctcttctgacccaaggccccgccgtccagcttctaagtgccagatgatggaggagcgtgccaacctgatgcacatgatgaaactcagcatcaaggtgttgctccagtcggctctgagcctgggccgcagcctggatgcggaccatgcccccttgcagcagttctttgtagtgatggagcactgcctcaaacatgggctgaaagttaagaagagttttattggccaaaataaatcattctttggtcctttggagctggtggagaaactttgtccagaagcatcagatatagcgactagtgtcagaaatcttccagaattaaagacagctgtgggaagaggccgagcgtggctttatcttgcactcatgcaaaagaaactggcagattatctgaaagtgcttatagacaataaacatctcttaagcgagttctatgagcctgaggctttaatgatggaggaagaagggatggtgattgttggtctgctggtgggactcaatgttctcgatgccaatctctgcttgaaaggagaagacttggattctcaggttggagtaatagatttttccctctaccttaaggatgtgcaggatcttgatggtggcaaggagcatgaaagaattactgatgtccttgatcaaaaaaattatgtggaagaacttaaccggcacttgagctgcacagttggggatcttcaaaccaagatagatggcttggaaaagactaactcaaagcttcaagaagagctttcagctgcaacagaccgaatttgctcacttcaagaagaacagcagcagttaagagaacaaaatgaattaattcgagaaagaagtgaaaagagtgtagagataacaaaacaggataccaaagttgagctggagacttacaagcaaactcggcaaggtctggatgaaatgtacagtgatgtgtggaagcagctaaaagaggagaagaaagtccggttggaactggaaaaagaactggagttacaaattggaatgaaaaccgaaatggaaattgcaatgaagttactggaaaaggacacccacgagaagcaggacacactagttgccctccgccagcagctggaagaagtcaaagcgattaatttacagatgtttcacaaagctcagaatgcagagagcagtttgcagcagaagaatgaagccatcacatcctttgaaggaaaaaccaaccaagttatgtccagcatgaaacaaatggaagaaaggttgcagcactcggagcgggcgaggcagggggctgaggagcggagccacaagctgcagcaggagctgggcgggaggatcggcgccctgcagctgcagctctcccagctgcacgagcaatgctcaagcctggagaaagaattgaaatcagaaaaagagcaaagacaggctcttcagcgcgaattacagcacgagaaagacacttcctctctactcaggatggagctgcaacaagtggaaggactgaaaaaggagttgcgggagcttcaggacgagaaggcagagctgcagaagatctgcgaggagcaggaacaagccctccaggaaatgggcctgcacctcagccagtccaagctgaagatggaagatataaaagaagtgaaccaggcactgaagggccacgcctggctgaaagatgacgaagcgacacactgtaggcagtgtgagaaggagttctccatttcccggagaaagcaccactgccggaactgtggccacatcttctgcaacacctgctccagcaacgagctggccctgccctcctaccccaagccggtgcgagtgtgcgacagctgccacaccctgctcctgcagcgctgctcctccacggcctcctgaacgtccgtcctcaggagcacagcctcacggacagtgccaaaccctgtgggtctccaggggcttgggaaatgtgttctttcccaagagtatcaaaggaaagaatcaaatttcttgcccggtcactggcactccagaagacagcgtgccggaaccggcagctctcacctttctgtgacttgttcggaattaactcctctggatggaaacttccatcttacttggttacatcacggctctggttcagatacaacttcatgattttgctactatcatttttcacttttcaaagaatttaacctattttacagcagttcagttctgctagtgagtagttttcctctcctaccttccttctaaaaacctgattcatgcacagcgtttgacacacatggagtctgccagtgtgccttctctgcttcagacaagagatctgccatttcatgcccttgtgactacctatcattggccctgcaataaaatcatttatttttca

SEQ ID NO: 178532 - DNA, 2320 bp, Homo sapiens
  Payload ID: 15189
  Gene Symbol: RUFY1
  Gene Name: RUN and FYVE domain containing 1
  ENST ID: ENST00000393448
  CDS Start-End: 1-973
ggggctgggcggcggggacagcggggacggcacggcgcgcgcagcttctaagtgccagatgatggaggagcgtgccaacctgatgcacatgatgaaactcagcatcaaggtgttgctccagtcggctctgagcctgggccgcagcctggatgcggaccatgcccccttgcagcagttctttgtagtgatggagcactgcctcaaacatgggctgaaagttaagaagagttttattggccaaaataaatcattctttggtcctttggagctggtggagaaactttgtccagaagcatcagatatagcgactagtgtcagaaatcttccagaattaaagacagctgtgggaagaggccgagcgtggctttatcttgcactcatgcaaaagaaactggcagattatctgaaagtgcttatagacaataaacatctcttaagcgagttctatgagcctgaggctttaatgatggaggaagaagggatggtgattgttggtctgctggtgggactcaatgttctcgatgccaatctctgcttgaaaggagaagacttggattctcaggttggagtaatagatttttccctctaccttaaggatgtgcaggatcttgatggtggcaaggagcatgaaagaattactgatgtccttgatcaaaaaaattatgtggaagaacttaaccggcacttgagctgcacagttggggatcttcaaaccaagatagatggcttggaaaagactaactcaaagcttcaagaagaggaagagagaatgaaaggacaggacaaaggagggctgagccgaggaagagagcttgctgccagctgcccggcagtctccttgctggacacatcttgtctcctgttagcaggaggggggtgctcagcccttctgaggctttccacagctttcagctgcaacagaccgaatttgctcacttcaagaagaacagcagcagttaagagaacaaaatgaattaattcgagaaagaagtgaaaagagtgtagagataacaaaacaggataccaaagttgagctggagacttacaagcaaactcggcaaggtctggatgaaatgtacagtgatgtgtggaagcagctaaaagaggagaagaaagtccggttggaactggaaaaagaactggagttacaaattggaatgaaaaccgaaatggaaattgcaatgaagttactggaaaaggacacccacgagaagcaggacacactagttgccctccgccagcagctggaagaagtcaaagcgattaatttacagatgtttcacaaagctcagaatgcagagagcagtttgcagcagaagaatgaagccatcacatcctttgaaggaaaaaccaaccaagttatgtccagcatgaaacaaatggaagaaaggttgcagcactcggagcgggcgaggcagggggctgaggagcggagccacaagctgcagcaggagctgggcgggaggatcggcgccctgcagctgcagctctcccagctgcacgagcaatgctcaagcctggagaaagaattgaaatcagaaaaagagcaaagacaggctcttcagcgcgaattacagcacgagaaagacacttcctctctactcaggatggagctgcaacaagtggaaggactgaaaaaggagttgcgggagcttcaggacgagaaggcagagctgcagaagatctgcgaggagcaggaacaagccctccaggaaatgggcctgcacctcagccagtaagaaccccactccccttgtctgccactgcaggcacaccaggctacccaccacatccctcaggccccaaacctacctccttttggcgaacggagggtgggccatttaggagctcagtccgccgttcacggatgagctctcaggaagcccggcctcagaggggcccagcactgatctctgctacccacatggggtgtcagcgagctcttagttaattcaggaagcacgttcattcctagtgaccaggacactcctattccttagcttcatatccagggcctgagggaacagatgggcaatgagaggatcgcttggtcagcctacagtcaggccagagggagcagggctggtttgggaacggaagcctggcacagtagaggtgcactcacccgccttgcacagcacagcccccttcctttcggggaactggccactgcatccgccagagtctgtctgtctctgctgcaggtgctgatggggtgcagaccctggtagttctgctcccctctgacttgacagctctcctccttggtgtcccagtctagataggttgctgtggacgcctgggccttggggtggatcac

SEQ ID NO: 178533 - DNA, 2642 bp, Homo sapiens
  Payload ID: 15189
  Gene Symbol: RUFY1
  Gene Name: RUN and FYVE domain containing 1
  Uniprot ID: Q96T51
  ENST ID: ENST00000437570
  CDS Start-End: 348-2150
aaaaatggaaccggggttgcgggagaagccaaacgcggcgagtcttgctaaagccgtcgccgtagcaacgcgcggagccgtctgggagaggcctctggagcaggaggcccagtggctcttctgacccaaggccccgccgtccaggtagggggctgtggcctctagggatcagggactacttacctgcgaatcccggttgcccgcccgccagcacgtccgttccctaagcagaccgcctggcctcctgcctgacccgtcttctcaccgttgcccggagtctgacctccccacgctcagtccactaacgaagctatccctgctcctgccccacagcttctaagtgccagatgatggaggagcgtgccaacctgatgcacatgatgaaactcagcatcaaggtgttgctccagtcggctctgagcctgggccgcagcctggatgcggaccatgcccccttgcagcagttctttgtagtgatggagcactgcctcaaacatgggctgaaagttaagaagagttttattggccaaaataaatcattctttggtcctttggagctggtggagaaactttgtccagaagcatcagatatagcgactagtgtcagaaatcttccagaattaaagacagctgtgggaagaggccgagcgtggctttatcttgcactcatgcaaaagaaactggcagattatctgaaagtgcttatagacaataaacatctcttaagcgagttctatgagcctgaggctttaatgatggaggaagaagggatggtgattgttggtctgctggtgggactcaatgttctcgatgccaatctctgcttgaaaggagaagacttggattctcaggttggagtaatagatttttccctctaccttaaggatgtgcaggatcttgatggtggcaaggagcatgaaagaattactgatgtccttgatcaaaaaaattatgtggaagaacttaaccggcacttgagctgcacagttggggatcttcaaaccaagatagatggcttggaaaagactaactcaaagcttcaagaagagctttcagctgcaacagaccgaatttgctcacttcaagaagaacagcagcagttaagagaacaaaatgaattaattcgagaaagaagtgaaaagagtgtagagataacaaaacaggataccaaagttgagctggagacttacaagcaaactcggcaaggtctggatgaaatgtacagtgatgtgtggaagcagctaaaagaggagaagaaagtccggttggaactggaaaaagaactggagttacaaattggaatgaaaaccgaaatggaaattgcaatgaagttactggaaaaggacacccacgagaagcaggacacactagttgccctccgccagcagctggaagaagtcaaagcgattaatttacagatgtttcacaaagctcagaatgcagagagcagtttgcagcagaagaatgaagccatcacatcctttgaaggaaaaaccaaccaagttatgtccagcatgaaacaaatggaagaaaggttgcagcactcggagcgggcgaggcagggggctgaggagcggagccacaagctgcagcaggagctgggcgggaggatcggcgccctgcagctgcagctctcccagctgcacgagcaatgctcaagcctggagaaagaattgaaatcagaaaaagagcaaagacaggctcttcagcgcgaattacagcacgagaaagacacttcctctctactcaggatggagctgcaacaagtggaaggactgaaaaaggagttgcgggagcttcaggacgagaaggcagagctgcagaagatctgcgaggagcaggaacaagccctccaggaaatgggcctgcacctcagccagtccaagctgaagatggaagatataaaagaagtgaaccaggcactgaagggccacgcctggctgaaagatgacgaagcgacacactgtaggcagtgtgagaaggagttctccatttcccggagaaagcaccactgccggaactgtggccacatcttctgcaacacctgctccagcaacgagctggccctgccctcctaccccaagccggtgcgagtgtgcgacagctgccacaccctgctcctgcagcgctgctcctccacggcctcctgaacgtccgtcctcaggagcacagcctcacggacagtgccaaaccctgtgggtctccaggggcttgggaaatgtgttctttcccaagagtatcaaaggaaagaatcaaatttcttgcccggtcactggcactccagaagacagcgtgccggaaccggcagctctcacctttctgtgacttgttcggaattaactcctctggatggaaacttccatcttacttggttacatcacggctctggttcagatacaacttcatgattttgctactatcatttttcacttttcaaagaatttaacctattttacagcagttcagttctgctagtgagtagttttcctctcctaccttccttctaaaaacctgattcatgcacagcgtttgacacacatggagtctgccagtgtgccttctctgcttcagacaagagatctgccatttcatgcccttgtgactacctatcattggccctgcaataaaatcatttatttttc

SEQ ID NO: 178534 - DNA, 658 bp, Homo sapiens
  Payload ID: 15189
  Gene Symbol: RUFY1
  Gene Name: RUN and FYVE domain containing 1
  ENST ID: ENST00000502984
  CDS Start-End: 1-658
ggctgggcggcggggacagcggggacggcacggcgcgcgcagccggcgttttgctcgtcacccaggctggagtgcaatggcgtgatctcgggtcacggcaacctccgcctcccaggttcaagcgattctcctgcctcagcctcccaagcagctgggattacaagcatgcaccaccacgcccagcttctaagtgccagatgatggaggagcgtgccaacctgatgcacatgatgaaactcagcatcaaggtgttgctccagtcggctctgagcctgggccgcagcctggatgcggaccatgcccccttgcagcagttctttgtagtgatggagcactgcctcaaacatgggctgaaagttaagaagagttttattggccaaaataaatcattctttggtcctttggagctggtggagaaactttgtccagaagcatcagatatagcgactagtgtcagaaatcttccagaattaaagacagctgtgggaagaggccgagcgtggctttatcttgcactcatgcaaaagaaactggcagattatctgaaagtgcttatagacaataaacatctcttaagcgagttctatgagcctgaggctttaatgatggaggaagaagggatggtgattgttggtctgctggtgggactcaatgttct

SEQ ID NO: 178535 - DNA, 984 bp, Homo sapiens
  Payload ID: 15189
  Gene Symbol: RUFY1
  Gene Name: RUN and FYVE domain containing 1
  ENST ID: ENST00000502434
  CDS Start-End: 1-984
gcaggatcttgatggtggcaaggagcatgaaagaattactgatgtccttgatcaaaaaaattatgtggaagaacttaaccggcacttgagctgcacagttggggatcttcaaaccaagatagatggcttggaaaagactaactcaaagcttcaagaagagataacaaaacaggataccaaagttgagctggagacttacaagcaaactcggcaaggtctggatgaaatgtacagtgatgtgtggaagcagctaaaagaggagaagaaagtccggttggaactggaaaaagaactggagttacaaattggaatgaaaaccgaaatggaaattgcaatgaagttactggaaaaggacacccacgagaagcaggacacactagttgccctccgccagcagctggaagaagtcaaagcgattaatttacagatgtttcacaaagctcagaatgcagagagcagtttgcagcagaagaatgaagccatcacatcctttgaaggaaaaaccaaccaagttatgtccagcatgaaacaaatggaagaaaggttgcagcactcggagcgggcgaggcagggggctgaggagcggagccacaagctgcagcaggagctgggcgggaggatcggcgccctgcagctgcagctctcccagctgcacgagcaatgctcaagcctggagaaagaattgaaatcagaaaaagagcaaagacaggctcttcagcgcgaattacagcacgagaaagacacttcctctctactcaggatggagctgcaacaagtggaaggactgaaaaaggagttgcgggagcttcaggacgagaaggcagagctgcagaagatctgcgaggagcaggaacaagccctccaggaaatgggcctgcacctcagccagtccaagctgaagatggaagatataaaagaagtgaaccaggcactgaagggccacgcctggctgaaagatgacgaagcgacacactgtaggcagtg

SEQ ID NO: 178536 - DNA, 812 bp, Homo sapiens
  Payload ID: 15189
  Gene Symbol: RUFY1
  Gene Name: RUN and FYVE domain containing 1
  ENST ID: ENST00000508609
  CDS Start-End: 1-812
tagcgactagtgtcagaaatcttccagaattaaagacagctgtgggaagaggccgagcgtggctttatcttgcactcatgcaaaagaaactggcagattatctgaaagtgcttatagacaataaacatctcttaagcgagttctatgagcctgaggctttaatgatggaggaagaagggatggtgattgttggtctgctggtgggactcaatgttctcgatgccaatctctgcttgaaaggagaagacttggattctcaggttggagtaatagatttttccctctaccttaaggatgtgcaggatcttgatggtggcaaggactgcacagttggggatcttcaaaccaagatagatggcttggaaaagactaactcaaagcttcaagaagagctttcagctgcaacagaccgaatttgctcacttcaagaagaacagcagcagttaagagaacaaaatgaattaattcgagaaagaagtgaaaagagtgtagagataacaaaacaggataccaaagttgagctggagacttacaagcaaactcggcaaggtctggatgaaatgtacagtgatgtgtggaagcagctaaaagaggagaagaaagtccggttggaactggaaaaagaactggagttacaaattggaatgaaaaccgaaatggaaattgcaatgaagttactggaaaaggacacccacgagaagcaggacacactagttgccctccgccagcagctggaagaagtcaaagcgattaatttacagatgtttcacaaagctcagaatgcagagagcagtttgcagcagaagaatgaa

SEQ ID NO: 178537 - DNA, 2033 bp, Homo sapiens
  Payload ID: 15190
  Gene Symbol: RUFY2
  Gene Name: RUN and FYVE domain containing 2
  ENST ID: ENST00000265865
  CDS Start-End: 820-1410
ttttcttataaaaatattgaagttaaatacaagaaatcctagatggccaaagaaggcagggagtggagctaagcacaggaaaatgcaacgacttacaaataaaaacaggaaagatgaaaatcacaatgttttagctaatttttaatattaaatggtgaggaacaaaaatgatctctagcaaatgatgccaactggcaccaaattctttttgaatcttaaacatatatgcacacgtgcacacacacacacacacagagcttcggcataatttagtaaatgcataaagatgccgtaagaaggacttggctatcatttggagtaattgcaggtctttgctcttggccttgtagcacacttgattcctggcatacacatcctagcataacatataacagtgtggcttcttcacctagtgtaggcataaatcctttgcttttcatggttttgtaaaaaggtagtaacatacctattatgctttgaaatttgattcgttatgctctgcataagtggtaaaggctgtattgctttgcactgttaattatgaacaagaaataaaacaaatttgaagatagtattctgggcatactacatgttatattgaaaaaaaaaaatcacaaaacaacttctagacattgtgtggctctttcacgtttgagtttgtgagttttcccccaaactttgttttcatttagaaatgtttctatttccccatttttcttttatttgtcttcttcacccttttacaccctagttctagcctcagttttacccaaagttgatttgaattacaccagattgcagcaagcagagaaggcgcaaatggaagctgaagatgaggatgagaaatatctacaagaatgtctcagtaaatctgatagtctgcagaaacaaatctcccaaaaggagaaacagctggtgcaactggaaactgacttgaagattgagaaggaatggaggcagactttgcaggaagatcttcaaaaggagaaagatgccttatctcatcttagaaatgagactcaacaaatcattagtcttaaaaaagagttccttaacctccaggatgaaaatcagcagttgaaaaaaatatatcatgaacaagagcaagctcttcaagaactcggcaacaagcttagcgaatcaaaacttaaaattgaagacataaaagaagccaacaaagcattgcagggactggtttggctgaaagacaaagaagcaacacattgtaaactttgtgaaaaggaattctcactctctaagagaaagcaccactgtagaaattgtggggaaattttctgtaatgcctgctctgacaacgaactacctttgccttcttcaccaaaaccagtacgggtttgtgattcctgtcatgcactgctcattcagagatgctcatctaacttgccctgagactccagaactaaatccttatgtatgaaattacctacaatgaatgttatgatgttgtatacaaaggtaaccagacagctctccttaagcggctttcggtcagtatttggtaccagtttatcttctacatattcagctcatggaaattacaagttatatatttccttccccattgtttttcaaaatgtattttcaacagagcatgcttaaaaatcatgtaactcattaaaaggccagagagcagagctaacacaacttgccttatcttgtaaaggccttaaaaataaggcttcagattgtttttttcttctgaattctgtcaatttggtatttgatggtgcctgcagttctcttaatgcactttaaagcttcacagttctgaaactggaaacgcataaaacttttaaaattattaatattctaattcaacagattttcattatctttgtaagatttcaactatatttatttgccctttcttctccccctctccctttgcctcttgcattagacagggccaatattttgtcctacaaaatttcctcttggtctctttaaaaatcagttattgtcgtgcttgctgaagattttcagctacagtggattaaattaaagggggcatt

SEQ ID NO: 178538 - DNA, 983 bp, Homo sapiens
  Payload ID: 15190
  Gene Symbol: RUFY2
  Gene Name: RUN and FYVE domain containing 2
  ENST ID: ENST00000342616
  CDS Start-End: 89-787
agatgcggtggtggccgccgagcgcctggaaggagctgctggacaggccgagggagcctccgcccgagaccgcgcagccgccgccgccatggctacaaaagaccccacagctgtagagagagcaaacttgttaaacatggctaaactgagtatcaaaggactcattgaatctgctctgagctttggccgcactttggattctgactatccccccttgcagcaattctttgttgttatggaacattgcctgaaacacggtcttaaagtaagaaaatcatttttgagttacaacaaaaccatctggggccctttggaactggtggagaagctgtaccccgaagcagaggaaataggagctagtgtccgggatctacctggtctgaagacccctctgggtcgagcaagagcgtggcttcgattagccctcatgcaaaaaaaaatggccgattacttacgttgcttaattattcagagggatctcttgagtgagttttatgagtatcacgcactaatgatggaagaagaaggagcagtaattgttgggctgctggttggcctgaatgtgatcgatgctaatctgtgtgtgaagggagaggatttagactcacaagttggagtgattgatttttctatgtatttaaagaatgaagaagatattggaaataaagaaaggtatgattttcataagttatttcacatattgggttttttatatagctctttacaaatcattataagatccatctatttacagtgtggttttattttgttgttttcccccctgtgacttcttcatttcattttcacttccattacaagctttacaaagcagattatggaaaatcacttaggagaaggaggttttattaatagtatgaagtgggacctttggttatacctgtagttactgagacccattttaatagtggttttttggaataaaagagatgaaagcttattattcacaagtttgcaaatactgg

SEQ ID NO: 178539 - DNA, 4502 bp, Homo sapiens
  Payload ID: 15190
  Gene Symbol: RUFY2
  Gene Name: RUN and FYVE domain containing 2
  Uniprot ID: Q8WXA3
  ENST ID: ENST00000388768
  CDS Start-End: 328-2253
atgggtaaggcgagcgggccgaaaccgaacgctaggccctcagtcccgggctgagggccgcggccaggcggggtggactgggagctgggggagacgccgaggccgccagtcggaactggggcccgaacccaggatgggcggggactgcctgggactcgggggctcccggggtcgtcatggcaacgcgccccctcccttgttccggcccgttcccgcccgggttctgaggcatagtggccgagggctcgaggtgccacggcgtccaggagcgaggacagggccaggcagggtgtcactcccgggtcggggagcaggcggggaggggcgatgacttttcaggtttgggggtggcggagggaagacgcatctcaggttttggcctgggtgcctgacgccgagggcgggagacggggaatgctgacgcgcaggagcctggctacaaaagaccccacagctgtagagagagcaaacttgttaaacatggctaaactgagtatcaaaggactcattgaatctgctctgagctttggccgcactttggattctgactatccccccttgcagcaattctttgttgttatggaacattgcctgaaacacggtcttaaagtaagaaaatcatttttgagttacaacaaaaccatctggggccctttggaactggtggagaagctgtaccccgaagcagaggaaataggagctagtgtccgggatctacctggtctgaagacccctctgggtcgagcaagagcgtggcttcgattagccctcatgcaaaaaaaaatggccgattacttacgttgcttaattattcagagggatctcttgagtgagttttatgagtatcacgcactaatgatggaagaagaaggagcagtaattgttgggctgctggttggcctgaatgtgatcgatgctaatctgtgtgtgaagggagaggatttagactcacaagttggagtgattgatttttctatgtatttaaagaatgaagaagatattggaaataaagaaaggaatgttcaaattgctgccatattagaccaaaagaattatgttgaagaattaaatagacaactgaacagcacagtcagcagcctccattcaagagttgattcattagaaaagtcaaatactaagctgattgaagagttagcaatagcaaagaataacatcattaaactccaggaagaaaatcatcaattacgaagtgaaaataaattgattttaatgaaaacacagcagcacctagaggttaccaaagtagatgtggaaactgagcttcaaacatataagcattctcgtcaggggctagatgaaatgtacaatgaagccagaaggcagcttcgagatgaatctcagttacgacaggatgtagagaatgagctagcagtacaagttagtatgaagcatgagattgaacttgccatgaagttgctggagaaagatatccatgagaaacaagatactctgataggccttcgacaacaactagaggaagttaaagcaattaacatagagatgtatcaaaagttgcagggttctgaagatggcttgaaagaaaaaaatgaaataattgcccgactagaagaaaaaaccaataaaattactgcagccatgaggcagctggaacaaagattgcagcaagcagagaaggcgcaaatggaagctgaagatgaggatgagaaatatctacaagaatgtctcagtaaatctgatagtctgcagaaacaaatctcccaaaaggagaaacagctggtgcaactggaaactgacttgaagattgagaaggaatggaggcagactttgcaggaagatcttcaaaaggagaaagatgccttatctcatcttagaaatgagactcaacaaatcattagtcttaaaaaagagttccttaacctccaggatgaaaatcagcagttgaaaaaaatatatcatgaacaagagcaagctcttcaagaactcggcaacaagcttagcgaatcaaaacttaaaattgaagacataaaagaagccaacaaagcattgcagggactggtttggctgaaagacaaagaagcaacacattgtaaactttgtgaaaaggaattctcactctctaagagaaagcaccactgtagaaattgtggggaaattttctgtaatgcctgctctgacaacgaactacctttgccttcttcaccaaaaccagtacgggtttgtgattcctgtcatgcactgctcattcagagatgctcatctaacttgccctgagactccagaactaaatccttatgtatgaaattacctacaatgaatgttatgatgttgtatacaaaggtaaccagacagctctccttaagcggctttcggtcagtatttggtaccagtttatcttctacatattcagctcatggaaattacaagttatatatttccttccccattgtttttcaaaatgtattttcaacagagcatgcttaaaaatcatgtaactcattaaaaggccagagagcagagctaacacaacttgccttatcttgtaaaggccttaaaaataaggcttcagattgtttttttcttctgaattctgtcaatttggtatttgatggtgcctgcagttctcttaatgcactttaaagcttcacagttctgaaactggaaacgcataaaacttttaaaattattaatattctaattcaacagattttcattatctttgtaagatttcaactatatttatttgccctttcttctccccctctccctttgcctcttgcattagacagggccaatattttgtcctacaaaatttcctcttggtctctttaaaaatcagttattgtcgtgcttgctgaagattttcagctacagtggattaaattaaagggggcattatttggcctcggcctctacttttttccttttaatcttgaaaggaagttacatataaccatctttcttttcctgatttataaatcttcccatatgctgtttcattaaattgctgtttttttaaggggtgactcagaccccaattcaaagatgaaaacacaaatccttccccagaaaaaaaagtatgtaatagtaggggatgttacaggctccttataaaggtcctctcctctaagcattaaaagtgagaaaaaaatcaggactttgctttggtaatgtattagagttcagttcaaaaaattttgtattaacattttcattggagtaaattttaggaagtatcacattgtagtggcctacctgtatacatccacagtaaaatttcaccatgtccattgagcacctctatgccaagggtgttgagatgatgaaatatacacttgacctatttctttttttttcgagatggagtttcactcttgttgcctaggctggagtgcaatggcacgatctccacctcctgggttcaagcaattctcctgcctcagcctcccaagtagctgggattacaggcgtgagccacagcacctggccagtacacttgacctatttcaagctgactcaatgaacactaatccaagttatattgcttatggcatactaagaatttaacttgtataaattacctctgaatagttacataaacactatcaccattcagtatcctattttttacattaatttttaaccatgcactttaagtttgtgagcctataaaaaatacatagaaaatttatggattaagagcattatatttagtggttaatcctaggtacctccctgcctacaaaggagttcttattaatactgcaggatcttttcttcatgaatatatgcttccatgaaatttaaatttttctgaatagcctaagtatgaaatgaatattttacttgaagatctattttttccaaaacccgtaaatttccagtcagcttttgaggtgtcagatgtgacacagatttctagatggtctttcttgaatactgacagaaatgtcctcaagagaggattatattcttgaaccattttgtattgataggtgggatgggctaacatttttatgattactgaataaacaaaaaatgaaattttcaaatatgcttttttattactgtgcttagaacaaattttaaaatgtgacttaagttgcttaaattccaaggctaatttcattcaacaaaccatgattttgtcatcctttaagtaagtttctcacttttcaaaactcatgtatcaacactgactgacttgctttttttttttttttttttttttttaggcagcttttatgacagcaacttgctccatgtagttttggcttatttaaaaactatactaactttggatttttctgttacaagacttttaacaatctgtatttcgtgattgtgaactcgtattcattttacttttcaaaaacagacttaacataccattccctcacctagcagtactaccacaataatgctatcatggtgccagggaattacaattgtaattcttctaacctataatgtttaaaaaataaaatgtgaattttatgaactaaataaatatttggaaaatt

SEQ ID NO: 178540 - DNA, 2685 bp, Homo sapiens
  Payload ID: 15190
  Gene Symbol: RUFY2
  Gene Name: RUN and FYVE domain containing 2
  Uniprot ID: Q8WXA3
  ENST ID: ENST00000399200
  CDS Start-End: 106-1317
gcagcgggcctggctgcagatgcggtggtggccgccgagcgcctggaaggagctgctggacaggccgagggagcctccgcccgagaccgcgcagccgccgccgccatggctacaaaagaccccacagctgtagagagagcaaacttgttaaacatggctaaactgagtatcaaaggactcattgaatctgctctgagctttggccgcactttggattctgactatccccccttgcagcaattctttgttgttatggaacattgcctgaaacacggtcttaaagtaagaaaatcatttttgagttacaacaaaaccatctggggccctttggaactggtggagaagctgtaccccgaagcagaggaaataggagctagtgtccgggatctacctggtctgaatgagttttatgagtatcacgcactaatgatggaagaagaaggagcagtaattgttgggctgctggttggcctgaatgtgatcgatgctaatctgtgtgtgaagggagaggatttagactcacaagttggagtgattgatttttctatgtatttaaagaatgaagaagatattggaaataaagaaaggaatgttcaaattgctgccatattagaccaaaagaattatgttgaagaattaaatagacaactgaacagcacagtcagcagcctccattcaagagttgattcattagaaaagtcaaatactaagctgattgaagagttagcaatagcaaagaataacatcattaaactccaggaagaaaatcatcaattacgaagtgaaaataaattgattttaatgaaaacacagcagcacctagaggttaccaaagtagatgtggaaactgagcttcaaacatataagcattctcgtcaggggctagatgaaatgtacaatgaagccagaaggcagcttcgagatgaatctcagttacgacaggatgtagagaatgagctagcagtacaagttagtatgaagcatgagattgaacttgccatgaagttgctggagaaagatatccatgagaaacaagatactctgataggccttcgacaacaactagaggaagttaaagcaattaacatagagatgtatcaaaagttgcagggttctgaagatggcttgaaagaaaaaaatgaaataattgcccgactagaagaaaaaaccaataaaattactgcagccatgaggcagctggaacaaagtgacaacgatttgttaactcaaactaggacaattgcaatgtcattggtgaaatgtgccagcagtgacacgcaggaccagtacaagctggttaaagatatatctttctgaagaccacttgtatttaaacagactaaatgaaaagagaatcaacaattttataatatattaaatagaaaggaatctaaatgctattaaatattctaaaaggatgttaggaaccctgtacatttcttggtcagctgctgtggtaatacactgccatcaagcagagtgggtgcacttggatttccagacatacgttcctcaaaccttgtgcacaaagggtgatttgagtattgaccctttggaggtcaggattttcaaatgcagttttatctttttagctactttttgatgaaaaatataaagattgtttaaaaataacttaaccttcagttttatactgtgttggcacagatatttttttctcattggcccactctttgcccaatggctcccttacagatttttacatatgctttaaaataatttataacccagactggccaacaccctgtgcttcagcttctcagttttccggttctcccttgccctcttctgtgatagcacaacttcaaggcctacctcactctgacttctattttcctttttgtaaccttagagaaaagcttgggtccaatcccagcacctgaatattttaatttaaacttggatttggagataacttaaatgttactctcccttccttggaagcagcatttatacccctgaaatatgtgagggttgctccattggtatggttttaaggaagaaaggaagaggaagagttttttagttagttgaaccgaaatttctcttgtgatttcctgcaaggagttaatatcctttgaatcttggtaaatattttcttataaaaatattgaagttaaatacaagaaatcctagatggccaaagaaggcagggagtggagctaagcacaggaaaatgcaacgacttacaaataaaaacaggaaagatgaaaatcacaatgttttagctaatttttaatattaaatggtgaggaacaaaaatgatctctagcaaatgatgccaactggcaccaaattctttttgaatcttaaacatatatgcacacgtgcacacacacacacacacagagcttcggcataatttagtaaatgcataaagatgccgtaagaaggacttggctatcatttggagtaattgcaggtctttgctcttggccttgtagcacacttgattcctggcatacacatcctagcataacatataacagtgtggcttcttcacctagtgtaggcataaatcctttgcttttcatggttttgtaaaaaggtagtaacatacctattatgctttgaaatttgattcgttatgctctgcataagtggtaaaggctgtattgctttgcactgttaattatgaacaagaaataaaacaaatttgaagatagt

SEQ ID NO: 178541 - DNA, 2613 bp, Homo sapiens
  Payload ID: 15190
  Gene Symbol: RUFY2
  Gene Name: RUN and FYVE domain containing 2
  Uniprot ID: Q8WXA3
  ENST ID: ENST00000454950
  CDS Start-End: 106-1245
gcagcgggcctggctgcagatgcggtggtggccgccgagcgcctggaaggagctgctggacaggccgagggagcctccgcccgagaccgcgcagccgccgccgccatggtaagaaaatcatttttgagttacaacaaaaccatctggggccctttggaactggtggagaagctgtaccccgaagcagaggaaataggagctagtgtccgggatctacctggtctgaagacccctctgggtcgagcaagagcgtggcttcgattagccctcatgcaaaaaaaaatggccgattacttacgttgcttaattattcagagggatctcttgagtgagttttatgagtatcacgcactaatgatggaagaagaaggagcagtaattgttgggctgctggttggcctgaatgtgatcgatgctaatctgtgtgtgaagggagaggatttagactcacaagttggagtgattgatttttctatgtatttaaagaatgaagaagatattggaaataaagaaaggaatgttcaaattgctgccatattagaccaaaagaattatgttgaagaattaaatagacaactgaacagcacagtcagcagcctccattcaagagttgattcattagaaaagtcaaatactaagctgattgaagagttagcaatagcaaagaataacatcattaaactccaggaagaaaatcatcaattacgaagtgaaaataaattgattttaatgaaaacacagcagcacctagaggttaccaaagtagatgtggaaactgagcttcaaacatataagcattctcgtcaggggctagatgaaatgtacaatgaagccagaaggcagcttcgagatgaatctcagttacgacaggatgtagagaatgagctagcagtacaagttagtatgaagcatgagattgaacttgccatgaagttgctggagaaagatatccatgagaaacaagatactctgataggccttcgacaacaactagaggaagttaaagcaattaacatagagatgtatcaaaagttgcagggttctgaagatggcttgaaagaaaaaaatgaaataattgcccgactagaagaaaaaaccaataaaattactgcagccatgaggcagctggaacaaagtgacaacgatttgttaactcaaactaggacaattgcaatgtcattggtgaaatgtgccagcagtgacacgcaggaccagtacaagctggttaaagatatatctttctgaagaccacttgtatttaaacagactaaatgaaaagagaatcaacaattttataatatattaaatagaaaggaatctaaatgctattaaatattctaaaaggatgttaggaaccctgtacatttcttggtcagctgctgtggtaatacactgccatcaagcagagtgggtgcacttggatttccagacatacgttcctcaaaccttgtgcacaaagggtgatttgagtattgaccctttggaggtcaggattttcaaatgcagttttatctttttagctactttttgatgaaaaatataaagattgtttaaaaataacttaaccttcagttttatactgtgttggcacagatatttttttctcattggcccactctttgcccaatggctcccttacagatttttacatatgctttaaaataatttataacccagactggccaacaccctgtgcttcagcttctcagttttccggttctcccttgccctcttctgtgatagcacaacttcaaggcctacctcactctgacttctattttcctttttgtaaccttagagaaaagcttgggtccaatcccagcacctgaatattttaatttaaacttggatttggagataacttaaatgttactctcccttccttggaagcagcatttatacccctgaaatatgtgagggttgctccattggtatggttttaaggaagaaaggaagaggaagagttttttagttagttgaaccgaaatttctcttgtgatttcctgcaaggagttaatatcctttgaatcttggtaaatattttcttataaaaatattgaagttaaatacaagaaatcctagatggccaaagaaggcagggagtggagctaagcacaggaaaatgcaacgacttacaaataaaaacaggaaagatgaaaatcacaatgttttagctaatttttaatattaaatggtgaggaacaaaaatgatctctagcaaatgatgccaactggcaccaaattctttttgaatcttaaacatatatgcacacgtgcacacacacacacacacagagcttcggcataatttagtaaatgcataaagatgccgtaagaaggacttggctatcatttggagtaattgcaggtctttgctcttggccttgtagcacacttgattcctggcatacacatcctagcataacatataacagtgtggcttcttcacctagtgtaggcataaatcctttgcttttcatggttttgtaaaaaggtagtaacatacctattatgctttgaaatttgattcgttatgctctgcataagtggtaaaggctgtattgctttgcactgttaattatgaacaagaaataaaacaaatttgaagatagt

SEQ ID NO: 178542 - DNA, 2110 bp, Homo sapiens
  Payload ID: 15190
  Gene Symbol: RUFY2
  Gene Name: RUN and FYVE domain containing 2
  ENST ID: ENST00000466493
  CDS Start-End: 1-1862
gagggctcgaggtgccacggcgtccaggagcgaggacagggccagctacaaaagaccccacagctgtagagagagcaaacttgttaaacatggctaaactgagtatcaaaggactcattgaatctgctctgagctttggccgcactttggattctgactatccccccttgcagcaattctttgttgttatggaacattgcctgaaacacggtcttaaagtaagaaaatcatttttgagttacaacaaaaccatctggggccctttggaactggtggagaagctgtaccccgaagcagaggaaataggagctagtgtccgggatctacctggtctgaagacccctctgggtcgagcaagagcgtggcttcgattagccctcatgcaaaaaaaaatggccgattacttacgttgcttaattattcagagggatctcttgagtgagttttatgagtatcacgcactaatgatggaagaagaaggagcagtaattgttgggctgctggttggcctgaatgtgatcgatgctaatctgtgtgtgaagggagaggatttagactcacaagttggagtgattgatttttctatgtatttaaagaatgaagaagatattggaaataaagaaaggaatgttcaaattgctgccatattagaccaaaagaattatgttgaagaattaaatagacaactgaacagcacagtcagcagcctccattcaagagttgattcattagaaaagtcaaatactaagctgattgaagagttagcaatagcaaagaataacatcattaaactccaggaagaaaatcatcaattacgaagtgaaaataaattgattttaatgaaaacacagcagcacctagaggttaccaaagtagatgtggaaactgagcttcaaacatataagcattctcgtcaggggctagatgaaatgtacaatgaagccagaaggcagcttcgagatgaatctcagttacgacaggatgtagagaatgagctagcagtacaagttagtatgaagcatgagattgaacttgccatgaagttgctggagaaagatatccatgagaaacaagatactctgataggccttcgacaacaactagaggaagttaaagcaattaacatagagatgtatcaaaagttgcagggttctgaagatggcttgaaagaaaaaaatgaaataattgcccgactagaagaaaaaaccaataaaattactgcagccatgaggcagctggaacaaagattgcagcaagcagagaaggcgcaaatggaagctgaagatgaggatgagaaatatctacaagaatgtctcagtaaatctgatagtctgcagaaacaaatctcccaaaaggagaaacagctggtgcaactggaaactgacttgaagattgagaaggaatggaggcagactttgcaggaagatcttcaaaaggagaaagatgccttatctcatcttagaaatgagactcaacaaatcattagtcttaaaaaagagttccttaacctccaggatgaaaatcagcagttgaaaaaaatatatcatgaacaagagcaagctcttcaagaactcggcaacaagcttagcgaatcaaaacttaaaattgaagacataaaagaagccaacaaagcattgcagggactggtttggctgaaagacaaagaagcaacacattgtaaactttgtgaaaaggaattctcactctctaagagaaagcaccactgtagaaattgtggggaaattttctgtaatgcctgctctgacaacgaactacctttgccttcttcaccaaaaccagtacgggtttgtgattcctgtcatgcactgctcattcagagatgctcatctaacttgccctgagactccagaactaaatccttatgtatgaaattacctacaatgaatgttatgatgttgtatacaaagacatggcagctactgcatcttcatgtgtcacaaactctacatctgcttctcctgtggctctgccatcagctccaatatcaatatgaactcgtattggatttagtggtgagaagaactaaataaaaggaaacacttatttacttttctattgagaatattaaagtaaattaccacataccttg

SEQ ID NO: 178543 - DNA, 3863 bp, Homo sapiens
  Payload ID: 15190
  Gene Symbol: RUFY2
  Gene Name: RUN and FYVE domain containing 2
  Uniprot ID: Q8WXA3
  ENST ID: ENST00000602465
  CDS Start-End: 102-1922
cgggcctggctgcagatgcggtggtggccgccgagcgcctggaaggagctgctggacaggccgagggagcctccgcccgagaccgcgcagccgccgccgccatggctacaaaagaccccacagctgtagagagagcaaacttgttaaacatggctaaactgagtatcaaaggactcattgaatctgctctgagctttggccgcactttggattctgactatccccccttgcagcaattctttgttgttatggaacattgcctgaaacacggtcttaaagtaagaaaatcatttttgagttacaacaaaaccatctggggccctttggaactggtggagaagctgtaccccgaagcagaggaaataggagctagtgtccgggatctacctggtctgaagacccctctgggtcgagcaagagcgtggcttcgattagccctcatgcaaaaaaaaatggccgattacttacgttgcttaattattcagagggatctcttgagtgagttttatgagtatcacgcactaatgatggaagaagaaggagcagtaattgttgggctgctggttggcctgaatgtgatcgatgctaatctgtgtgtgaagggagaggatttagactcacaagttggagtgattgatttttctatgtatttaaagaatgaagaagatattggaaataaagaaaggaatgttcaaattgctgccatattagaccaaaagaattatgttgaagaattaaatagacaactgaacagcacagtcagcagcctccattcaagagttgattcattagaaaagtcaaatactaagctgattgaagagttagcaatagcaaagaataacatcattaaactccaggaagaaaatcatcaattacgaagtgaaaataaattgattttaatgaaaacacagcagcacctagaggttaccaaagtagatgtggaaactgagcttcaaacatataagcattctcgtcaggggctagatgaaatgtacaatgaagccagaaggcagcttcgagatgaatctcagttacgacaggatgtagagaatgagctagcagtacaagttagtatgaagcatgagattgaacttgccatgaagttgctggagaaagatatccatgagaaacaagatactctgataggccttcgacaacaactagaggaagttaaagcaattaacatagagatgtatcaaaagttgcagggttctgaagatggcttgaaagaaaaaaatgaaataattgcccgactagaagaaaaaaccaataaaattactgcagccatgaggcagctggaacaaagattgcagcaagcagagaaggcgcaaatggaagctgaagatgaggatgagaaatatctacaagaatgtctcagtaaatctgatagtctgcagaaacaaatctcccaaaaggagaaacagctggtgcaactggaaactgacttgaagattgagaaggaatggaggcagactttgcaggaagatcttcaaaaggagaaagatgccttatctcatcttagaaatgagactcaacaaatcattagtcttaaaaaagagttccttaacctccaggatgaaaatcagcagttgaaaaaaatatatcatgaacaagagcaagctcttcaagaactcggcaacaagcttagcgaatcaaaacttaaaattgaagacataaaagaagccaacaaagcattgcagggactggtttggctgaaagacaaagaagcaacacattgtaaactttgtgaaaaggaattctcactctctaagagaaagcaccactgtagaaattgtggggaaattttctgtaatgcctgctctgacaacgaactacctttgccttcttcaccaaaaccagtacgggtttgtgattcctgtcatgcactgctcattcagagatgctcatctaacttgccctgagactccagaactaaatccttatgtatgaaattacctacaatgaatgttatgatgttgtatacaaaggtaaccagacagctctccttaagcggctttcggtcagtatttggtaccagtttatcttctacatattcagctcatggaaattacaagttatatatttccttccccattgtttttcaaaatgtattttcaacagagcatgcttaaaaatcatgtaactcattaaaaggccagagagcagagctaacacaacttgccttatcttgtaaaggccttaaaaataaggcttcagattgtttttttcttctgaattctgtcaatttggtatttgatggtgcctgcagttctcttaatgcactttaaagcttcacagttctgaaactggaaacgcataaaacttttaaaattattaatattctaattcaacagattttcattatctttgtaagatttcaactatatttatttgccctttcttctccccctctccctttgcctcttgcattagacagggccaatattttgtcctacaaaatttcctcttggtctctttaaaaatcagttattgtcgtgcttgctgaagattttcagctacagtggattaaattaaagggggcattatttggcctcggcctctacttttttccttttaatcttgaaaggaagttacatataaccatctttcttttcctgatttataaatcttcccatatgctgtttcattaaattgctgtttttttaaggggtgactcagaccccaattcaaagatgaaaacacaaatccttccccagaaaaaaaagtatgtaatagtaggggatgttacaggctccttataaaggtcctctcctctaagcattaaaagtgagaaaaaaatcaggactttgctttggtaatgtattagagttcagttcaaaaaattttgtattaacattttcattggagtaaattttaggaagtatcacattgtagtggcctacctgtatacatccacagtaaaatttcaccatgtccattgagcacctctatgccaagggtgttgagatgatgaaatatacacttgacctatttctttttttttcgagatggagtttcactcttgttgcctaggctggagtgcaatggcacgatctccacctcctgggttcaagcaattctcctgcctcagcctcccaagtagctgggattacaggcgtgagccacagcacctggccagtacacttgacctatttcaagctgactcaatgaacactaatccaagttatattgcttatggcatactaagaatttaacttgtataaattacctctgaatagttacataaacactatcaccattcagtatcctattttttacattaatttttaaccatgcactttaagtttgtgagcctataaaaaatacatagaaaatttatggattaagagcattatatttagtggttaatcctaggtacctccctgcctacaaaggagttcttattaatactgcaggatcttttcttcatgaatatatgcttccatgaaatttaaatttttctgaatagcctaagtatgaaatgaatattttacttgaagatctattttttccaaaacccgtaaatttccagtcagcttttgaggtgtcagatgtgacacagatttctagatggtctttcttgaatactgacagaaatgtcctcaagagaggattatattcttgaaccattttgtattgataggtgggatgggctaacatttttatgattactgaataaacaaaaaatgaaattttcaaatatgcttttttattactgtgcttagaacaaattttaaaatgtgacttaagttgcttaaattccaaggctaatttcattcaacaaaccatgattttgtcatcctttaagtaagtttctcacttttcaaaactcatgtatcaacactgactgacttgcttttttt

SEQ ID NO: 178544 - DNA, 405 bp, Homo sapiens
  Payload ID: 15190
  Gene Symbol: RUFY2
  Gene Name: RUN and FYVE domain containing 2
  ENST ID: ENST00000463210
  CDS Start-End: 1-392
tatctcatcttagaaatgagactcaacaaatcattagtcttaaaaaagagttccttaacctccaggatgaaaatcagcagttgaaaaaaatatatcatgaacaagagcaagctcttcaagaactcggcaacaagcttagcgaatcaaaacttaaaattgaagacataaaagaagccaacaaagcattgcagggactggtttggctgaaagacaaagaagcaacacattgtaaactttgtgaaaaggaattctcactctctaagagaaagacatggcagctactgcatcttcatgtgtcacaaactctacatctgcttctcctgtggctctgccatcagctccaatatcaatatgaactcgtattggatttagtggtgagaagaactaaataaaaggaaacactta

SEQ ID NO: 178545 - DNA, 4233 bp, Homo sapiens
  Payload ID: 15191
  Gene Symbol: RUFY3
  Gene Name: RUN and FYVE domain containing 3
  Uniprot ID: Q7L099
  ENST ID: ENST00000226328
  CDS Start-End: 564-1973
gccaatcctatgagaactcagcatcccagctcatctgagcagatcctggaagtgatttctgcagctcaggattttttttttaagctacattgaaaatataggtttattttttgttcaggtttttcttttatattttttttctgcacaaaggaggaggatttttcacttactcatatcgaggccagatttttaaagccagctaaggcagcatcagctgtgcgggatttaaagcctatagctcagctgaaaaaaaaggtggggggcagggaagggaagataaaaggagaggaagctgggagaagacaagcatcatcttattttgctatgtggtaggaactgtctataagatagtgtagaattgtttatcttgagcagtttgttcttaacctataaggtatttttccttttttttttttttaaacctcccccacccttttcctgaaagctttgtttcagagctttgtattgggtttttttggtgaggaggttgtatttatttttttggtgtgtgtgtgtgagtgtgtgtgtgtctgtgtgtgtgttgtggtcccagctgagtcatcatgtctgctctgacgcctccgaccgatatgccaacccccaccactgacaagatcacacaggctgccatggagaccatctacctttgcaaattccgagtgtccatggatggagaatggctctgcctgcgagagctggatgacatctcacttacacctgacccagagcctacccatgaagatcctaattatctcatggctaatgaacgcatgaacctcatgaacatggccaagctgagtatcaagggcttgattgaatcagctctgaacctggggaggactcttgactctgactatgcacctctccagcaattctttgtggtgatggagcactgtctgaaacatggcttgaaagctaaaaaaacttttctcggacaaaataaatccttctgggggcctctagaactggtagaaaagcttgttccagaagccgcagagataacagcaagtgttaaagatcttccaggacttaagacaccagtaggtagaggaagagcctggcttcgtttggcattaatgcaaaagaaactttcagaatatatgaaagctttgatcaataagaaagaacttctcagtgaattctacgaacccaatgccctcatgatggaagaagaaggagccataattgctggtctgttggtgggtctgaatgtcattgatgccaatttctgtatgaaaggagaagacttggactctcaggttggagttatagatttttcaatgtatctcaaggacgggaacagcagtaaaggtactgaaggagacggtcagattactgcaattctggaccagaagaactatgtagaagaactgaacagacatttgaatgctactgtaaacaaccttcaggcaaaagtagatgcattagaaaaatccaacactaaactgacagaggagcttgcagttgcaaacaacaggatcattaccttacaagaagaaatggaacgagttaaagaggaaagttcctacatactggaatccaatcggaagggtcccaagcaagacagaactgcagaagggcaagcactaagtgaagcaagaaagcatttaaaagaagagacacaattacgattggatgttgagaaagaactggagatgcagatcagcatgaggcaggagatggaattggctatgaagatgctggagaaggatgtctgtgagaagcaggatgccctggtatctcttcggcagcagctggatgacctcagagctctcaagcatgaacttgcctttaagctgcagagttcagacttaggagtaaaacagaaaagtgaactaaacagtcgcttggaagagaagactaatcagatggctgctaccattaaacaacttgaacaaagtgaaaaggatttggtgaaacaggcaaagaccttaaatagtgcagcaaataaactgatcccaaaacatcattaggcatttttaagttggtcacgtcgcaagtccgatatcacaacttaattgtaaaaggaagaaatctgaaagttactacatttaagctctgattctatataaaatgtcaccaaaaagttgactttgaatttgttggacttttaaaaaaccagttggaaatataggttgggtttttttcttattgttttctccccagggttagaaaaattggtataagttcctaattaaaagctgaataaactttgagaaattatttctgagttgaccaataaataaaaataccactttctttaaaaaagcctagggaattgaagctctgtacatatactaatgatgcctttacaacccagtccttgataataccagattctcggtgcattgttcatgtctgtatctgcaagcctgttctgccattgcagtgtgatgaacctagaggtaactaccatgtgaacttgaactcttctaaaatagttctgtgtctcttagaccatgaccccttttcacttttgttatataggtttaatccccaagccaaggatagtacttagtatttcactacacttctattctcagtaaccaagattgcttgcaactttttttgccttggtgacttttgaaaaaaaaagaaaagaaaaagcagcatccttatatttctttaaaatacatagaaataaagttagtaattaggtaacctatgataacataataatgtggacgcctggggaaaccctcctcatgtttgtcatcttctacctctgccgttttcctgcaattccgcttcctacttaggcagttcagagagaacaattctaataaaaacactcctctcctattaacaaaaaatgatgcagtacccatttttcgtatcctgcttttcttatattggagtaaaaaggacagggtatagacatgaatgatgatattctgcctggcctgtcatttcttacctggaaacatttacttaagagtttctgttactttttgttcagatggggatttgctaaaggttctgggaagctaataattgaattattagaaaaacatttcagaataggaagtaaatgataaacttatattctttattattatttagtacaaaaatagattcccagtagatatccacaagcaatattagcagggcttctgtttctaagtgaccacagactaaccctttctaggctttaacattgtaaataatcctataaacagtttgattttttaagatgatttttgatttgaagagacaggctttacataagccttcattccttcaaaaggtcctgacaaaatacttgggtttttttctctttttttcattctggtatgctttgcagcatttcagctgctttggtggggacacagataaccccttcgcttccagctcttaaaattctttatctttttcttggcaaaaccagaattaagagtgtaagatagattccatgtgtgcttatataggtccctgcacagattggacttgaaccaaaattaagtccaaagaacatatgtttagaccaacttcatggaagtggaagatcctgtgctcttgaacttattttaattcttataatttgcacctatataaacaaagctcctactgtattcttctcttcatcaaccttttgtggtgatgggttgccttttctacgagcatttggaaggagtgatcaaataccgaaattgaactttctaaaacctacacatagcatgcgtttaaattctattatataaagccccaagtgctttaccttctaaaacatgcttctctataggtgcaaagttataagatatgtagaagaaaacatccatcagaatcttctggagaatatggtcagagtcttaaacaggcccagtgctgagttctttgtccacttagtcacacatcttttgtgggaatgggaaaggaaggagacagccaaactctgacaaaggcttttccttatagaataacccaaagcctaggtgagggttgatatataatgtcccatgatttaatatatgtggtttgggggaaaggacaagaaaaaactataattccacatataagaaggtagttgcccatttacaagttccagttatgtgtgtaaaacagaaaaattaagtaccaaacctattaggaaatttttttaaaaagtggatttaacttaaattactgtgtacttgaggttggctttggatatggattttctaaaaagtgatgttttattgtttatcatctaatggctgtaaactgtagtactagaataaaaaaaatggaaaatca

SEQ ID NO: 178546 - DNA, 3098 bp, Homo sapiens
  Payload ID: 15191
  Gene Symbol: RUFY3
  Gene Name: RUN and FYVE domain containing 3
  Uniprot ID: Q7L099
  ENST ID: ENST00000381006
  CDS Start-End: 580-2442
ctgcttactgcgcacggccaatcctatgagaactcagcatcccagctcatctgagcagatcctggaagtgatttctgcagctcaggattttttttttaagctacattgaaaatataggtttattttttgttcaggtttttcttttatattttttttctgcacaaaggaggaggatttttcacttactcatatcgaggccagatttttaaagccagctaaggcagcatcagctgtgcgggatttaaagcctatagctcagctgaaaaaaaaggtggggggcagggaagggaagataaaaggagaggaagctgggagaagacaagcatcatcttattttgctatgtggtaggaactgtctataagatagtgtagaattgtttatcttgagcagtttgttcttaacctataaggtatttttccttttttttttttttaaacctcccccacccttttcctgaaagctttgtttcagagctttgtattgggtttttttggtgaggaggttgtatttatttttttggtgtgtgtgtgtgagtgtgtgtgtgtctgtgtgtgtgttgtggtcccagctgagtcatcatgtctgctctgacgcctccgaccgatatgccaacccccaccactgacaagatcacacaggctgccatggagaccatctacctttgcaaattccgagtgtccatggatggagaatggctctgcctgcgagagctggatgacatctcacttacacctgacccagagcctacccatgaagatcctaattatctcatggctaatgaacgcatgaacctcatgaacatggccaagctgagtatcaagggcttgattgaatcagctctgaacctggggaggactcttgactctgactatgcacctctccagcaattctttgtggtgatggagcactgtctgaaacatggcttgaaagctaaaaaaacttttctcggacaaaataaatccttctgggggcctctagaactggtagaaaagcttgttccagaagccgcagagataacagcaagtgttaaagatcttccaggacttaagacaccagtaggtagaggaagagcctggcttcgtttggcattaatgcaaaagaaactttcagaatatatgaaagctttgatcaataagaaagaacttctcagtgaattctacgaacccaatgccctcatgatggaagaagaaggagccataattgctggtctgttggtgggtctgaatgtcattgatgccaatttctgtatgaaaggagaagacttggactctcaggttggagttatagatttttcaatgtatctcaaggacgggaacagcagtaaaggtactgaaggagacggtcagattactgcaattctggaccagaagaactatgtagaagaactgaacagacatttgaatgctactgtaaacaaccttcaggcaaaagtagatgcattagaaaaatccaacactaaactgacagaggagcttgcagttgcaaacaacaggatcattaccttacaagaagaaatggaacgagttaaagaggaaagttcctacatactggaatccaatcggaagggtcccaagcaagacagaactgcagaagggcaagcactaagtgaagcaagaaagcatttaaaagaagagacacaattacgattggatgttgagaaagaactggagatgcagatcagcatgaggcaggagatggaattggctatgaagatgctggagaaggatgtctgtgagaagcaggatgccctggtatctcttcggcagcagctggatgacctcagagctctcaagcatgaacttgcctttaagctgcagagttcagacttaggagtaaaacagaaaagtgaactaaacagtcgcttggaagagaagactaatcagatggctgctaccattaaacaacttgaacaaagattgcgccaggctgagcgaagccgccaatctgctgagttggacaaccggctcttcaaacaggactttggagacaagatcaacagtctgcagctggaagtcgaggagctcaccaggcagcggaaccagcttgagttagaactaaaacaggaaaaagaaagaagattacaaaacgacaggagcatcccaggaaggggttcccagaagtcagaatccaagatggatgggaagcacaaaatgcaagaggaaaatgttaaactaaaaaagcccctggaagaaagccacaggctgcaaccccaccctatggatgaacaggatcagctgctgctctctgaaaagccacagttgtgtcagctatgccaggaagacggcagcctaacaaagaatgtgtgtaagaactgcagcggaaccttctgtgatgcctgttcaacaaatgaactgcctcttccttcaagtatcaagcttgagcgagtttgcaatccctgtcacaagcatctgatgaagcaatattctaccagcccatcataagactggaggccaagacctggaccaaaacgtttatgcaggctcctctgtacctgtgttttagctgtcaggatctcatagagcccagttcttagagtcaactaaagagttgataggaatttactaggtccagggagaaaaggcagtggttggggttactggaaattttgctcattttctctaatgactgtatgaataaaagtgaacttacttgagcctttctcttctaaatctaaacaacctgatattgaaggtttgctttatagcatatctttggaaaggcaactcatttttatgattagtgatactggggtggatttaataggagagagaatccaggcagataagaataaaaaggaaaatgatcatctccttctatagcatttgcagattcaagggggagaggtagatgctgagatcaaaatgacagttgttacttatttttccaggtgctgttagtataaacattgtttcctcttcacccctgctaactacctctttaaagtatttctaccaaactgtgaacccaatctcagggaaaagaaattaaaaagtaatataaattctgcatatattaaaaacaatattgtaatatgttataatttcaggaccagaattttctggtctttacctacaagggttttcattatcaaaaaaaa

SEQ ID NO: 178547 - DNA, 2143 bp, Homo sapiens
  Payload ID: 15191
  Gene Symbol: RUFY3
  Gene Name: RUN and FYVE domain containing 3
  Uniprot ID: Q7L099
  ENST ID: ENST00000417478
  CDS Start-End: 137-1657
gtggccgagaagaaaggtggcggtggcggcggcggcgcagcggacgggacggggcggcggctcctcgccctgaccctctgctcccccgcccaggcccgggcgcgaatcggaggctgcggcgaaggaaggagtgagcatggctgagaccccgccgccgcccaccgctggtgccgaaagttgcagcgaggagccggcgaggggcggggagtggcggccggaggagccgcgccgcgctcccgccgggggcacggaccgagagggcgaggcggggccgccgccggcctcccccgccgggcagtcggagcccgactcgccggtggccgcccccttcttcctgctgtaccccggcgatggaggcgccggcttcggagtgcgcccgccgccgcagcagcagcgctcctggaggaccccgccgtcccccggctcaccgctgcccttcctgctgctgagctacccgagcggcggcggcggcagcagcggcagcggcaagcaccatcctaattatctcatggctaatgaacgcatgaacctcatgaacatggccaagctgagtatcaagggcttgattgaatcagctctgaacctggggaggactcttgactctgactatgcacctctccagcaattctttgtggtgatggagcactgtctgaaacatggcttgaaagctaaaaaaacttttctcggacaaaataaatccttctgggggcctctagaactggtagaaaagcttgttccagaagccgcagagataacagcaagtgttaaagatcttccaggacttaagacaccagtaggtagaggaagagcctggcttcgtttggcattaatgcaaaagaaactttcagaatatatgaaagctttgatcaataagaaagaacttctcagtgaattctacgaacccaatgccctcatgatggaagaagaaggagccataattgctggtctgttggtgggtctgaatgtcattgatgccaatttctgtatgaaaggagaagacttggactctcaggttggagttatagatttttcaatgtatctcaaggacgggaacagcagtaaaggtactgaaggagacggtcagattactgcaattctggaccagaagaactatgtagaagaactgaacagacatttgaatgctactgtaaacaaccttcaggcaaaagtagatgcattagaaaaatccaacactaaactgacagaggagcttgcagttgcaaacaacaggatcattaccttacaagaagaaatggaacgagttaaagaggaaagttcctacatactggaatccaatcggaagggtcccaagcaagacagaactgcagaagggcaagcactaagtgaagcaagaaagcatttaaaagaagagacacaattacgattggatgttgagaaagaactggagatgcagatcagcatgaggcaggagatggaattggctatgaagatgctggagaaggatgtctgtgagaagcaggatgccctggtatctcttcggcagcagctggatgacctcagagctctcaagcatgaacttgcctttaagctgcagagttcagacttaggagtaaaacagaaaagtgaactaaacagtcgcttggaagagaagactaatcagatggctgctaccattaaacaacttgaacaaaggtaaaagtcctgtttctttaatgaaacactttggattgtcagtgctgaagtgaaaagaatgtgctgtacattcggcaaatagaaaatacatgaaattcttccaaattagcatcagacattctggtagaaaaaagccagttgaatgttatgtgtgttttctaaggtatgactgaaatgtttttaggaaatgtcaatcacttgactagcctttaaaaaaaaaaaagaaaggtcagccttttatgactgttttgaacatcagaactcttaatccatgtcagagtcatgtgttagaggaaggatacttaaaagcatggaaggactcttaaatgtatgtatgtaattctgtgattttattgttcatcactgaagtctttgaatacttggatgctaggggatatagaggcactgagagataggtgtcctccaaggatctattctggatctttctctcccttctttaacccttttctcttatctcccttttctttct

SEQ ID NO: 178548 - DNA, 582 bp, Homo sapiens
  Payload ID: 15191
  Gene Symbol: RUFY3
  Gene Name: RUN and FYVE domain containing 3
  ENST ID: ENST00000512103
  CDS Start-End: 1-173
gagctctcaagcatgaacttgcctttaagctgcagagttcagacttaggagtaaaacagaaaagtgaactaaacagtcgcttggaagagaagactaatcagatggctgctaccattaaacaacttgaacaaaggatgggaagcacaaaatgcaagaggaaaatgttaaactaaaaaagcccctggaagaaagccacaggctgcaaccccaccctatggatgaacagaatgtgtgtaagaactgcagcggaaccttctgtgatgcctgttcaacaaatgaactgcctcttccttcaagtatcaagcttgagcgagtttgcaatccctgtcacaagcatctgatgaagcaatattctaccagcccatcataagactggaggccaagacctggaccaaaacgtttatgcaggctcctctgtacctgtgttttagctgtcaggatctcatagagcccagttcttagagtcaactaaagagttgataggaatttactaggtccagggagaaaaggcagtggttggggttactggaaattttgctcattttctctaatgactgtatgaataaaagtgaacttacttga

SEQ ID NO: 178549 - DNA, 562 bp, Homo sapiens
  Payload ID: 15191
  Gene Symbol: RUFY3
  Gene Name: RUN and FYVE domain containing 3
  ENST ID: ENST00000504805
  CDS Start-End: 1-437
cacaattacgattggatgttgagaaagaactggagatgcagatcagcatgaggcaggagatggaattggctatgaagatgctggagaaggatgtctgtgagaagcaggatgccctggtatctcttcggcagcagctggatgacctcagagctctcaagcatgaacttgcctttaagctgcagagttcagacttaggagtaaaacagaaaagtgaactaaacagtcgcttggaagagaagactaatcagatggctgctaccattaaacaacttgaacaaagttcatgtggctcacatccagattgcgccaggctgagcgaagccgccaatctgctgagttggacaaccggctcttcaaacaggactttggagacaagatcaacagtctgcagctggaagtcgaggagctcaccaggcagcggaaccagcttgagttagaactaaaacaggaaaaagaaagaagattacaaaacgacaggagcatcccaggaaggggttcccagaagtcagaatccaagatggatgggaagcacaaaatgcaagaggaaaatgttaaactaaaa

SEQ ID NO: 178550 - DNA, 2342 bp, Homo sapiens
  Payload ID: 15191
  Gene Symbol: RUFY3
  Gene Name: RUN and FYVE domain containing 3
  Uniprot ID: Q7L099
  ENST ID: ENST00000502653
  CDS Start-End: 196-1899
gattatgtgttcagaaggcagtctcagtgaacttctcaaagtgagaaggttgtagcttttaatacagtctcagaagcctatgggacaaagttttctggacacggttcatcccttcttgttgctctgccctgaaaataacctggctagtcaccctttcaagactcttgggaggatttgacagatttggtggagcaaatgcgcgatgatacagaagatcctaattatctcatggctaatgaacgcatgaacctcatgaacatggccaagctgagtatcaagggcttgattgaatcagctctgaacctggggaggactcttgactctgactatgcacctctccagcaattctttgtggtgatggagcactgtctgaaacatggcttgaaagctaaaaaaacttttctcggacaaaataaatccttctgggggcctctagaactggtagaaaagcttgttccagaagccgcagagataacagcaagtgttaaagatcttccaggacttaagacaccagtaggtagaggaagagcctggcttcgtttggcattaatgcaaaagaaactttcagaatatatgaaagctttgatcaataagaaagaacttctcagtgaattctacgaacccaatgccctcatgatggaagaagaaggagccataattgctggtctgttggtgggtctgaatgtcattgatgccaatttctgtatgaaaggagaagacttggactctcaggttggagttatagatttttcaatgtatctcaaggacgggaacagcagtaaaggtactgaaggagacggtcagattactgcaattctggaccagaagaactatgtagaagaactgaacagacatttgaatgctactgtaaacaaccttcaggcaaaagtagatgcattagaaaaatccaacactaaactgacagaggagcttgcagttgcaaacaacaggatcattaccttacaagaagaaatggaacgagttaaagaggaaagttcctacatactggaatccaatcggaagggtcccaagcaagacagaactgcagaagggcaagcactaagtgaagcaagaaagcatttaaaagaagagacacaattacgattggatgttgagaaagaactggagatgcagatcagcatgaggcaggagatggaattggctatgaagatgctggagaaggatgtctgtgagaagcaggatgccctggtatctcttcggcagcagctggatgacctcagagctctcaagcatgaacttgcctttaagctgcagagttcagacttaggagtaaaacagaaaagtgaactaaacagtcgcttggaagagaagactaatcagatggctgctaccattaaacaacttgaacaaagattgcgccaggctgagcgaagccgccaatctgctgagttggacaaccggctcttcaaacaggactttggagacaagatcaacagtctgcagctggaagtcgaggagctcaccaggcagcggaaccagcttgagttagaactaaaacaggaaaaagaaagaagattacaaaacgacaggagcatcccaggaaggggttcccagaagtcagaatccaagatggatgggaagcacaaaatgcaagaggaaaatgttaaactaaaaaagcccctggaagaaagccacaggctgcaaccccaccctatggatgaacaggatcagctgctgctctctgaaaagccacagttgtgtcagctatgccaggaagacggcagcctaacaaagaatgtgtgtaagaactgcagcggaaccttctgtgatgcctgttcaacaaatgaactgcctcttccttcaagtatcaagcttgagcgagtttgcaatccctgtcacaagcatctgatgaagcaatattctaccagcccatcataagactggaggccaagacctggaccaaaacgtttatgcaggctcctctgtacctgtgttttagctgtcaggatctcatagagcccagttcttagagtcaactaaagagttgataggaatttactaggtccagggagaaaaggcagtggttggggttactggaaattttgctcattttctctaatgactgtatgaataaaagtgaacttacttgagcctttctcttctaaatctaaacaacctgatattgaaggtttgctttatagcatatctttggaaaggcaactcatttttatgattagtgatactggggtggatttaataggagagagaatccaggcagataagaataaaaaggaaaatgatcatctccttctatagcatttgcagattcaagggggagaggtagatgctgagatcaaaatgacagttgttacttatttttc

SEQ ID NO: 178551 - DNA, 867 bp, Homo sapiens
  Payload ID: 15191
  Gene Symbol: RUFY3
  Gene Name: RUN and FYVE domain containing 3
  ENST ID: ENST00000513597
  CDS Start-End: 263-867
gtaattggcccttggtgagattacagaaacatttgttgccaccagtgcagtcagccttagatttacactgtcaggttctctgagctgtgattatgtgttcagaaggcagtctcagtgaacttctcaaagtgagaaggttgtagcttttaatacagtctcagaagcctatgggacaaagttttctggacacggttcatcccttcttgttgctctgccctgaaaataacctggctagtcaccctttcaagatcctaattatctcatggctaatgaacgcatgaacctcatgaacatggccaagctgagtatcaagggcttgattgaatcagctctgaacctggggaggactcttgactctgactatgcacctctccagcaattctttgtggtgatggagcactgtctgaaacatggcttgaaagctaaaaaaacttttctcggacaaaataaatccttctgggggcctctagaactggtagaaaagcttgttccagaagccgcagagataacagcaagtgttaaagatcttccaggacttaagacaccagtaggtagaggaagagcctggcttcgtttggcattaatgcaaaagaaactttcagaatatatgaaagctttgatcaataagaaagaacttctcagtgaattctacgaacccaatgccctcatgatggaagaagaaggagccataattgctggtctgttggtgggtctgaatgtcattgatgccaatttctgtatgaaaggagaagacttggactctcaggttggagttatagatttttcaatgtatctcaaggacgggaacagcagtaaaggtactgaaggagacggtcagattactgcaattctggaccagaagaacta

SEQ ID NO: 178552 - DNA, 482 bp, Homo sapiens
  Payload ID: 15191
  Gene Symbol: RUFY3
  Gene Name: RUN and FYVE domain containing 3
  ENST ID: ENST00000514898
  CDS Start-End: 189-482
aaatacaggatttcagtacagcgcacaagacgggaacaaaagaggtggtggaaggaagacacccacctttggtttctcacataaagagctcaatactccaaacagtgaatcaacggttgaagttgcagtgtgtgaaaggcaaatggcccgggcgcgaatcggaggctgcggcgaaggaaggagtgagcatggctgagaccccgccgccgcccaccgctggtgccgaaagttgcagcgaggagccggcgaggggcggggagtggcggccggaggagccgcgccgcgctcccgccgggggcacggaccgagagggcgaggcggggccgccgccggcctcccccgccgggcagtcggagcccgactcgccggtggccgcccccttcttcctgctgtaccccggcgatggaggcgccggcttcggagtgcgcccgccgccgcagcagcagcgctcctggaggaccccgccgtcccccggctcaccg

SEQ ID NO: 178553 - DNA, 531 bp, Homo sapiens
  Payload ID: 15191
  Gene Symbol: RUFY3
  Gene Name: RUN and FYVE domain containing 3
  ENST ID: ENST00000503876
  CDS Start-End: 67-531
gtgccttcgtgctaccgataaagttggcggttacacgacaaaacgccgccagatcctaattatctcatggctaatgaacgcatgaacctcatgaacatggccaagctgagtatcaagggcttgattgaatcagctctgaacctggggaggactcttgactctgactatgcacctctccagcaattctttgtggtgatggagcactgtctgaaacatggcttgaaagctaaaaaaacttttctcggacaaaataaatccttctgggggcctctagaactggtagaaaagcttgttccagaagccgcagagataacagcaagtgttaaagatcttccaggacttaagacaccagtaggtagaggaagagcctggcttcgtttggcattaatgcaaaagaaactttcagaatatatgaaagctttgatcaataagaaagaacttctcagtgaattctacgaacccaatgccctcatgatggaagaagaaggagccataattgctggtctgttggtgggtctgaatgtcattgat

SEQ ID NO: 178554 - DNA, 2352 bp, Homo sapiens
  Payload ID: 15192
  Gene Symbol: RUFY4
  Gene Name: RUN and FYVE domain containing 4
  Uniprot ID: Q6ZNE9
  ENST ID: ENST00000344321
  CDS Start-End: 111-1826
gtaggctctgcgtcctgctttgtgtaaggagagagctgggcagtgaggccgaaagtccttcctgagctcacagtccaagttgcaaggaatcacatcatttccaagtacccatggcagaagagggagccatcctcaaggtcaccaaagacctaagagctgccgtctctgccatcctccagggctatggggatgggcaggggccagtgacggacaccagtgccgagctgcacagactctgtggctgcctggagctgctgctgcagtttgaccagaaagagcagaagagcttcctggggcctcggaaggattactgggactttctctgcactgccctacgacggcagcggggaaacatggagccaatccactttgtccgttcccaggacaagttgaagacccctctggggaaaggccgtgccttcatccgcttctgcctggcccgtgggcagctggctgaggccctgcagctttgcctcctgaactcagagctcaccagggaatggtatggaccccggagccctctgctctgcccagaacgccaagaagacatcctggactctctctatgctctcaatggggtggccttcgagttggacctccagcagccagacctggatggagcctggcccatgttctcagagtcacgctgctccagttccacccaaacccagggaaggagacccagaaaaaacaaagatgccccaaagaagatcccagccgcatatggagggcctgaaaatgtccagattgaggactcacacaccagtcaagccatctgtctgcaagatgcacccagtggacagcagctggcagggcttcccaggtcccagcaacaaaggcatcttcctttctttttggaaaagaagggggaaagttccaggaaacataggtacccccagagcatgtgggagccagaagggaaggagcttcagctagaccaggaggaaagagccccatggattgagatcttcctggggaactcaacacccagcacccagggacaggggaagggggctatgggcactcagaaggaggtgatagggatggaggctgaggtcacaggggttctgctggttgcagagggtcagagaacaacagaggggactcacaaaaaggaagcagagtggagtcacgtccagaggctgctgatgcccagccccagaggggctgtagagggagcagtatcagggagcaggcaggggtcggggggctctagcatcctgggggagccctgggtccttcagggacacgcaacaaaggaagactctaccgtggagaatccacaagtgcaaacagaagtgacccttgtggccagaagggaggagcaagccgaggtgtccctgcaggacgagatcaagagcctcagacttgggctccggaaggctgaggagcaggcccagcgccaggagcagctgctgagggagcaggagggggagctgcaggcacttcgggagcagctcagcaggtgtcaggaagagagagccgagctgcaggcacagctggagcagaagcaacaggaggctgagaggagggatgccatgtaccaggaggagcttggagggcagcgggacttggtccaggccatgaagaggcgggtgttggaactgatccaagagaaggaccgcctgtggcagaggctccagcatctctcttccatggctcccgagtgctgtgtggcctgtagcaagatctttggccgattttctcggcggtatccatgcaggctctgtggaggcctgctctgccatgcttgctccatggattacaagaagagagaccgctgctgcccaccctgcgcccagggaagagaagcccaggtcacctgaccaagaccaagaccagcccatgactggcctcccacctgcctgcccatcccactcaatccactccctgcccgtagctcttcccagccctcttgtttgtccagtcctcattctagacactgaagatctaaggcaccagcacttctgtgggcagagtagggtgtggggagtggttccagccctgcaactaccacaacgagccaggtgactttggcgaagctctcagtgctcagggcttcttctctaatgttaagagttgggccccatcctctctaaagtccctctgggctcagcaaatccatgactgtggataagaccccagcagccctgacatttctcctccacactccccactcacccagcagcggtgcccacctttcctgattcacgagaagtgaagcctgcactatcttggactctccagcagcttcctgtctggagtcagcttcagggatctgtgtttgtgttgctgtgtttctttttatgtttattgaagtactactgacatatgataaacatcacagagtgt

SEQ ID NO: 178555 - DNA, 2977 bp, Homo sapiens
  Payload ID: 15192
  Gene Symbol: RUFY4
  Gene Name: RUN and FYVE domain containing 4
  ENST ID: ENST00000374155
  CDS Start-End: 411-2234
aaatcctgggactgctgtgcaaggcagagtcactagggacggactctggcagcagagctgcgctctcgtgccccagccagccaggctctcctgggtgagtagcagggagacccctggaacttacggggatagaaggagtgtgatgccaggagccaggggaggaaaatgcctggcagagacgagggagaggaggagacacatggagccgttcatggatttcacacaggatctgggctggaaggggctgccgagaccatcagtccaatctttggtctacaggttgggaaactgaggctcaaggaaggctctgcgtcctgctttgtgtaaggagagagctgggcagtgaggccgaaagtccttcctgagctcacagtccaagttgcaaggaatcacatcatttccaagtacccatggcagaagagggagccatcctcaaggtcaccaaagacctaagagctgccgtctctgccatcctccagggctatggggatgggcaggggccagtgacggacaccagtgccgagctgcacagactctgtggctgcctggagctgctgctgcagtttgaccagaaagagcagaagagcttcctggggcctcggaaggattactgggactttctctgcactgccctacgacggcagcggggaaacatggagccaatccactttgtccgttcccaggacaagttgaagacccctctggggaaaggccgtgccttcatccgcttctgcctggcccgtgggcagctggctgaggccctgcagctttgcctcctgaactcagagctcaccagggaatggtatggaccccggagccctctgctctgcccagaacgccaagaagacatcctggactctctctatgctctcaatggggtggccttcgagttggacctccagcagccagacctggatggagcctggcccatgttctcagagtcacgctgctccagttccacccaaacccagggaaggagacccagaaaaaacaaagatgccccaaagaaggtgcctctgccctgccttcactctgagttgcctcttccccatctccttggcatcctcaagatcccagccgcatatggagggcctgaaaatgtccagattgaggactcacacaccagtcaagccatctgtctgcaagatgcacccagtggacagcagctggcagggcttcccaggtcccagcaacaaaggcatcttcctttctttttggaaaagaagggggaaagttccaggaaacataggtacccccagagcatgtgggagccagaagggaaggagcttcagctagaccaggaggaaagagccccatggattgagatcttcctggggaactcaacacccagcacccagggacaggggaagggggctatgggcactcagaaggaggtgatagggatggaggctgaggtcacaggggttctgctggttgcagagggtcagagaacaacagaggggactcacaaaaaggaagcagagtggagtcacgtccagaggctgctgatgcccagccccagaggggctgtagagggagcagtatcagggagcaggcaggggtcggggggctctagcatcctgggggagccctgggtccttcagggacacgcaacaaaggaagactctaccgtggagaatccacaagtgcaaacagaagtgacccttgtggccagaagggaggagcaagccgaggtgtccctgcaggacgagatcaagagcctcagacttgggctccggaaggctgaggagcaggcccagcgccaggagcagctgctgagggagcaggagggggagctgcaggcacttcgggagcagctcagcaggtgtcaggaagagagagccgagctgcaggcacagctggagcagaagcaacaggaggctgagaggagggatgccatgtaccaggaggagcttggagggcagcgggacttggtccaggccatgaagaggcgggtgttggaactgatccaagagaaggaccgcctgtggcagaggctccagcatctctcttccatggctcccgagtgctgtgtggcctgtagcaagatctttggccgattttctcggcggtatccatgcagtgctaggaccagccttgggagagaggaaagtgagccaccaggagaagctgccatgtggaggtggaggctctggaggggtcgggcatcaggacacccttcaggagaggggagacctcctgagacaaaccaagggcattccactgggagatgagaaacagatgtctcaggtggacctgaagatgctggaactccatgacctcagcgcccacttggggaagtgccagctgcagaggccgccccaggctttcctgcctctgccttccaggctctgtggaggcctgctctgccatgcttgctccatggattacaagaagagagaccgctgctgcccaccctgcgcccagggaagagaagcccaggtcacctgaccaagaccaagaccagcccatgactggcctcccacctgcctgcccatcccactcaatccactccctgcccgtagctcttcccagccctcttgtttgtccagtcctcattctagacactgaagatctaaggcaccagcacttctgtgggcagagtagggtgtggggagtggttccagccctgcaactaccacaacgagccaggtgactttggcgaagctctcagtgctcagggcttcttctctaatgttaagagttgggccccatcctctctaaagtccctctgggctcagcaaatccatgactgtggataagaccccagcagccctgacatttctcctccacactccccactcacccagcagcggtgcccacctttcctgattcacgagaagtgaagcctgcactatcttggactctccagcagcttcctgtctggagtcagcttcagggatctgtgtttgtgttgctgtgtttctttttatgtttattgaagtactactgacatatgataaacatcacagagtgt

SEQ ID NO: 178556 - DNA, 3568 bp, Homo sapiens
  Payload ID: 15192
  Gene Symbol: RUFY4
  Gene Name: RUN and FYVE domain containing 4
  Uniprot ID: Q6ZNE9
  ENST ID: ENST00000457754
  CDS Start-End: 1433-1951
accacaatggatcagcccccatttggccaacaggtgactctaccccaggtgggcctgagaggacccatcccccatctcaccattctgccccagcgccctggatcctgcctctaccacttcttccctgcgcagtcactagggacggactctggcagcagagccgcgctgtcgtgccccagccagccaggctctcctgggatctgggctggaaggggctgccgagaccatcagtccaatctttggtctacaggtggggaaactgaggctcaaggaaggtcagtggggggccagaagggacctcatgtgtgagatctggaagcgggaattggagcagcagtttcattctgcttcagctcaggaagcccctgcagcagcccagcctggagaaacgaggacccagcatggaaagaccccagcctcaaggaggcagagcacagccaggaagggaagccccagcccacctgggaaacccacctggcccattgctgggcacaggatctcactggtggtctcacatccatccttttgggaatgagatcaggactagggattcggcactggtgaccagcactcaggtggaccgctcagctgactgaggtggagaaggaaggaggagcgtggtgggaccctcgccctgccctccccactctggagcgctgcctctcagcccaaccaagtgacagagacgagacaaccacaggaatagcagctgcggagctccatggcctccctctgccccctggtggtgagaaggagaaaagcaagagcaggtgctgaaaacgaaaaggaaactagcagcagtcccagctaccacaatggatcagcccccatttggccaacaggtgactctaccccaggtgggcctgagaggacccatcccccatctcaccattctgccccagcgccctggatcctgcctctaccacttcttccctgcagcgtctgcggttcccccaccgctgtgagccaggttccccctccaggctgctgggctgggactgagttacttcttcccaggctgtaaatcctgggactgctgtgcaaggcagagtcactagggacggactctggcagcagagctgcgctctcgtgccccagccagccaggctctcctgggtgagtagcagggagacccctggaacttacggggatagaaggagtgtgatgccaggagccaggggaggaaaatgcctggcagagacgagggagaggaggagacacatggagccgttcatggatttcacacaggatctgggctggaaggggctgccgagaccatcagtccaatctttggtctacaggttgggaaactgaggctcaaggaaggctctgcgtcctgctttgtgtaaggagagagctgggcagtgaggccgaaagtccttcctgagctcacagtccaagttgcaaggaatcacatcatttccaagtacccatggcagaagagggagccatcctcaaggtcaccaaagacctaagagctgccgtctctgccatcctccagggctatggggatgggcaggggccagtgacggacaccagtgccgagctgcacagactctgtggctgcctggagctgctgctgcagtttgaccagaaagagcagaagagcttcctggggcctcggaaggattactgggactttctctgcactgccctacgacggcagcggggaaacatggagccaatccactttgtccgttcccaggacaagggaatggtatggaccccggagccctctgctctgcccagaacgccaagaagacatcctggactctctctatgctctcaatggggtggccttcgagttggacctccagcagccagacctggatggagcctggcccatgttctcagagtcacgctgctccagttccacccaaacccagggaaggagacccagaaaaaacaaagatgccccaaagaagatcccagccgcatatggagggcctgaaaatgtccagattgaggactcacacaccagtcaagccatctgtctgcaagatgcacccagtggacagcagctggcagggcttcccaggtcccagcaacaaaggcatcttcctttctttttggaaaagaagggggaaagttccaggaaacataggtacccccagagcatgtgggagccagaagggaaggagcttcagctagaccaggaggaaagagccccatggattgagatcttcctggggaactcaacacccagcacccagggacaggggaagggggctatgggcactcagaaggaggtgatagggatggaggctgaggtcacaggggttctgctggttgcagagggtcagagaacaacagaggggactcacaaaaaggaagcagagtggagtcacgtccagaggctgctgatgcccagccccagaggggctgtagagggagcagtatcagggagcaggcaggggtcggggggctctagcatcctgggggagccctgggtccttcagggacacgcaacaaaggaagactctaccgtggagaatccacaagtgcaaacagaagtgacccttgtggccagaagggaggagcaagccgaggtgtccctgcaggacgagatcaagagcctcagacttgggctccggaaggctgaggagcaggcccagcgccaggagcagctgctgagggagcaggagggggagctgcaggcacttcgggagcagctcagcaggtgtcaggaagagagagccgagctgcaggcacagctggagcagaagcaacaggaggctgagaggagggatgccatgtaccaggaggagcttggagggcagcgggacttggtccaggccatgaagaggcgggtgttggaactgatccaagagaaggaccgcctgtggcagaggctccagcatctctcttccatggctcccgagtgctgtgtggcctgtagcaagatctttggccgattttctcggcggtatccatgcaggctctgtggaggcctgctctgccatgcttgctccatggattacaagaagagagaccgctgctgcccaccctgcgcccagggaagagaagcccaggtcacctgaccaagaccaagaccagcccatgactggcctcccacctgcctgcccatcccactcaatccactccctgcccgtagctcttcccagccctcttgtttgtccagtcctcattctagacactgaagatctaaggcaccagcacttctgtgggcagagtagggtgtggggagtggttccagccctgcaactaccacaacgagccaggtgactttggcgaagctctcagtgctcagggcttcttctctaatgttaagagttgggccccatcctctctaaagtccctctgggctcagcaaatccatgactgtggataagaccccagcagccctgacatttctcctccacactccccactcacccagcagcggtgcccacctttcctgattcacgagaagtgaagcctgcactatcttggactctccagcagcttcctgtctggagtcagcttcagggatctgtgtttgtgttgctgtgtttctttttatgtttattgaagtactactgacatatgataaacatcacagagtgta

SEQ ID NO: 178557 - DNA, 2163 bp, Homo sapiens
  Payload ID: 15193
  Gene Symbol: RUSC1
  Gene Name: RUN and SH3 domain containing 1
  Uniprot ID: Q9BVN2
  ENST ID: ENST00000292254
  CDS Start-End: 319-1620
ggatcctggaggtgggggctgtgccctgagggagggcacagggaaccgggatggggctgggggacagcgagtgctgggaagtgtgcgagatttcactccggggctcgggtcgagctaccccgtgcttcaggcggtcctgcgcctcctctccccaagacccttcggggacacagcactgcagacccgccggagacaacttgtgcgggagcccggagtcctcggaataacacttggtaagtgttaccgcgcccttcttcccttacgccagtccgtagttcgtggtccttcgccggtgtccccggagcccagcggctgtggatggcagaagcccagagtgggactggtcagctgcaggagcagaagaaaggtcttctgatagccgtcagcgtctccgttgataaaatcatctcgcatttcggggccgcccggaacttggtgcagaaggcccagttgggtgatagccggctgagcccggatgtggggcacctggtgctgaccaccctctgcccggccctccacgccctggtggcggacgggctgaagcctttccggaaggacctcatcaccgggcagcgcaggagcagcccctggagcgtggtggaggcgtcggtgaagccaggctccagcacccgctcccttggaaccctgtatagccaggtcagccgtctagccccgctgagcagcagccgtagccgcttccatgcctttatcctgggcctcctcaacaccaagcagttggagctgtggttttccagtctccaggaagatgcaggcctgctctccctcctgtacctgccaacaggatttttctccctggcccgcggtggttgtccctccctgtccacagagctgctgctcctgctgcagccattgtcggtgctcactttccacctggacctgctctttgagcaccaccaccacctgcccctgggcccacctcaggcccctgcccctccaggcccacctccagctctgcagcagactatgcaagccatgctgcactttgggggccggctggcccagagccttcgggggacttccaaggaagctgcttcagacccctctgactctccaaaccttcccacaccagggagctggtgggagcagttgacccaggcctcccgggtctatgcctctgggggcactgagggctttcctctttcccgatgggcaccggggcgtcatgggactgcagctgaagaaggtgcacaggagagacccctgcccacagatgagatggcaccaggcaggggcctctggttgggaagactatttggagtgcctgggggccccgcagaaaatgagaatggagccctaaagtccaggagaccatctagctggctgcccccgacagtgagtgtgttggctcttgtgaagcggggggcacctcccgagatgccttctcctcaggagcttgaggcctcagcacccaggatggtgcaaacccatagggcagtgcgggctctctgtgatcacactgctgcaagacctgaccagttgagcttccggcgtggggaagtgctgcgtgtcatcaccacagtggatgaggactggctccgctgtgggcgggatggcatggagggtctggtgcctgtggggtatacctcccttgttctgtagccctgggaccctttcctgcgtatgtgtctccttcctgtcacctgggaatggaatggccagtgaacaccatcccagaagcattttccctctgcaaaatgacgtttcttcccacgtctgtttctgctaatatttaaaataaactttccttcttccctcctatacccacctgtaaggtgaaatctgctcttcttccaaatatataaaaaaggaattgccctccaggtaatccctttcctttttcccgtctatataagggaatgtcttccttcctatctatctgcaaaatggaaatctagacctccttcttcatccataagtggactgtgccagtacaatacatgcctcagcccccaagcctagaaggacctctagtctccttcctgtgtggaatcttccccactccatccctcccaagttgcctgtattgataatgtactcactcatgctgtactaggtgctgaagcctggacacccttggtgggtgggcctgtggtgatggtttgcatccttcctcctttgtcccaataaagtatgggagttgaa

SEQ ID NO: 178558 - DNA, 2503 bp, Homo sapiens
  Payload ID: 15193
  Gene Symbol: RUSC1
  Gene Name: RUN and SH3 domain containing 1
  Uniprot ID: Q9BVN2
  ENST ID: ENST00000368347
  CDS Start-End: 482-1960
gccgactccaagcaagtttgtcggccttggggagtctggccccgttcctagtgctggagggggaagttgttgcctttcctgctccgtgggccggccccctctccctccagacccacctgggcatagtggacgcgggcttacccagcctccatgccaagtctagggggtcccagcgagtctgttgttaggggctttgggtcacaccctctgtggaattccttggcctgtgcagctcgggcctgccccccgaccttgctagggaggggtggagggtgaagctcccgggagctcattggcactagaggttctggccacgccctctccgcgagtccagtcccacgcgggatgaagagggcaccctccgccaagaggctgctgcgggacccgggtttcccctttccggcgccttccagcctcccaatcctcgggtctcgcctccctccgtctcctccctttcccctgtctgtctttccattggtccatgccgcccacgtgctccccggggctccgcaggcaggactgggccccggggcggtgcgctgggctacacctccctccccgcgccccgtcctctcccgccctacaggccctagcagggcaggcgggagtccgtagttcgtggtccttcgccggtgtccccggagcccagcggctgtggatggcagaagcccagagtgggactggtcagctgcaggagcagaagaaaggtcttctgatagccgtcagcgtctccgttgataaaatcatctcgcatttcggggccgcccggaacttggtgcagaaggcccagttgggtgatagccggctgagcccggatgtggggcacctggtgctgaccaccctctgcccggccctccacgccctggtggcggacgggctgaagcctttccggaaggacctcatcaccgggcagcgcaggagcagcccctggagcgtggtggaggcgtcggtgaagccaggctccagcacccgctcccttggaaccctgtatagccaggtcagccgtctagccccgctgagcagcagccgtagccgcttccatgcctttatcctgggcctcctcaacaccaagcagttggagctgtggttttccagtctccaggaagatgcaggcctgctctccctcctgtacctgccaacaggatttttctccctggcccgcggtggttgtccctccctgtccacagagctgctgctcctgctgcagccattgtcggtgctcactttccacctggacctgctctttgagcaccaccaccacctgcccctgggcccacctcaggcccctgcccctccaggcccacctccagctctgcagcagactatgcaagccatgctgcactttgggggccggctggcccagagccttcgggggacttccaaggaagctgcttcagacccctctgactctccaaaccttcccacaccagggagctggtgggagcagttgacccaggcctcccgggtctatgcctctgggggcactgagggctttcctctttcccgatgggcaccggggcgtcatgggactgcagctgaagaaggtgcacaggagagacccctgcccacagatgagatggcaccaggcaggggcctctggttgggaagactatttggagtgcctgggggccccgcagaaaatgagaatggagccctaaagtccaggagaccatctagctggctgcccccgacagtgagtgtgttggctcttgtgaagcggggggcacctcccgagatgccttctcctcaggagcttgaggcctcagcacccaggatggtgcaaacccatagggcagtgcgggctctctgtgatcacactgctgcaagacctgaccagttgagcttccggcgtggggaagtgctgcgtgtcatcaccacagtggatgaggactggctccgctgtgggcgggatggcatggagggtctggtgcctgtggggtatacctcccttgttctgtagccctgggaccctttcctgcgtatgtgtctccttcctgtcacctgggaatggaatggccagtgaacaccatcccagaagcattttccctctgcaaaatgacgtttcttcccacgtctgtttctgctaatatttaaaataaactttccttcttccctcctatacccacctgtaaggtgaaatctgctcttcttccaaatatataaaaaaggaattgccctccaggtaatccctttcctttttcccgtctatataagggaatgtcttccttcctatctatctgcaaaatggaaatctagacctccttcttcatccataagtggactgtgccagtacaatacatgcctcagcccccaagcctagaaggacctctagtctccttcctgtgtggaatcttccccactccatccctcccaagttgcctgtattgataatgtactcactcatgctgtactaggtgctgaagcctggacacccttggtgggtgggcctgtggtgatggtttgcatccttcctcctttgtcccaataaagtatgggagttgaa

SEQ ID NO: 178559 - DNA, 1968 bp, Homo sapiens
  Payload ID: 15193
  Gene Symbol: RUSC1
  Gene Name: RUN and SH3 domain containing 1
  Uniprot ID: Q9BVN2
  ENST ID: ENST00000368349
  CDS Start-End: 126-1427
cgccctacaggccctagcagggcaggcgggaggtgagcgcggccatcccgctcccggagttccgggatcctggagtccgtagttcgtggtccttcgccggtgtccccggagcccagcggctgtggatggcagaagcccagagtgggactggtcagctgcaggagcagaagaaaggtcttctgatagccgtcagcgtctccgttgataaaatcatctcgcatttcggggccgcccggaacttggtgcagaaggcccagttgggtgatagccggctgagcccggatgtggggcacctggtgctgaccaccctctgcccggccctccacgccctggtggcggacgggctgaagcctttccggaaggacctcatcaccgggcagcgcaggagcagcccctggagcgtggtggaggcgtcggtgaagccaggctccagcacccgctcccttggaaccctgtatagccaggtcagccgtctagccccgctgagcagcagccgtagccgcttccatgcctttatcctgggcctcctcaacaccaagcagttggagctgtggttttccagtctccaggaagatgcaggcctgctctccctcctgtacctgccaacaggatttttctccctggcccgcggtggttgtccctccctgtccacagagctgctgctcctgctgcagccattgtcggtgctcactttccacctggacctgctctttgagcaccaccaccacctgcccctgggcccacctcaggcccctgcccctccaggcccacctccagctctgcagcagactatgcaagccatgctgcactttgggggccggctggcccagagccttcgggggacttccaaggaagctgcttcagacccctctgactctccaaaccttcccacaccagggagctggtgggagcagttgacccaggcctcccgggtctatgcctctgggggcactgagggctttcctctttcccgatgggcaccggggcgtcatgggactgcagctgaagaaggtgcacaggagagacccctgcccacagatgagatggcaccaggcaggggcctctggttgggaagactatttggagtgcctgggggccccgcagaaaatgagaatggagccctaaagtccaggagaccatctagctggctgcccccgacagtgagtgtgttggctcttgtgaagcggggggcacctcccgagatgccttctcctcaggagcttgaggcctcagcacccaggatggtgcaaacccatagggcagtgcgggctctctgtgatcacactgctgcaagacctgaccagttgagcttccggcgtggggaagtgctgcgtgtcatcaccacagtggatgaggactggctccgctgtgggcgggatggcatggagggtctggtgcctgtggggtatacctcccttgttctgtagccctgggaccctttcctgcgtatgtgtctccttcctgtcacctgggaatggaatggccagtgaacaccatcccagaagcattttccctctgcaaaatgacgtttcttcccacgtctgtttctgctaatatttaaaataaactttccttcttccctcctatacccacctgtaaggtgaaatctgctcttcttccaaatatataaaaaaggaattgccctccaggtaatccctttcctttttcccgtctatataagggaatgtcttccttcctatctatctgcaaaatggaaatctagacctccttcttcatccataagtggactgtgccagtacaatacatgcctcagcccccaagcctagaaggacctctagtctccttcctgtgtggaatcttccccactccatccctcccaagttgcctgtattgataatgtactcactcatgctgtactaggtgctgaagcctggacacccttggtgggtgggcctgtggtgatggtttgcatccttcctcctttgtcccaataaagtatgggagttg

SEQ ID NO: 178560 - DNA, 3403 bp, Homo sapiens
  Payload ID: 15193
  Gene Symbol: RUSC1
  Gene Name: RUN and SH3 domain containing 1
  Uniprot ID: Q9BVN2
  ENST ID: ENST00000368352
  CDS Start-End: 152-2860
cgccgggcggggaccgtgggagccgcggacaagcccaaggccggagcggttccaggaggaccctggtctgcacctgtggttgccaggtaggtggatgtgagagaccctacccttctggttctctagaagccatcccatcgccgctagcatcatgctgtcccctcagagagctttactctgcaacctcaaccacatccacctccagcacgtctccctgggcctgcacttgtcccgccgtcctgagctacaggaggggcctttgagcacaccccctcctccaggagacactgggggcaaggagagcaggggcccctgcagtggcaccctggtggacgccaattccaacagcccagctgtgccctgccggtgctgccaggagcacggtccgggcctagaaaaccggcaggacccgtcacaggaggaagagggggctgcctctccctcagacccaggctgctcctcctcactcagctcctgctcagatcttagccccgatgagtcccctgtctcagtctacttgcgggacctccctggtgatgaggatgcccaccctcagcccagtatcatccccctggagcagggctccccactggcttcagcaggccctggcacctgctcaccggacagcttctgctgctctcctgattcctgctccggagcttcttcttcacccgatcctggcctggactcgaactgcaacgccctgaccacctgccaggacgtcccttccccaggcttggaggaagaggacgagagggcggagcaggatctccctacctctgagctcttagaggcggatgatgggaaaatcgacgctgggaaaacggagcccagttggaagattaacccaatttggaaaattgacacagagaaaactaaagctgaatggaaaaccactgaaaacaataacactggttggaaaaacaacgggaatgttaactctagctggaaaagtgaacctgaaaaattcgactctggttggaaaaccaacacaagaataactgattctggctcgaaaacagatgcagggaaaattgatggaggatggagaagtgacgtcagcgaggagccggtgccccaccggacaatcacgtccttccacgagctggcccagaagcgcaagcggggcccagggctgccccttgtcccgcaggcgaagaaagatcgcagtgactggctcatagtcttctcgcccgacaccgagctccccccctcggggtcgccgggcggctcctcggcacctcctcgggaagtcaccaccttcaaggaactccggtcccgaagccgggccccagccccgccagtcccgcctcgagaccccccagttggctgggctttggtcccgccccggcccccacccccgcctgtccctccccgaaggaagaagaaccgacctggactgcagcccatagcggaggggcagtccgaggagggccgggctgtcagcccagcggctggcgaggaggccccagccgcgaaggagccgggcgcgcaggccggcctggaggtccgtagttcgtggtccttcgccggtgtccccggagcccagcggctgtggatggcagaagcccagagtgggactggtcagctgcaggagcagaagaaaggtcttctgatagccgtcagcgtctccgttgataaaatcatctcgcatttcggggccgcccggaacttggtgcagaaggcccagttgggtgatagccggctgagcccggatgtggggcacctggtgctgaccaccctctgcccggccctccacgccctggtggcggacgggctgaagcctttccggaaggacctcatcaccgggcagcgcaggagcagcccctggagcgtggtggaggcgtcggtgaagccaggctccagcacccgctcccttggaaccctgtatagccaggtcagccgtctagccccgctgagcagcagccgtagccgcttccatgcctttatcctgggcctcctcaacaccaagcagttggagctgtggttttccagtctccaggaagatgcaggcctgctctccctcctgtacctgccaacaggatttttctccctggcccgcggtggttgtccctccctgtccacagagctgctgctcctgctgcagccattgtcggtgctcactttccacctggacctgctctttgagcaccaccaccacctgcccctgggcccacctcaggcccctgcccctccaggcccacctccagctctgcagcagactatgcaagccatgctgcactttgggggccggctggcccagagccttcgggggacttccaaggaagctgcttcagacccctctgactctccaaaccttcccacaccagggagctggtgggagcagttgacccaggcctcccgggtctatgcctctgggggcactgagggctttcctctttcccgatgggcaccggggcgtcatgggactgcagctgaagaaggtgcacaggagagacccctgcccacagatgagatggcaccaggcaggggcctctggttgggaagactatttggagtgcctgggggccccgcagaaaatgagaatggagccctaaagtccaggagaccatctagctggctgcccccgacagtgagtgtgttggctcttgtgaagcggggggcacctcccgagatgccttctcctcaggagcttgaggcctcagcacccaggatggtgcaaacccatagggcagtgcgggctctctgtgatcacactgctgcaagacctgaccagttgagcttccggcgtggggaagtgctgcgtgtcatcaccacagtggatgaggactggctccgctgtgggcgggatggcatggagggtctggtgcctgtggggtatacctcccttgttctgtagccctgggaccctttcctgcgtatgtgtctccttcctgtcacctgggaatggaatggccagtgaacaccatcccagaagcattttccctctgcaaaatgacgtttcttcccacgtctgtttctgctaatatttaaaataaactttccttcttccctcctatacccacctgtaaggtgaaatctgctcttcttccaaatatataaaaaaggaattgccctccaggtaatccctttcctttttcccgtctatataagggaatgtcttccttcctatctatctgcaaaatggaaatctagacctccttcttcatccataagtggactgtgccagtacaatacatgcctcagcccccaagcctagaaggacctctagtctccttcctgtgtggaatcttccccactccatccctcccaagttgcctgtattgataatgtactcactcatgctgtactaggtgctgaagcctggacacccttggtgggtgggcctgtggtgatggtttgcatccttcctcctttgtcccaataaagtatgggagttgaa

SEQ ID NO: 178561 - DNA, 3114 bp, Homo sapiens
  Payload ID: 15193
  Gene Symbol: RUSC1
  Gene Name: RUN and SH3 domain containing 1
  Uniprot ID: Q9BVN2
  ENST ID: ENST00000368354
  CDS Start-End: 183-2573
gctagtgcccctcccctcccgctctgtgccccgccgggcggggaccgtgggagccgcggacaagcccaaggccggagcggttccaggaggaccctggtctgcacctgtggttgccaggtaggtggatgtgagagaccctacccttctggttctctagaagccatcccatcgccgctagcatcatgctgtcccctcagagagctttactctgcaacctcaaccacatccacctccagcacgtctccctgggcctgcacttgtcccgccgtcctgagctacaggaggggcctttgagcacaccccctcctccaggagacactgggggcaaggagagcaggggcccctgcagtggcaccctggtggacgccaattccaacagcccagctgtgccctgccggtgctgccaggagcacggtccgggcctagaaaaccggcaggacccgtcacaggaggaagagggggctgcctctccctcagacccaggctgctcctcctcactcagctcctgctcagatcttagccccgatgagtcccctgtctcagtctacttgcgggacctccctggtgatgaggatgcccaccctcagcccagtatcatccccctggagcagggctccccactggcttcagcaggccctggcacctgctcaccggacagcttctgctgctctcctgattcctgctccggagcttcttcttcacccgatcctggcctggactcgaactgcaacgccctgaccacctgccaggacgtcccttccccaggcttggaggaagaggacgagagggcggagcaggatctccctacctctgagctcttagaggcggatgatgggaaaatcgacgctgggaaaacggagcccagttggaagattaacccaatttggaaaattgacacagagaaaactaaagctgaatggaaaaccactgaaaacaataacactggttggaaaaacaacgggaatgttaactctagctggaaaagtgaacctgaaaaattcgactctggttggaaaaccaacacaagaataactgattctggctcgaaaacagatgcagggaaaattgatggaggatggagaagtgacgtcagcgaggagccggtgccccaccggacaatcacgtccttccacgagctggcccagaagcgcaagcggggcccagggctgccccttgtcccgcaggcgaagaaagatcgcagtgactggctcatagtcttctcgcccgacaccgagctccccccctcggggtcgccgggcggctcctcggcacctcctcgggaagtcaccaccttcaaggaactccggtcccgaagccgggccccagccccgccagtcccgcctcgagaccccccagttggctgggctttggtcccgccccggcccccacccccgcctgtccctccccgaaggaagaagaaccgacctggactgcagcccatagcggaggggcagtccgaggagggccgggctgtcagcccagcggctggcgaggaggccccagccgcgaaggagccgggcgcgcaggccggcctggaggtccgtagttcgtggtccttcgccggtgtccccggagcccagcggctgtggatggcagaagcccagagtgggactggtcagctgcaggagcagaagaaaggtcttctgatagccgtcagcgtctccgttgataaaatcatctcgcatttcggggccgcccggaacttggtgcagaaggcccagttgggtgatagccggctgagcccggatgtggggcacctggtgctgaccaccctctgcccggccctccacgccctggtggcggacgggctgaagcctttccggaaggacctcatcaccgggcagcgcaggagcagcccctggagcgtggtggaggcgtcggtgaagccaggctccagcacccgctcccttggaaccctgtatagccaggtcagccgtctagccccgctgagcagcagccgtagccgcttccatgcctttatcctgggcctcctcaacaccaagcagttggagctgtggttttccagtctccaggaagatgcagggagctggtgggagcagttgacccaggcctcccgggtctatgcctctgggggcactgagggctttcctctttcccgatgggcaccggggcgtcatgggactgcagctgaagaaggtgcacaggagagacccctgcccacagatgagatggcaccaggcaggggcctctggttgggaagactatttggagtgcctgggggccccgcagaaaatgagaatggagccctaaagtccaggagaccatctagctggctgcccccgacagtgagtgtgttggctcttgtgaagcggggggcacctcccgagatgccttctcctcaggagcttgaggcctcagcacccaggatggtgcaaacccatagggcagtgcgggctctctgtgatcacactgctgcaagacctgaccagttgagcttccggcgtggggaagtgctgcgtgtcatcaccacagtggatgaggactggctccgctgtgggcgggatggcatggagggtctggtgcctgtggggtatacctcccttgttctgtagccctgggaccctttcctgcgtatgtgtctccttcctgtcacctgggaatggaatggccagtgaacaccatcccagaagcattttccctctgcaaaatgacgtttcttcccacgtctgtttctgctaatatttaaaataaactttccttcttccctcctatacccacctgtaaggtgaaatctgctcttcttccaaatatataaaaaaggaattgccctccaggtaatccctttcctttttcccgtctatataagggaatgtcttccttcctatctatctgcaaaatggaaatctagacctccttcttcatccataagtggactgtgccagtacaatacatgcctcagcccccaagcctagaaggacctctagtctccttcctgtgtggaatcttccccactccatccctcccaagttgcctgtattgataatgtactcactcatgctgtactaggtgctgaagcctggacacccttggtgggtgggcctgtggtgatggtttgcatccttcctcctttgtcccaataaagtatgggagttg

SEQ ID NO: 178562 - DNA, 934 bp, Homo sapiens
  Payload ID: 15193
  Gene Symbol: RUSC1
  Gene Name: RUN and SH3 domain containing 1
  ENST ID: ENST00000489860
  CDS Start-End: 138-934
cgggatgaagagggcaccctccgccaagaggctgctgcgggacccgggtttcccctttccggcgccttccagcctcccaatcctcggtccgtagttcgtggtccttcgccggtgtccccggagcccagcggctgtggatggcagaagcccagagtgggactggtcagctgcaggagcagaagaaaggtcttctgatagccgtcagcgtctccgttgataaaatcatctcgcatttcggggccgcccggaacttggtgcagaaggcccagttgggtgatagccggctgagcccggatgtggggcacctggtgctgaccaccctctgcccggccctccacgccctggtggcggacgggctgaagcctttccggaaggacctcatcaccgggcagcgcaggagcagcccctggagcgtggtggaggcgtcggtgaagccaggctccagcacccgctcccttggaaccctgtatagccaggtcagccgtctagccccgctgagcagcagccgtagccgcttccatgcctttatcctgggcctcctcaacaccaagcagttggagctgtggttttccagtctccaggaagatgcaggcctgctctccctcctgtacctgccaacaggatttttctccctggcccgcggtggttgtccctccctgtccacagagctgctgctcctgctgcagccattgtcggtgctcactttccacctggacctgctctttgagcaccaccaccacctgcccctgggcccacctcaggcccctgcccctccaggcccacctccagctctgcagcagactatgcaagccatgctgcactttgggggccggctggcccagagccttcgggggacttccaaggaagctgcttcagacccctctgactctccaaaccttcccacaccagggagctggtgggagcagttgaccca

SEQ ID NO: 178563 - DNA, 1156 bp, Homo sapiens
  Payload ID: 15193
  Gene Symbol: RUSC1
  Gene Name: RUN and SH3 domain containing 1
  ENST ID: ENST00000497930
  CDS Start-End: 254-1156
ccggcgccgggctgcggctgctgggggcgccgagccccccagaggagcagctgctgcccgtccgcctgtccccggtgggagcctattcgcctccgactcggggagccttgccctgcctggccagccccgagctggcactgctgctgtccccgctctttcccagaagtagcaccttccccgccgcggctcccccaccccgccagtccgtagttcgtggtccttcgccggtgtccccggagcccagcggctgtggatggcagaagcccagagtgggactggtcagctgcaggagcagaagaaaggtcttctgatagccgtcagcgtctccgttgataaaatcatctcgcatttcggggccgcccggaacttggtgcagaaggcccagttgggtgatagccggctgagcccggatgtggggcacctggtgctgaccaccctctgcccggccctccacgccctggtggcggacgggctgaagcctttccggaaggacctcatcaccgggcagcgcaggagcagcccctggagcgtggtggaggcgtcggtgaagccaggctccagcacccgctcccttggaaccctgtatagccaggtcagccgtctagccccgctgagcagcagccgtagccgcttccatgcctttatcctgggcctcctcaacaccaagcagttggagctgtggttttccagtctccaggaagatgcaggcctgctctccctcctgtacctgccaacaggatttttctccctggcccgcggtggttgtccctccctgtccacagagctgctgctcctgctgcagccattgtcggtgctcactttccacctggacctgctctttgagcaccaccaccacctgcccctgggcccacctcaggcccctgcccctccaggcccacctccagctctgcagcagactatgcaagccatgctgcactttgggggccggctggcccagagccttcgggggacttccaaggaagctgcttcagacccctctgactctccaaaccttcccacaccagggagctggtgggagcagttgacccaggcctcccgggtctatgcctctgggggcactgagggctttcctctttcccgatgggcaccggggcgtcatgggactgcagctgaagaaggtgcacaggagagaccc

SEQ ID NO: 178564 - DNA, 930 bp, Homo sapiens
  Payload ID: 15193
  Gene Symbol: RUSC1
  Gene Name: RUN and SH3 domain containing 1
  ENST ID: ENST00000479924
  CDS Start-End: 116-930
gccctagcagggcaggcgggaggtgagcgcggccatcccgctcccggagttccgggatcctggagtccgtagttcgtggtccttcgccggtgtccccggagcccagcggctgtggatggcagaagcccagagtgggactggtcagctgcaggagcagaagaaaggtcttctgatagccgtcagcgtctccgttgataaaatcatctcgcatttcggggccgcccggaacttggtgcagaaggcccagttgggtgatagccggctgagcccggatgtggggcacctggtgctgaccaccctctgcccggccctccacgccctggtggcggacgggctgaagcctttccggaaggacctcatcaccgggcagcgcaggagcagcccctggagcgtggtggaggcgtcggtgaagccaggctccagcacccgctcccttggaaccctgtatagccaggtcagccgtctagccccgctgagcagcagccgtagccgcttccatgcctttatcctgggcctcctcaacaccaagcagttggagctgtggttttccagtctccaggaagatgcagggagctggtgggagcagttgacccaggcctcccgggtctatgcctctgggggcactgagggctttcctctttcccgatgggcaccggggcgtcatgggactgcagctgaagaaggtgcacaggagagacccctgcccacagatgagatggcaccaggcaggggcctctggttgggaagactatttggagtgcctgggggccccgcagaaaatgagaatggagccctaaagtccaggagaccatctagctggctgcccccgacagtgagtgtgttggctcttgtgaagcggggggcacctcccgagatgccttctcctcaggagcttgaggcctcagcacccaggatggtgcaaacccatag

SEQ ID NO: 178565 - DNA, 676 bp, Homo sapiens
  Payload ID: 15193
  Gene Symbol: RUSC1
  Gene Name: RUN and SH3 domain containing 1
  ENST ID: ENST00000485924
  CDS Start-End: 1-676
gctccagcacccgctcccttggaaccctgtatagccaggtcagccgtctagccccgctgagcagcagccgtagccgcttccatgcctttatcctgggcctcctcaacaccaagcagttggagctgtggttttccagtctccaggaagatgcaggatttttctccctggcccgcggtggttgtccctccctgtccacagagctgctgctcctgctgcagccattgtcggtgctcactttccacctggacctgctctttgagcaccaccaccacctgcccctgggcccacctcaggcccctgcccctccaggcccacctccagctctgcagcagactatgcaagccatgctgcactttgggggccggctggcccagagccttcgggggacttccaaggaagctgcttcagacccctctgactctccaaaccttcccacaccagggagctggtgggagcagttgacccaggcctcccgggtctatgcctctgggggcactgagggctttcctctttcccgatgggcaccggggcgtcatgggactgcagctgaagaaggtgcacaggagagacccctgcccacagatgagatggcaccaggcaggggcctctggttgggaagactatttggagtgcctgggggccccgcagaaaatgagaatggagccctaaagtccag

SEQ ID NO: 178566 - DNA, 682 bp, Homo sapiens
  Payload ID: 15193
  Gene Symbol: RUSC1
  Gene Name: RUN and SH3 domain containing 1
  ENST ID: ENST00000468764
  CDS Start-End: 112-429
tagcagggcaggcgggaggtgagcgcggccatcccgctcccggagttccgggatcctggagtccgtagttcgtggtccttcgccggtgtccccggagcccagcggctgtggatggcagaagcccagagtgggactggtcagctgcaggagcagaagaaaggtcttctgatagccgtcagcgtctccgttgataaaatcatctcgcatttcggggccgcccggaacttggtgcagaaggcccagttgggtgatagccggctgagcccggatgtggggcacctggtgctgaccaccctctgcccggccctccacgccctggtggcggacgggctgaagcctttccggaaggacctcatcaccgggcagcgcaggagcagcccctggagcgtggtggaggcgtcggtgaagccagccaggtcagccgtctagccccgctgagcagcagccgtagccgcttccatgcctttatcctgggcctcctcaacaccaagcagttggagctgtggttttccagtctccaggaagatgcaggcctgctctccctcctgtacctgccaacaggatttttctccctggcccgcggtggttgtccctccctgtccacagagctgctgctcctgctgcagccattgtcggtgctcactttccacctggacctgctctttgagcaccaccaccacct

SEQ ID NO: 178567 - DNA, 1749 bp, Homo sapiens
  Payload ID: 15193
  Gene Symbol: RUSC1
  Gene Name: RUN and SH3 domain containing 1
  ENST ID: ENST00000471876
  CDS Start-End: 823-1206
cgggaggtgagcgcggccatcccgctcccggagttccgggatcctggaggtgggggctgtgccctgagggagggcacagggaaccgggatggggctgggggacagcgagtgctgggaagtgtgcgagatttcactccggggctcgggtcgagctaccccgtgcttcaggcggtcctgcgcctcctctccccaagacccttcggggacacagcactgcagacccgccggagacaacttgtgcgggagcccggagtcctcggaataacacttggtcttctgatagccgtcagcgtctccgttgataaaatcatctcgcatttcggggccgcccggaacttggtgcagaaggcccagttgggtgatagccggctgagcccggatgtggggcacctggtgctgaccaccctctgcccggccctccacgccctggtggcggacgggctgaagcctttccggaaggacctcatcaccgggcagcgcaggagcagcccctggagcgtggtggaggcgtcggtgaagccaggctccagcacccgctcccttggaaccctgtatagccaggtcagccgtctagccccgctgagcagcagccgtagccgcttccatgcctttatcctgggcctcctcaacaccaagcagttggagctgtggttttccagtctccaggaagatgcagggagctggtgggagcagttgacccaggcctcccgggtctatgcctctgggggcactgagggctttcctctttcccgatgggcaccggggcgtcatgggactgcagctgaagaaggtgcacaggagagacccctgcccacagatgagatggcaccaggcaggggcctctggttgggaagactatttggagtgcctgggggccccgcagaaaatgagaatggagccctaaagtccaggagaccatctagctggctgcccccgacagtgagtgtgttggctcttgtgaagcggggggcacctcccgagatgccttctcctcaggagcttgaggcctcagcacccaggatggtgcaaacccatagggcagtgcgggctctctgtgatcacactgctgcaagacctgaccagttgagcttccggcgtggggaagtgctgcgtgtcatcaccacagtggatgaggactggctccgctgtgggcgggatggcatggagggtctggtgcctgtggggtatacctcccttgttctgtagccctgggaccctttcctgcgtatgtgtctccttcctgtcacctgggaatggaatggccagtgaacaccatcccagaagcattttccctctgcaaaatgacgtttcttcccacgtctgtttctgctaatatttaaaataaactttccttcttccctcctatacccacctgtaaggtgaaatctgctcttcttccaaatatataaaaaaggaattgccctccaggtaatccctttcctttttcccgtctatataagggaatgtcttccttcctatctatctgcaaaatggaaatctagacctccttcttcatccataagtggactgtgccagtacaatacatgcctcagcccccaagcctagaaggacctctagtctccttcctgtgtggaatcttccccactccatccctcccaagttgcctgtattgataatgtactcactcatgctgtactaggtgctgaagcctggacacccttggtgggtgggcctgtggtgatggtttgcatccttcctcctttgtcccaataaagtatgggagttgaa

SEQ ID NO: 178568 - DNA, 1700 bp, Homo sapiens
  Payload ID: 15193
  Gene Symbol: RUSC1
  Gene Name: RUN and SH3 domain containing 1
  ENST ID: ENST00000490373
  CDS Start-End: 906-1541
ggccctagcagggcaggcgggaggtgagcgcggccatcccgctcccggagttccgggatcctggaggtgggggctgtgccctgagggagggcacagggaaccgggatggggctgggggacagcgagtgctgggaagtgtgcgagatttcactccggggctcgggtcgagctaccccgtgcttcaggcggtcctgcgcctcctctccccaagacccttcggggacacagcactgcagacccgccggagacaacttgtgcgggagcccggagtcctcggaataacacttggtcttctgatagccgtcagcgtctccgttgataaaatcatctcgcatttcggggccgcccggaacttggtgcagaaggcccagttgggtgatagccggctgagcccggatgtggggcacctggtgctgaccaccctctgcccggccctccacgccctggtggcggacgggctgaagcctttccggaaggacctcatcaccgggcagcgcaggagcagcccctggagcgtggtggaggcgtcggtgaagccaggctccagcacccgctcccttggaaccctgtatagccaggtcagccgtctagccccgctgagcagcagccgtagccgcttccatgcctttatcctgggcctcctcaacaccaagcagttggagctgtggttttccagtctccaggaagatgcaggcctgctctccctcctgtacctgccaacaggatttttctccctggcccgcggtggttgtccctccctgtccacagagctgctgctcctgctgcagccattgtcggtgctcactttccacctggacctgctctttgagcaccaccaccacctgcccctgggcccacctcaggcccctgcccctccaggcccacctccagctctgcagcagactatgcaagccatgctgcactttgggggccggctggcccagagccttcgggggacttccaaggaagctgcttcagacccctctgactctccaaaccttcccacaccagggagctggtgggagcagttgacccaggcctcccgggtctatgcctctgggggcactgagggctttcctctttcccgatgggcaccggggcgtcatgggactgcagctgaagaaggtgcacaggagagacccctgcccacagatgagatggcaccaggcaggggcctctggttgggaagactatttggagtgcctgggggccccgcagaaaatgagaatggagccctaaagtccaggagaccatctagctggctgcccccgacagtgagtgtgttggctcttgtgaagcggggggcacctcccgagatgccttctcctcaggagcttgaggcctcagcacccaggatggtgcaaacccatagggcagtgcgggctctctgtgatcacactgctgcaagacctgaccagttgagcttccggcgtggggaagtgctgcgtgtcatcaccacagtggatgaggactggctccgctgtgggcgggatggcatggagggtctggtgcctgtggggtatacctcccttgttctgtagccctgggaccctttcctgcgtatgtgtctccttcctgtcacctgggaatggaatggccagtgaacaccatcccagaagcattttccctctgcaaaatgacgtttcttcccacgtctgtttctgctaatatttaaaataaactttccttcttccctccta

SEQ ID NO: 178569 - DNA, 5199 bp, Homo sapiens
  Payload ID: 15194
  Gene Symbol: RUSC2
  Gene Name: RUN and SH3 domain containing 2
  Uniprot ID: Q8N2Y8
  ENST ID: ENST00000361226
  CDS Start-End: 139-4689
gccgccgccgccggcgcggaaggacgaggctgaggcgagaaacgaggtgccaagctctcctgatgaaatgtgttctgccccactgggctccagggacagtgtctggtgctgttgaagcccttattcgaactttccagaatggatagtcccccaaagctgactggagagaccctcatcgttcatcacatccccctggtgcactgccaagtcccagacaggcagtgctgtggaggggcaggtggaggtggtgggagcacaagacctaatcccttctgcccacctgagctgggcatcacccagcccgatcaagacctaggacaagctgactccctgctattcagcagcctgcactctactccaggaggaactgcacggtctatagacagcaccaagagtaggagtcgggatggaagaggccctggagcccccaaacgacacaaccccttcttgctgcaggagggtgtgggtgagccaggacttggtgacctgtatgatgacagcattggtgacagtgccacccagcagtccttccacctgcatggcactggccagcccaactttcatctatcctctttccagctgccaccatctggccccagagtgggcaggccatgggggacaacacgcagtcgggctggagtggtggaagggcaggaacaggagccagtgatgaccttggatactcagcagtgcggcaccagccactgctgccggccagagctggaagcagagactatggagctggatgagtgtgggggacctggtgggagtggcagtgggggtggagccagcgatacctctggcttttcctttgaccaggaatggaagctcagttcagatgaatccccaaggaaccctggatgctccggctcaggggaccagcactgccgctgcagtagcacatccagtcagtccgaggcagctgaccagtccatgggctatgtgagcgactcctcctgcaacagttcagatggtgtgctggtcaccttcagcaccctctacaacaagatgcatggcaccccccgtgccaatctcaactctgccccacagtcctgcagcgactcttccttctgcagccactcagaccctggcgccttctatctggatctgcagccctccccatttgagtctaagatgtcttatgagtcccatcaccctgaaagtggaggaagggaagggggctatggttgccctcatgcctcttctcctgagcttgatgccaactgcaactcctaccgcccacactgtgagccgtgcccagcagtggctgacctcacagcctgcttccaaagccaggcccgtcttgttgtggccacacaaaattactataaacttgtcacctgtgacctatcttcccaatcatccccaagccctgctggctcttccatcactagctgctctgaggaacacaccaagataagtcccccaccaggccctggcccagacccaggccccagccagccctctgagtattacctattccagaagccagaagtccagccagaggaacaagaagcagtgagttcctccacccaagcagcagctgctgtgggccccactgtgcttgagggacaagtatacacgaatacttcaccccccaacctcagcactggacgtcagcgctcccgcagctatgatcgcagcctgcagcgcagccctcctgtccgcctgggctcgctggaacgtatgttgagttgcccagtgcgcttgagtgagggccctgcagccatggccgggcctggctccccacccaggagggtcacctcctttgccgagctggccaagggccggaagaaaactggaggctctggctcgcccccacttcgtgtgagtgttggggactcctcccaggagttctcacccatccaagaagcccagcaagatcggggggccccactggatgagggcacttgctgtagccatagcctgccacccatgcctttggggccaggcatggacctacttggcccagacccaagtccaccctggtccacccaggtctgtcagggaccccactccagtgagatgcctcctgctggcctcagagctactgggcaaggccccctggctcagctgatggatccagggcctgctctcccagggagcccagccaacagccatacccagagggatgcaagagctagagctgacgggggtggcaccgagagccgaccagtccttcgctacagcaaggaacagaggccaaccacactgcccatccagcccttcgtgttccagcaccacttccccaagcagctggccaaggcccgggccctccacagcctttcccagctctacagcctctcaggctgcagccgtacacagcagcctgccccactggctgcccctgctgctcaagtctcagtcccagctccctcaggggaaccgcaggcatccactccccgagccactggcagaggtgccaggaaagctgggtctgagccagagacctctcggccatcgcccctgggcagctactcccccatccggagtgttggcccctttgggcccagcactgactcttctgcctccacttcgtgctcccctcccccagagcagcccacagccacagaaagcctgcccccatggagccactcctgtccttctgctgtccggcctgccacctcccagcagccgcagaaggaggatcagaagatactgaccttgactgagtaccggctccatggaacaggaagcttgccgcctctgggctcctggcgatctggcctcagccgagcagagagcctggcccggggaggtggtgagggcagcatggccaccaggcccagtaatgccaaccacctatcccctcaagccctcaagtggcgggaatacaggaggaagaacccactagggccacctggtttgtcagggagcctagaccgaagatcacaagaagctcggctggcccgaagaaaccctatctttgagttccctggctccctcagtgctgccagccatctgaactgccggctgaatggccaagcagtgaagccgttaccactgacctgccctgacttccaggaccccttttccttgacggagaagcctccagctgagttttgtctgtccccagatggcagctcagaggccatttccattgacctgcttcagaaaaaagggctggtaaaagctgttaacatcgctgtggacctcattgtggctcattttggcacaagccgggatcccggggtgaaggcaaagctgggaaacagttctgtgagccccaatgtgggccacctggttctgaagtacttgtgccctgccgtccgcgccgtgctggaggatgggctcaaggcctttgtactggacgtcatcatcgggcagcgtaagaacatgccatggagtgtggttgaggcttccacacagctaggcccatccaccaaggtcctgcatggcctctacaacaaagtcagccaattcccagagctcaccagtcataccatgcgcttcaacgccttcatcctcggcctgctcaacatccggtccctggagttctggtttaatcacctctataaccacgaagacatcatccagacccactaccagccctggggcttcctgagtgcagctcataccgtgtgtcccggcctctttgaagagctgctgctgctgctacagcccctggccctgctgcccttcagcctcgacttgctgttccagcaccggctgctgcaaagtgggcagcagcagcggcagcacaaggaactgctgcgggtgtcccaggacctgctgctgtctgcccactccacgctgcagctggcccgggcccggggccaggagggccctggagacgtggacagggcagcccaaggggagcgggtgaagggtgtgggtgcctcagaaggtggagaagaggaagaggaagaagaggagacagaagaggtggcagaggcagccgggggctcagggcgtgccaggtgggcccgaggtgggcaggccggctggtggtaccagctcatgcagagctcccaggtctacatcgatggctccattgagggttccaggttccctcgtggtagcagcaacagcagcagcgagaaaaagaaaggggcaggaggtgggggacctccccaggctccaccaccccgagagggagtagtggagggggctgaggcctgccctgcctctgaggaggccctgggccgggaaaggggctggcccttctggatggggagcccccctgactctgtgctggccgagctgaggcgcagtcgggagagggaagggcccgctgcctcgccagcagaaaatgaggaaggggcctcagagccttcacctggaggcatcaagtggggacacctctttggctcccgaaaagcccagcgggaggcccggcccacaaataggctcccctcggactggctgagcctggacaagtccatgttccaactagtggcgcagacagtgggttcccgccgggagccagagcccaaggagagcctgcaggagccacactccccagccctgccctccagtcctccgtgtgaggtgcaggcactgtgccaccacctggccaccggccctggacagctgagcttccacaaaggagacatcctacgagtgctggggcgagctggaggagactggctgcgctgcagccgtggccccgactctggcctggtgcccctggcctacgtgacattgaccccaactccaagtccaacccctggaagcagccaaaactgaggccctgtgcatgctggtggcctcagggaccctcataacccccagactcagagcccgagagcccttcccaagccattggcttggctgcagagtagactgagagctggggccacgtatccctgtgctggcacctgctccctgtgctcagtattaattacgcccccttaactgtcccagtgaccttgtccagacctccacccaggagagggatgggacacagcactgggctgccaggattcccctggcccgtctgggccaacccttccatgggtgaagacaagcaagtccccctggaggcgggtggcccagaaagccatctacagggttccctaggccaggtggagatgaggatgggtaacagtattggggccagatccctaagccccccagctgtaaataggctgtggccagtgcctggtcatcagaagagggaggaggagcccaggcgtctgtttatgtatttatttatttatttattatacctattaataaaaaaggtgctcagcctcc

SEQ ID NO: 178570 - DNA, 5636 bp, Homo sapiens
  Payload ID: 15194
  Gene Symbol: RUSC2
  Gene Name: RUN and SH3 domain containing 2
  Uniprot ID: Q8N2Y8
  ENST ID: ENST00000455600
  CDS Start-End: 570-5120
atcttccctgagatgcctaaggacaaaagaggagctagacacaactctccccatttttcctttgctgtcttaagagtgctccatcttccagcactgactgccctctgtggctggctcctttctctaccctcccccttccctaggctaaagggcccacaggggctggaagggagggaggctgagtggctgtgctgtgggcctgcctgctcctttcccttcccccttcccttagcagcaacgtcaccgcagcaccagcagccgcggcagcagcacggagactggggctgggattgcgcagcctccctgcattagcaacgatgccattgtattagcagaaatcagatcttaggaaatcggcccagttcccctgtgtgatcccgtggaacagtgtctcagctggaactgtcgcggtagagcttggtcggagtgcaaaagggacagacgcatcaggggtccagctcaaggctcctgacagaggtgccaagctctcctgatgaaatgtgttctgccccactgggctccagggacagtgtctggtgctgttgaagcccttattcgaactttccagaatggatagtcccccaaagctgactggagagaccctcatcgttcatcacatccccctggtgcactgccaagtcccagacaggcagtgctgtggaggggcaggtggaggtggtgggagcacaagacctaatcccttctgcccacctgagctgggcatcacccagcccgatcaagacctaggacaagctgactccctgctattcagcagcctgcactctactccaggaggaactgcacggtctatagacagcaccaagagtaggagtcgggatggaagaggccctggagcccccaaacgacacaaccccttcttgctgcaggagggtgtgggtgagccaggacttggtgacctgtatgatgacagcattggtgacagtgccacccagcagtccttccacctgcatggcactggccagcccaactttcatctatcctctttccagctgccaccatctggccccagagtgggcaggccatgggggacaacacgcagtcgggctggagtggtggaagggcaggaacaggagccagtgatgaccttggatactcagcagtgcggcaccagccactgctgccggccagagctggaagcagagactatggagctggatgagtgtgggggacctggtgggagtggcagtgggggtggagccagcgatacctctggcttttcctttgaccaggaatggaagctcagttcagatgaatccccaaggaaccctggatgctccggctcaggggaccagcactgccgctgcagtagcacatccagtcagtccgaggcagctgaccagtccatgggctatgtgagcgactcctcctgcaacagttcagatggtgtgctggtcaccttcagcaccctctacaacaagatgcatggcaccccccgtgccaatctcaactctgccccacagtcctgcagcgactcttccttctgcagccactcagaccctggcgccttctatctggatctgcagccctccccatttgagtctaagatgtcttatgagtcccatcaccctgaaagtggaggaagggaagggggctatggttgccctcatgcctcttctcctgagcttgatgccaactgcaactcctaccgcccacactgtgagccgtgcccagcagtggctgacctcacagcctgcttccaaagccaggcccgtcttgttgtggccacacaaaattactataaacttgtcacctgtgacctatcttcccaatcatccccaagccctgctggctcttccatcactagctgctctgaggaacacaccaagataagtcccccaccaggccctggcccagacccaggccccagccagccctctgagtattacctattccagaagccagaagtccagccagaggaacaagaagcagtgagttcctccacccaagcagcagctgctgtgggccccactgtgcttgagggacaagtatacacgaatacttcaccccccaacctcagcactggacgtcagcgctcccgcagctatgatcgcagcctgcagcgcagccctcctgtccgcctgggctcgctggaacgtatgttgagttgcccagtgcgcttgagtgagggccctgcagccatggccgggcctggctccccacccaggagggtcacctcctttgccgagctggccaagggccggaagaaaactggaggctctggctcgcccccacttcgtgtgagtgttggggactcctcccaggagttctcacccatccaagaagcccagcaagatcggggggccccactggatgagggcacttgctgtagccatagcctgccacccatgcctttggggccaggcatggacctacttggcccagacccaagtccaccctggtccacccaggtctgtcagggaccccactccagtgagatgcctcctgctggcctcagagctactgggcaaggccccctggctcagctgatggatccagggcctgctctcccagggagcccagccaacagccatacccagagggatgcaagagctagagctgacgggggtggcaccgagagccgaccagtccttcgctacagcaaggaacagaggccaaccacactgcccatccagcccttcgtgttccagcaccacttccccaagcagctggccaaggcccgggccctccacagcctttcccagctctacagcctctcaggctgcagccgtacacagcagcctgccccactggctgcccctgctgctcaagtctcagtcccagctccctcaggggaaccgcaggcatccactccccgagccactggcagaggtgccaggaaagctgggtctgagccagagacctctcggccatcgcccctgggcagctactcccccatccggagtgttggcccctttgggcccagcactgactcttctgcctccacttcgtgctcccctcccccagagcagcccacagccacagaaagcctgcccccatggagccactcctgtccttctgctgtccggcctgccacctcccagcagccgcagaaggaggatcagaagatactgaccttgactgagtaccggctccatggaacaggaagcttgccgcctctgggctcctggcgatctggcctcagccgagcagagagcctggcccggggaggtggtgagggcagcatggccaccaggcccagtaatgccaaccacctatcccctcaagccctcaagtggcgggaatacaggaggaagaacccactagggccacctggtttgtcagggagcctagaccgaagatcacaagaagctcggctggcccgaagaaaccctatctttgagttccctggctccctcagtgctgccagccatctgaactgccggctgaatggccaagcagtgaagccgttaccactgacctgccctgacttccaggaccccttttccttgacggagaagcctccagctgagttttgtctgtccccagatggcagctcagaggccatttccattgacctgcttcagaaaaaagggctggtaaaagctgttaacatcgctgtggacctcattgtggctcattttggcacaagccgggatcccggggtgaaggcaaagctgggaaacagttctgtgagccccaatgtgggccacctggttctgaagtacttgtgccctgccgtccgcgccgtgctggaggatgggctcaaggcctttgtactggacgtcatcatcgggcagcgtaagaacatgccatggagtgtggttgaggcttccacacagctaggcccatccaccaaggtcctgcatggcctctacaacaaagtcagccaattcccagagctcaccagtcataccatgcgcttcaacgccttcatcctcggcctgctcaacatccggtccctggagttctggtttaatcacctctataaccacgaagacatcatccagacccactaccagccctggggcttcctgagtgcagctcataccgtgtgtcccggcctctttgaagagctgctgctgctgctacagcccctggccctgctgcccttcagcctcgacttgctgttccagcaccggctgctgcaaagtgggcagcagcagcggcagcacaaggaactgctgcgggtgtcccaggacctgctgctgtctgcccactccacgctgcagctggcccgggcccggggccaggagggccctggagacgtggacagggcagcccaaggggagcgggtgaagggtgtgggtgcctcagaaggtggagaagaggaagaggaagaagaggagacagaagaggtggcagaggcagccgggggctcagggcgtgccaggtgggcccgaggtgggcaggccggctggtggtaccagctcatgcagagctcccaggtctacatcgatggctccattgagggttccaggttccctcgtggtagcagcaacagcagcagcgagaaaaagaaaggggcaggaggtgggggacctccccaggctccaccaccccgagagggagtagtggagggggctgaggcctgccctgcctctgaggaggccctgggccgggaaaggggctggcccttctggatggggagcccccctgactctgtgctggccgagctgaggcgcagtcgggagagggaagggcccgctgcctcgccagcagaaaatgaggaaggggcctcagagccttcacctggaggcatcaagtggggacacctctttggctcccgaaaagcccagcgggaggcccggcccacaaataggctcccctcggactggctgagcctggacaagtccatgttccaactagtggcgcagacagtgggttcccgccgggagccagagcccaaggagagcctgcaggagccacactccccagccctgccctccagtcctccgtgtgaggtgcaggcactgtgccaccacctggccaccggccctggacagctgagcttccacaaaggagacatcctacgagtgctggggcgagctggaggagactggctgcgctgcagccgtggccccgactctggcctggtgcccctggcctacgtgacattgaccccaactccaagtccaacccctggaagcagccaaaactgaggccctgtgcatgctggtggcctcagggaccctcataacccccagactcagagcccgagagcccttcccaagccattggcttggctgcagagtagactgagagctggggccacgtatccctgtgctggcacctgctccctgtgctcagtattaattacgcccccttaactgtcccagtgaccttgtccagacctccacccaggagagggatgggacacagcactgggctgccaggattcccctggcccgtctgggccaacccttccatgggtgaagacaagcaagtccccctggaggcgggtggcccagaaagccatctacagggttccctaggccaggtggagatgaggatgggtaacagtattggggccagatccctaagccccccagctgtaaataggctgtggccagtgcctggtcatcagaagagggaggaggagcccaggcgtctgtttatgtatttatttatttatttattatacctattaataaaaaaggtgctcagcctccaaacca

SEQ ID NO: 178571 - DNA, 6955 bp, Homo sapiens
  Payload ID: 15195
  Gene Symbol: RUBCN
  Gene Name: RUN domain and cysteine-rich domain containing, Beclin 1-interacting protein
  Uniprot ID: Q92622
  ENST ID: ENST00000273582
  CDS Start-End: 547-3330
gagcagttcgactttccgcccaaactgggggatgctagaccgcgggcacctctgaatcttatgccttcagtgatataatcctccgtgtccttcgagtccctcctgctgcagacaggtcccctatacttcggtacacacgagcctttcgcgcccaccgcaacgcagcctcgggaggcaggacagacccctgcgagtgtagattgcagctgcatcccagctcccccctccctggcacgctcctccacctacagctgcgctgagctgccgcatctgaacgcaaagcaaacgctgcagtgacggttcctgcgtcaccttaactccaaagtaaatgctaacgtttcccgtgtctgtaccttctctcaatcggcactctcaaaacatctggcacggtgttcactaccctaataagacctcagcttccctcgggaggggagggagcactggcagttgctgggtaatttgaagacgacggtggagggtttggtatcaaccaacagccccaacgtctggtctaagtatggtggcttggagcggctttgcagggacatgcagagcatcctctatcacgggcttatccgtgaccaggcgtgccgccgccagacggattactggcagttcgtgaaagacatccggtggctcagtccccactcagcccttcacgtggagaagttcatcagcgtgcacgagaacgaccagagcagtgctgatggtgccagtgaacgtgctgttgccgagctgtggctgcagcacagcctgcagtaccactgcctctcagcccagctccggcccctgctcggggatagacagtatatcagaaaattctacacagatgctgccttcctgctaagtgacgctcatgtcacggccatgctgcagtgcctggaagcagtggaacagaacaacccccgcctcctggctcagatcgatgcgtccatgtttgccagaaagcacgagagcccgctcctggtgacaaagagccagagcctgacagccctgcccagttccacatacacccctccaaacagctatgctcagcattcctactttgggtccttctctagcctccaccaatccgtgcccaacaatggctcagagagaagatctacttcctttccactctctggccctccccggaaacctcaagaaagcagagggcacgtctcaccagcagaggatcaaaccatccaagcccccccagtttcagtctctgcactagccagggattcccctttgaccccaaatgaaatgagctccagtactctgaccagccccatagaggcatcctgggtcagcagccagaatgattccccaggtgatgccagtgaggggcctgagtacctggccattggcaacttggacccccgaggccggactgccagctgtcagagtcacagcagcaatgccgagagcagcagttccaatttgttctcctccagcagctcccagaagccagattctgctgcctcttccttaggggaccaggaaggaggtggggagagccagctgtccagtgtcctccgcaggtccagcttctcagaggggcagacactcactgtcaccagtggggcaaagaaaagccacattcgctcccattcggataccagcattgcctccaggggagctccaggaggccccaggaatatcaccattatagttgaagatcccattgcagaatcctgcaatgataaggcgaagttgagaggccctttgccctactctggtcaaagcagtgaagtcagcacacccagctctctgtacatggaatatgaaggtggtcggtacctgtgctcaggggaaggcatgttccgaagaccatcagaaggacagtccctcatcagctacctctctgagcaagacttcggcagctgtgccgacctggaaaaggagaatgcccacttcagcatctcagagtccttaattgctgccatcgagctaatgaagtgcaacatgatgagccagtgcctagaggaggaggaagtggaagaggaagacagtgatagagagatccaggagctgaagcagaagatccgccttcggcgccagcaaatccgcaccaagaacctgctccccatgtaccaggaggctgagcacggaagctttcgggtcacctccagcagctcccagttcagctcacgtgattcggcacagctctctgactctggctctgctgatgaggttgatgaatttgaaatccaagatgctgacatcagaaggaacacagcctcaagcagcaaatccttcgtttcctcccagtccttctcccactgcttcctgcactccacgtctgctgaggcggtggccatggggctcctgaagcagtttgaggggatgcagcttccagccgcctcggagctggagtggcttgtcccggagcatgatgcccctcagaagctcctgcccattcctgactcactgcccatctcaccggatgacgggcagcacgctgacatctacaagctgcggattcgtgttcgtggcaacttggagtgggccccgccccggcctcagataatttttaatgttcatccagccccaacgaggaaaattgccgtggccaagcagaattaccgctgtgcaggatgtggcatccggactgaccctgattacatcaagcgactgcggtactgtgagtacctgggcaagtacttctgccagtgctgccacgagaatgcccagatggccatccccagccgggttctgcgcaagtgggacttcagcaagtactacgtcagcaacttctccaaggacctgctcattaagatctggaatgatcctctcttcaacgtgcaggacataaacagtgccctctataggaaggtcaagctgctcaatcaagtccggctgctgcgggtccagctgtgtcacatgaagaacatgttcaagacttgccgactggccaaggagcttctggattcctttgacacagtcccaggccacctgacagaggacctccacctgtactcactgaatgacctgactgcgaccaggaagggggagctggggccccggcttgctgagctcaccagggcaggggctacccatgtggagagatgcatgctctgccaagccaaaggcttcatctgtgagttctgtcagaatgaggatgacatcatctttccctttgagctccataagtgccggacctgtgaagagtgtaaagcgtgttaccataaagcctgcttcaagtctggaagctgtccgcgctgcgagcggctgcaggcccggcgggaggcactggccaggcagagcctggagtcttacctgtcagactacgaggaggagcccgcggaagcgctggccctggaagccgccgtcctggaggccacctgaagaaagcacgtgcagccctccctccgggccgggtcacacctgttgcagaactgagccactctttgaaggactcgccccacctggggcttctttttttttttttttttttaattatcatcatctttttttttttttttactgacttgtctgacgtctgtgtgcagtcagccgtcggcaggttgatgggtccagagtctgtggtgacagataatttgtaaacaccaggtgtttccatcagaactgacatgcgggtccttcagtgaagcttctagtgcctctgtcagtggaagagacagcaagaccaagttcttccagcgtctgtggccttctcctctaggtttcacctgcatgtcaggtatcatttccaattttcctttgtttcagttctggagcttctgagccaggcctttctcaaccacctctcctgctgctgaaacggggatggcgttttccctctccctgtcctggactggggtcagactgtgccccgaggagaagcagcagagaataggactacgtcatgggcatttcgtccacttatttgggtattttgggggccacagaacaatcctgactatcctagactcctcagagacctcagaggcagctgtgaatgtccctatgttgccgggagttcctgtttgaaatatttgaagcatagaggatgccacaagctgactttcttcatctaccttggtgatcttgaagcaaagaacagaactgatgctcaggccaggctcacctgtagccttacgccgcaagcatacgtgaggcgccagctctgtcgctgaaggagcgcttactcagaggagcggtcggccccctcttggtgttaaggtctcttagttaacctggctttttggtgcaggtgtgatctttgaagctcaggcaggtccctgatgccatcctaaggtgaggacaggaacctcacccaccatcttcttagcgtgtccctgatgactctgtcctctgttagatggtcgttgtgcttctgagtaaaagtacaacccgactccgttctctccccttcctgcagcagagctgggtccttccctggtggccgagtctctcttgccttagcttctttggtcaaagttggagaaaagcttcctgctattagtgctgttacagaacttgacggtttgtggatgtgagtgtgaatgtccctgtgttcttgggataacaagagcctttatgccaattatgcacttaactctgtgtagcctggtaatgtttatctgttcatttgataatgctgattttagtgtgctgcccccctccccccgttaatgtgtgttgatggtgaagtccttttgataatgctgattttggtgtgctgcctcccccttcccccccgttaatgtgtgtgttgacagtgaagtccttgggtggggccatgtgtgtgtttgtgatgttccttaagttgatgcagcttctaacctctgtgaaaacactggtcagagtggcttctccaagagctggcagctctgtgaactaaagcctgcatcatttttgttctgggattgaattctgcccatgggcatgtcttctcatagttgcttgctggtaggaaagaaatgggcgtgggtgctgccctggaagctgagcggaaagttgcctgtggttggtggaagctgatgagagcttgagctggcggtaagaaggagtctcccagggaagtgggagaggcattaaggtgatggccagggctgaggctccaccagcgtgagagggaacatgtgggaactggcccctgcccttgattcctctgcctcaaagttgggatctgaaagccatgtagggctagaagaccctgaggctgttctcccttctgttcatagtgagactcaaaaagccaagtcccagaagttctgaagggctgtgactagaagtgcccaggtccttcagggagctttaagaatgaccccacagaactcaagtttaactaggggttaggtcccagattcagacccaggagtttataaaaatgagctctacttccagttttggtttaaattacacatccaggccaggcacagtggctcacacctgtaatcccagcactttgggaggccagtgcgggcggatcatgaggtcaggagtttgagaccagcctggccaatgtggtgaaaccctgtctcttccaaaaatacaaaaattagctgggcgtggtggcacacgcctgtaatcccagctacttgggaggctgaggcaggagaatcgcttgaacctgggaggcagaggttgcagtgagccgagattgcgccaccgcactccagcctgggtgacagagtgagactccgtctcaaaaaacaaaaaggtgacacatccagctctttctccaggtcactgcgctggaggacagatgtgccgtcttgtcctgcctgtttcacatcagcataggatcaaaggatgacaatgctgacagcttctgaagccgaactcaacagtctcataggctcctcacttgtcacttatttttccctagctccctcaaccgcaccccatccctttagatcgtgcgtctgttttagtgactctgacacgatgccgtcctcaccttccaaatacccagttatttattcaagaggggggaagtgggtagaggatgggatgttttggaagcactttgcaagttaccactatctgaaaatcccctgctgttgcggggagaagctttgaatgcactgaagagaattccttctaaatgaaggcaggtgatagtgttctttctgtaagtaaagggaaagaaaaaaaacatagtttgcttaccaggtggagacaagattcaagacatagcagaagagtggaagacaaatattttccacttaaatgaggctgtttttgacgttctctgccaaggatttagagctttcgttgaactaacataaaaggagtgcgagtcttagtagagatgttccgtgtgtgccgcccgtgctctgaactgcgtttccacctgctgtggtgcttgtgcagcctggcagttcattgtcatctttaataaactaaggaaataaaattctgtctttcgtcagcctgccttgactgtcaagaaatggcatgtgtccactgtaaagcaggtatatctgaacattgagaaggtttctgtgttataatgtaaagcaaactggaccacacacatcaaggaaagtgaggtggagtggctgtgtctctaacttgccatgagacctcgagcgaaccacttcacttctctgggtttctggtgcatggtgtaactgtcacttaaaatgaggtgtcttcctctccgcaacatctgacttgccttagatgcttcagttcccacttctgtgagcagctagcatctttctcttctgctcctggcccactggagctccagctctacgctgcaactctctcaacatttccccttaaatgtccccttgtcatctccaaccagtgtgtctaaaaccagcataaattccgtatttccaaaaacctaaccattagtcacccaggtttgaaaattaattgtcttcaacttcctctgtaagtggcacactgagctcatcacgcatcgtctcattcctactccctgtcatcaagttctgtggatgttttcctctaaaataaatctctcattacttttctgccactagcacacaaa

SEQ ID NO: 178572 - DNA, 2919 bp, Homo sapiens
  Payload ID: 15195
  Gene Symbol: RUBCN
  Gene Name: RUN domain and cysteine-rich domain containing, Beclin 1-interacting protein
  Uniprot ID: Q92622
  ENST ID: ENST00000296343
  CDS Start-End: 1-2919
atgcggccggagggcgcgggaatggagctcggaggcggcgaggagcgcctgcctgaggagagcaggagggagcactggcagttgctgggtaatttgaagacgacggtggagggtttggtatcaaccaacagccccaacgtctggtctaagtatggtggcttggagcggctttgcagggacatgcagagcatcctctatcacgggcttatccgtgaccaggcgtgccgccgccagacggattactggcagttcgtgaaagacatccggtggctcagtccccactcagcccttcacgtggagaagttcatcagcgtgcacgagaacgaccagagcagtgctgatggtgccagtgaacgtgctgttgccgagctgtggctgcagcacagcctgcagtaccactgcctctcagcccagctccggcccctgctcggggatagacagtatatcagaaaattctacacagatgctgccttcctgctaagtgacgctcatgtcacggccatgctgcagtgcctggaagcagtggaacagaacaacccccgcctcctggctcagatcgatgcgtccatgtttgccagaaagcacgagagcccgctcctggtgacaaagagccagagcctgacagccctgcccagttccacatacacccctccaaacagctatgctcagcattcctactttgggtccttctctagcctccaccaatccgtgcccaacaatggctcagagagaagatctacttcctttccactctctggccctccccggaaacctcaagaaagcagagggcacgtctcaccagcagaggatcaaaccatccaagcccccccagtttcagtctctgcactagccagggattcccctttgaccccaaatgaaatgagctccagtactctgaccagccccatagaggcatcctgggtcagcagccagaatgattccccaggtgatgccagtgaggggcctgagtacctggccattggcaacttggacccccgaggccggactgccagctgtcagagtcacagcagcaatgccgagagcagcagttccaatttgttctcctccagcagctcccagaagccagattctgctgcctcttccttaggggaccaggaaggaggtggggagagccagctgtccagtgtcctccgcaggtccagcttctcagaggggcagacactcactgtcaccagtggggcaaagaaaagccacattcgctcccattcggataccagcattgcctccaggggagctccagaatcctgcaatgataaggcgaagttgagaggccctttgccctactctggtcaaagcagtgaagtcagcacacccagctctctgtacatggaatatgaaggtggtcggtacctgtgctcaggggaaggcatgttccgaagaccatcagaaggacagtccctcatcagctacctctctgagcaagacttcggcagctgtgccgacctggaaaaggagaatgcccacttcagcatctcagagtccttaattgctgccatcgagctaatgaagtgcaacatgatgagccagtgcctagaggaggaggaagtggaagaggaagacagtgatagagagatccaggagctgaagcagaagatccgccttcggcgccagcaaatccgcaccaagaacctgctccccatgtaccaggaggctgagcacggaagctttcgggtcacctccagcagctcccagttcagctcacgtgattcggcacagctctctgactctggctctgctgatgaggttgatgaatttgaaatccaagatgctgacatcagaaggaacacagcctcaagcagcaaatccttcgtttcctcccagtccttctcccactgcttcctgcactccacgtctgctgaggcggtggccatggggctcctgaagcagtttgaggggatgcagcttccagccgcctcggagctggagtggcttgtcccggagcatgatgcccctcagaagctcctgcccattcctgactcactgcccatctcaccggatgacgggcagcacgctgacatctacaagctgcggattcgtgttcgtggcaacttggagtgggccccgccccggcctcagataatttttaatgttcatccagccccaacgaggaaaattgccgtggccaagcagaattaccgctgtgcaggatgtggcatccggactgaccctgattacatcaagcgactgcggtactgtgagtacctgggcaagtacttctgccagtgctgccacgagaatgcccagatggccatccccagccgggttctgcgcaagtgggacttcagcaagtactacgtcagcaacttctccaaggacctgctcattaagatctggaatgatcctctcttcaacgtgcaggacataaacagtgccctctataggaaggtcaagctgctcaatcaagtccggctgctgcgggtccagctgtgtcacatgaagaacatgttcaagacttgccgactggccaaggagcttctggattcctttgacacagtcccaggccacctgacagaggacctccacctgtactcactgaatgacctgactgcgaccaggaagggggagctggggccccggcttgctgagctcaccagggcaggggctacccatgtggagagatgcatgctctgccaagccaaaggcttcatctgtgagttctgtcagaatgaggatgacatcatctttccctttgagctccataagtgccggacctgtgaagagtgtaaagcgtgttaccataaagcctgcttcaagtctggaagctgtccgcgctgcgagcggctgcaggcccggcgggaggcactggccaggcagagcctggagtcttacctgtcagactacgaggaggagcccgcggaagcgctggccctggaagccgccgtcctggaggccacctga

SEQ ID NO: 178573 - DNA, 1603 bp, Homo sapiens
  Payload ID: 15195
  Gene Symbol: RUBCN
  Gene Name: RUN domain and cysteine-rich domain containing, Beclin 1-interacting protein
  ENST ID: ENST00000449205
  CDS Start-End: 190-1497
gggggtggccgggatagaagccgcagcccaggcggcggtccctcccgctgtcgccgcccgggtgtagcgcatcacccggagcccaccggccgcaggtgcctcctccggccccagggggccccgggagccctgaagggcgaagcggcagggacgcctctcttgggcgaagaggcggcctcaccgccccggatgcggccggagggcgcgggaatggagctcggaggcggcgaggagcgcctgcctgaggagagcaggagggagcactggcagttgctgggtaatttgaagacgacggtggagggtttggtatcaaccaacagccccaacgtctggtctaagtatggtggcttggagcggctttgcagggacatgcagagcatcctctatcacgggcttatccgtgaccaggcgtgccgccgccagacggattactggcagttcgtgaaagacatccggtggctcagtccccactcagcccttcacgtggagaagttcatcagcgtgcacgagaacgaccagagcagtgctgatggtgccagtgaacgtgctgttgccgagctgtggctgcagcacagcctgcagtaccactgcctctcagcccagctccggcccctgctcggggatagacagtatatcagaaaattctacacagatgctgccttcctgctaagtgacgctcatgtcacggccatgctgcagtgcctggaagcagtggaacagaacaacccccgcctcctggctcagatcgatgcgtccatgtttgccagaaagcacgagagcccgctcctggtgacaaagagccagagcctgacagccctgcccagttccacatacacccctccaaacagctatgctcagcattcctactttgggtccttctctagcctccaccaatccgtgcccaacaatggctcagagagaagatctacttcctttccactctctggccctccccggaaacctcaagaaagcagagggcacgtctcaccagcagaggatcaaaccatccaagcccccccagtttcagtctctgcactagccagggattcccctttgaccccaaatgaaatgagctccagtactctgaccagccccatagaggcatcctgggtcagcagccagaatgattccccaggtgatgccagtgaggggcctgagtacctggccattggcaacttggacccccgaggccggactgccagctgtcagagtcacagcagcaatgccgagagcagcagttccaatttgttctcctccagcagctcccagaagccagattctgctgcctcttccttaggggaccaggaaggaggtggggagagccagctgtccagtgtcctccgcaggtccagcttctcagaggggcagacactcactgtcaccagtggggcaaagaaaagccacattcgctcccattcggataccagcattgcctccaggggagctccaggtaatgaggaacaccggctgctagttagcaagatgaccctgaattgagagtaagagagggcttgttatggggacttttcaggtggcagaaagagatgttctgtttctggtgatacaacatcttattttgtaatgaaagaagtttataacgaaa

SEQ ID NO: 178574 - DNA, 3801 bp, Homo sapiens
  Payload ID: 15195
  Gene Symbol: RUBCN
  Gene Name: RUN domain and cysteine-rich domain containing, Beclin 1-interacting protein
  ENST ID: ENST00000413360
  CDS Start-End: 1-2803
gagggagcactggcagttgctgggtaatttgaagacgacggtggagggtttggtatcaaccaacagccccaacgtctggtctaagtatggtggcttggagcggctttgcagggacatgcagagcatcctctatcacgggcttatccgtgaccaggcgtgccgccgccagacggattactggcagttcgtgaaagacatccggtggctcagtccccactcagcccttcacgtggagaagttcatcagcgtgcacgagaacgaccagagcagtgctgatggtgccagtgaacgtgctgttgccgagctgtggctgcagcacagcctgcagtaccactgcctctcagcccagctccggcccctgctcggggatagacagtatatcagaaaattctacacagatgctgccttcctgctaagtgacgctcatgtcacggccatgctgcagtgcctggaagcagtggaacagaacaacccccgcctcctggctcagatcgatgcgtccatgtttgccagaaagcacgagagcccgctcctggtgacaaagagccagagcctgacagccctgcccagttccacatacacccctccaaacagctatgctcagcattcctactttgggtccttctctagcctccaccaatccgtgcccaacaatggctcagagagaagatctacttcctttccactctctggccctccccggaaacctcaagaaagcagagggcacgtctcaccagcagaggatcaaaccatccaagcccccccagtttcagtctctgcactagccagggattcccctttgaccccaaatgaaatgagctccagtactctgaccagccccatagaggcatcctgggtcagcagccagaatgattccccaggtgatgccagtgaggggcctgagtacctggccattggcaacttggacccccgaggccggactgccagctgtcagagtcacagcagcaatgccgagagcagcagttccaatttgttctcctccagcagctcccagaagccagattctgctgcctcttccttaggggaccaggaaggaggtggggagagccagctgtccagtgtcctccgcaggtccagcttctcagaggggcagacactcactgtcaccagtggggcaaagaaaagccacattcgctcccattcggataccagcattgcctccaggggagctccaggaggccccaggaatatcaccattatagttgaagatcccattgcagaaggtggtcggtacctgtgctcaggggaaggcatgttccgaagaccatcagaaggacagtccctcatcagctacctctctgagcaagacttcggcagctgtgccgacctggaaaaggagaatgcccacttcagcatctcagagtccttaattgctgccatcgagctaatgaagtgcaacatgatgagccagtgcctagaggaggaggaagtggaagaggaagacagtgatagagagatccaggagctgaagcagaagatccgccttcggcgccagcaaatccgcaccaagaacctgctccccatgtaccaggaggctgagcacggaagctttcgggtcacctccagcagctcccagttcagctcacgtgattcggcacagctctctgactctggctctgctgatgaggttgatgaatttgaaatccaagatgctgacatcagaaggaacacagcctcaagcagcaaatccttcgtttcctcccagtccttctcccactgcttcctgcactccacgtctgctgaggcggtggccatggggctcctgaagcagtttgaggggatgcagcttccagccgcctcggagctggagtggcttgtcccggagcatgatgcccctcagaagctcctgcccattcctgactcactgcccatctcaccggatgacgggcagcacgctgacatctacaagctgcggattcgtgttcgtggcaacttggagtgggccccgccccggcctcagataatttttaatgttcatccagccccaacgaggaaaattgccgtggccaagcagaattaccgctgtgcaggatgtggcatccggactgaccctgattacatcaagcgactgcggtactgtgagtacctgggcaagtacttctgccagtgctgccacgagaatgcccagatggccatccccagccgggttctgcgcaagtgggacttcagcaagtactacgtcagcaacttctccaaggacctgctcattaagatctggaatgatcctctcttcaacgtgcaggacataaacagtgccctctataggaaggtcaagctgctcaatcaagtccggctgctgcgggtccagctgtgtcacatgaagaacatgttcaagacttgccgactggccaaggagcttctggattcctttgacacagtcccaggccacctgacagaggacctccacctgtactcactgaatgacctgactgcgaccaggaagggggagctggggccccggcttgctgagctcaccagggcaggggctacccatgtggagagatgcatgctctgccaagccaaaggcttcatctgtgagttctgtcagaatgaggatgacatcatctttccctttgagctccataagtgccggacctgtgaagagtgtaaagcgtgttaccataaagcctgcttcaagtctggaagctgtccgcgctgcgagcggctgcaggcccggcgggaggcactggccaggcagagcctggagtcttacctgtcagactacgaggaggagcccgcggaagcgctggccctggaagccgccgtcctggaggccacctgaagaaagcacgtgcagccctccctccgggccgggtcacacctgttgcagaactgagccactctttgaaggactcgccccacctggggcttctttttttttttttttttttaattatcatcatctttttttttttttttactgacttgtctgacgtctgtgtgcagtcagccgtcggcaggttgatgggtccagagtctgtggtgacagataatttgtaaacaccaggtgtttccatcagaactgacatgcgggtccttcagtgaagcttctagtgcctctgtcagtggaagagacagcaagaccaagttcttccagcgtctgtggccttctcctctaggtttcacctgcatgtcaggtatcatttccaattttcctttgtttcagttctggagcttctgagccaggcctttctcaaccacctctcctgctgctgaaacggggatggcgttttccctctccctgtcctggactggggtcagactgtgccccgaggagaagcagcagagaataggactacgtcatgggcatttcgtccacttatttgggtattttgggggccacagaacaatcctgactatcctagactcctcagagacctcagaggcagctgtgaatgtccctatgttgccgggagttcctgtttgaaatatttgaagcatagaggatgccacaagctgactttcttcatctaccttggtgatcttgaagcaaagaacagaactgatgctcaggccaggctcacctgtagccttacgccgcaagcatacgtgaggcgccagctctgtcgctgaaggagcgcttactcagaggagcggtcggccccctcttggtgttaaggtctcttagttaacctggctttttggtgcaggtgtgatctttgaagctcaggcaggtccctgatgccatcctaaggtgaggacaggaacctcacccaccatcttcttagcgtgtccctgatgactctgtcctctgttagatggtcgttgtgcttctgagta

SEQ ID NO: 178575 - DNA, 2665 bp, Homo sapiens
  Payload ID: 15195
  Gene Symbol: RUBCN
  Gene Name: RUN domain and cysteine-rich domain containing, Beclin 1-interacting protein
  ENST ID: ENST00000415452
  CDS Start-End: 1-2042
cagagagaagatctacttcctttccactctctggccctccccggaaacctcaagaaagcagagggcacgtctcaccagcagaggatcaaaccatccaagcccccccagtttcagtctctgcactagccagggattcccctttgaccccaaatgaaatgagctccagtactctgaccagccccatagaggcatcctgggtcagcagccagaatgattccccaggtgatgccagtgaggggcctgagtacctggccattggcaacttggacccccgaggccggactgccagctgtcagagtcacagcagcaatgccgagagcagcagttccaatttgttctcctccagcagctcccagaagccagattctgctgcctcttccttaggggaccaggaaggaggtggggagagccagctgtccagtgtcctccgcaggtccagcttctcagaggggcagacactcactgtcaccagtggggcaaagaaaagccacattcgctcccattcggataccagcattgcctccaggggagctccagaatcctgcaatgataaggcgaagttgagaggccctttgccctactctggtcaaagcagtgaagtcagcacacccagctctctgtacatggaatatgaaggtggtcggtacctgtgctcaggggaaggcatgttccgaagaccatcagaaggacagtccctcatcagctacctctctgagcaagacttcggcagctgtgccgacctggaaaaggagaatgcccacttcagcatctcagagtccttaattgctgccatcgagctaatgaagtgcaacatgatgagccagtgcctagaggaggaggaagtggaagaggaagacagtgatagagagatccaggagctgaagcagaagatccgccttcggcgccagcaaatccgcaccaagaacctgctccccatgtaccaggaggctgagcacggaagctttcgggtcacctccagcagctcccagttcagctcacgtgattcggcacagctctctgactctggctctgctgatgaggttgatgaatttgaaatccaagatggtagcgaaggatctaacctgactcacatatcaaagaacggactgtcagtgtcactggcctcgatgttctcagatgctgacatcagaaggaacacagcctcaagcagcaaatccttcgtttcctcccagtccttctcccactgcttcctgcactccacgtctgctgaggcggtggccatggggctcctgaagcagtttgaggggatgcagcttccagccgcctcggagctggagtggcttgtcccggagcatgatgcccctcagaagctcctgcccattcctgactcactgcccatctcaccggatgacgggcagcacgctgacatctacaagctgcggattcgtgttcgtggcaacttggagtgggccccgccccggcctcagataatttttaatgttcatccagccccaacgaggaaaattgccgtggccaagcagaattaccgctgtgcaggatgtggcatccggactgaccctgattacatcaagcgactgcggtactgtgagtacctgggcaagtacttctgccagtgctgccacgagaatgcccagatggccatccccagccgggttctgcgcaagtgggacttcagcaagtactacgtcagcaacttctccaaggacctgctcattaagatctggaatgatcctctcttcaacgtgcaggacataaacagtgccctctataggaaggtcaagctgctcaatcaagtccggctgctgcgggtccagctgtgtcacatgaagaacatgttcaagacttgccgactggccaaggagcttctggattcctttgacacagtcccaggccacctgacagaggacctccacctgtactcactgaatgacctgactgcgaccaggaagggggagctggggccccggcttgctgagctcaccagggcaggggctacccatgtggagagatgcatggtgagaaagtctcactgtagcatgcagctgagcccttgcttttagggatacagggaggggggtggacctggggttcttgccacttagcttgaggaagttgaaatggccagtcagcactgggagaggaactggaaagggctgctgttccttagcctggagagcagccaaatcatcctgatctaaagaacctcgagtgaggggaggagctggtgctggctgtggtcctgggtagctccgggcaagaccgagtagactttcactcaagaagtgttggccaggcacggtggcttaggcctctcatcccagcaatttgggaggccgaggtgggcgggtcacctgaggtcaggagttcaagaccagcctgacgaacatgatgaaaccccatctctactaaaatacagaaattagccgggcatgatggcgggtgcctgtaatcccagctactcgggaggctgaggcaggagaattgcttgaatccaggaggcggaggttgcagtgagccgagatcatgccactgcactccagcctgagcgacaagagtggaaaaaaaaaaggcagttgtcatgatgtgagaggagagctctggattggaatcgagagggagtctaccctcggccgtcatttgttgttctcagtcattatgaccaaaataaatactttgtcccctc

SEQ ID NO: 178576 - DNA, 442 bp, Homo sapiens
  Payload ID: 15195
  Gene Symbol: RUBCN
  Gene Name: RUN domain and cysteine-rich domain containing, Beclin 1-interacting protein
  ENST ID: ENST00000447048
  CDS Start-End: 1-442
ttaggggaccaggaaggaggtggggagagccagctgtccagtgtcctccgcaggtccagcttctcagaggggcagacactcactgtcaccagtggggcaaagaaaagccacattcgctcccattcggataccagcattgcctccaggggagctccagaaggtggtcggtacctgtgctcaggggaaggcatgttccgaagaccatcagaaggacagtccctcatcagctacctctctgagcaagacttcggcagctgtgccgacctggaaaaggagaatgcccacttcagcatctcagagtccttaattgctgccatcgagctaatgaagtgcaacatgatgagccagtgcctagaggaggaggaagtggaagaggaagacagtgatagagagatccaggagctgaagcagaagatccgccttcggcgccagcaaatccgca

SEQ ID NO: 178577 - DNA, 615 bp, Homo sapiens
  Payload ID: 15195
  Gene Symbol: RUBCN
  Gene Name: RUN domain and cysteine-rich domain containing, Beclin 1-interacting protein
  ENST ID: ENST00000474214
  CDS Start-End: 542-615
gaagtgggggtggccgggatagaagccgcagcccaggcggcggtccctcccgctgtcgccgcccgggtgtagcgcatcacccggagcccaccggccgcaggtgcctcctccggccccagggggccccgggagccctgaagggcgaagcggcagggacgcctctcttgggcgaagaggcggcctcaccgccccggatgcggccggagggcgcgggaatggagctcggaggcggcgaggagcgcctgcctgaggagagcaggcgtgccgccgccagacggattactggcagttcgtgaaagacatccggtggctcagtccccactcagcccttcacgtggagaagttcatcagcgtgcacgagaacgaccagagcagtgctgatggtgccagtgaacgtgctgttgccgagctgtggctgcagcacagcctgcagtaccactgcctctcagcccagctccggcccctgctcggggatagacagtatatcagaaaattctacacagatgctgccttcctgctaagtgacgctcatgtcacggccatgctgcagtgcctggaagcagtggaacagaacaacccccgcctcctggctcagatcgatgcgtccatgtttgc

SEQ ID NO: 178578 - DNA, 3828 bp, Homo sapiens
  Payload ID: 15196
  Gene Symbol: RUNDC1
  Gene Name: RUN domain containing 1
  Uniprot ID: Q96C34
  ENST ID: ENST00000361677
  CDS Start-End: 13-1854
gtttccgggaagatggcggctgtcgaagcggctgcagagccggtaacggtggtggcggctgttgggccaaaggcgaaagacgaagaggaggaggaagaggagccgctgccaccgtgcgaggcggtgcgctgggccccagtgggggcggtggcggaggcccggcctggggcaaccgcgtttttagaagaggcgacggccgaggagcctggcgcggccccgggctccccgccggattcgccgggccggacgctgcggcggctgcgggcagagcggcggcggctggactcggcgctgctggcgctgtcctcgcacttcgcgcaggtgcagttccgcctgcgccaggtggtgcgcggggcgccggcggagcagcagcgccttctgcgggagctcgaagacttcgccttccgcggctgccctcacgtcctaggttacgaagggcccggcgaccccgccagcgatgagggcgatgggctgccaggggaccggccatggttgcggggcgaggaccagagtgagcaggaaaagcaagagcgtctggaaacccaaagggagaagcagaaagaactgatactgcagctcaagacccagctagatgacctggaaacgtttgcctatcaagagggcagttatgactcgctgccacagtccgtggtgttggaaagacagcgggtgatcatagatgagttaataaagaaactggacatgaatctgaatgaggacatcagttccctgtccactgaagagcttcgtcagcgtgtagatgcagcagtggctcagatcgtcaacccagcccgagtcaaagaacagttggttgagcaactgaaaactcagatccgagaccttgagatgtttatcaacttcatccaagatgaagtgggaagccccttgcagacaggtggtggacactgtgagtgcaaggccggtgggaagacaggaaatggctgcagcagaacaggcagcagcagaacgcctccaggaaacagcaaaacaaaggcagaggatgtgaagaaagtccgggagacggggctgcacctgatgcggcgagcgctggccgtgctccagatctttgctgttagccagtttggttgtgccacaggccagatccctccaaccctgtggcagagggtccaggctgacagagactactctcccttgctgaagaggctggaggtgtcagtggacagagtgaagcagctagccttgaggcagcagccacatgaccatgtcatcacctctgccaacctccaggacctctctctgggaggcaaggatgagctgactatggctgtgcggaaggagctaacggtggctgtgagggacctgctggcccatggactgtatgcctcctccccagggatgagccttgttatggctcctattgcttgtttgctgccagccttctcctcggccccagaggccatgcacccgtgggagctctttgtaaagtactaccatgctaagaacggccgtgcttatgtggaatccccagcccggaagctctcccagtccttcgcccttcctgttacgggaggcactgttgtcacccccaaacagagcctactgacagccatccacatggtgctgacagagcatgacccttttaagcgcagtgcagactcagaattgaaggccttggtgtgcatggcactgaatgagcagcgtctggtgtcctgggtgaacctcatctgcaagtccgggtcactcatcgagcctcactaccagccctggagctacatggcacacacaggctttgagagtgccctcaacctgctcagtcgcctcagcagcctcaagtttagcctccctgtagatctggctgtgcgccagctcaaaaacatcaaagatgccttttgatgagagtgccctaaccccagacaagctccttgttcagtagggatagatgtgctagtcttctagcataggagcaaggaatcagaggtggggttaaaggcatttttcccagaccctgctcaggcagtcggccaaatgagtgcaaagtctgttttccccaccaacttagctctcggaaagatgtgctggagggaccctcttgttaagaaggttctgccaggccgggcgcggtggctcacacctgtaatcccagcactttgggaggccgaggcgggcggatcacaaggtcaggagttcgagaccatcctgtctaacacggtgaaaccccatctctactaaaaatacaaaaaaattagtcggacatggtggcaggcacctgtagtcccagctactcgggaggctgaggcaggagaatggcgtgaacccaggaggcggagcttgcagtgagccaagatcgcgccactgcactccagcctgggcgacagagtgagactccgtctcaaaaaaaaaaagaaggttgtacccacagtatacgtgtgggcacttgtgcttgagcctgtattaaaggaatcaggccaggcacagtggctcacgcctgtaatctcagcacattgggaggctgaggtgggcggatcacctgaggtcaggagttcaagaccagcctggccaacatggtgaaaccccatctctactaaaaatacaaaaattagctaggcggggtagtgcatgcctgtaatcccagctactcaggaggctgaggccggagaatcgcttgagcccgagaggtggagactgcagtaagccaagatcatgccattgcactccagcctgggcaacacagggagactccatctcaaaaaaaaaaaaaaaaaaaaaaagacattcaacttgaggctcctgttagttaagctatcttctttcacttgaagcaggtttgagaggcctaggccagaatttaaattccttttatgaatagatttccctttcttcctgaccccaaggtcagaggagactatatattccatggctgcctctaagactaggaataggaatatctgaaaacagcatttctaagggtggtaaccacaggtcgattttaatacgagtcctttttcttgtagaggtaagtaaaatcttcctgacaaggtagtcctcttttcatggcacagacaatgggctttctgtttatgaggggtgagaagtgatgtttgttactatgttctccagcaagtaaacattcctctgctcacctcccaacaagactaacagtctttttagaagtaaatatattcaagacaaacgagaaaatcctggctacccaagtcgagtatatacaggaatacaaatcggtaaccagcagctgttcctcaggttgtgactcactgagcaccacttgtcctggaggctggatgatggaggacatctggttataggtactgtagcagggataggtgccacaggaggataggaactacagcagatcgctgtttccagaacggggaggagtatctcattgtgaaacagactctagagtggttctatttggtcttcagtgttttagcctcgttagttcatatttggcatgcagcttgtggtgagtactgttctaggactggccaaaaatgggcaaaatgtatcactccaaacactactgattcagcattgttttcatgtcttaaaattgccacctgcactttgtttctgcactattatgtagtgcattttaacttaaattttttccagcaacatgttacttatttaagatacattactgatatttcattataattagttcaccttccctgtgaaacaagagaattgtaaaatgttgtggaaaatgatacatatgtggatgctaatgaaatcatagtattttgtgtagcttctctgaagaccttagagatctgcagctttggtttataagtgtttgggccttatcagcccatctgatccagatcaatatttttttgaaaactg

SEQ ID NO: 178579 - DNA, 959 bp, Homo sapiens
  Payload ID: 15196
  Gene Symbol: RUNDC1
  Gene Name: RUN domain containing 1
  ENST ID: ENST00000589705
  CDS Start-End: 1-791
cggctgtcgaagcggctgcagagccggtaacggtggtggcggctgttgggccaaaggcgaaagacgaagaggaggaggaagaggagccgctgccaccgtgcgaggcggtgcgctgggccccagtgggggcggtggcggaggcccggcctggggcaaccgcgtttttagaagaggcgacggccgaggagcctggcgcggccccgggctccccgccggattcgccgggccggacgctgcggcggctgcgggcagagcggcggcggctggactcggcgctgctggcgctgtcctcgcacttcgcgcaggtgcagttccgcctgcgccaggtggtgcgcggggcgccggcggagcagcagcgccttctgcgggagctcgaagacttcgccttccgcggctgccctcacgtcctaggttacgaagggcccggcgaccccgccagcgatgagggcgatgggctgccaggggaccggccatggttgcggggcgaggaccagagtgagcaggaaaagcaagagcgtctggaaacccaaagggagaagcagaaagaactgatactgcagctcaagacccagctagatgacctggaaacgtttgcctatcaagagggcagttatgactcgctgccacagtccgtggtgttggaaagacagcggatgaagtgggaagccccttgcagacaggtggtggacactgtgagtgcaaggccggtgggaagacaggaaatggctgcagcagaacaggcagcagcagaacgcctccaggaaacagcaaaacaaaggcagaggatgtgaagaaagtccgggagacggggctgcacctgatgcggcgagcgctggccgtgctccagatctttgctgttagccagtttggttgtgccacaggccagatccctccaaccctgtggcagagggtccaggctgacagagactactctcccttgctgaagaggctggaggtgt

SEQ ID NO: 178580 - DNA, 1821 bp, Homo sapiens
  Payload ID: 15197
  Gene Symbol: RUNDC3A
  Gene Name: RUN domain containing 3A
  Uniprot ID: Q59EK9
  ENST ID: ENST00000225441
  CDS Start-End: 238-1455
acggggccccggctcagcacctcggagagctccctccccggccttgttttgctctggcatcgccgccgggggagggagcgagggggccgggcaccgggcgcaaaggcagggggatggccatggaagggttgaggggccccgtcggacagagggcccagccgtgatccagcgacgggtttggggctccgggaggggtgggggggcagcgggcggcggcagcagtggccgcacatctggatggaagcgagctttgtccagaccaccatggctctggggctgtcctccaagaaagcgtcctctcgcaacgtggctgtggagcgtaagaacctgatcaccgtgtgcaggttctctgtgaaaacgctgctggagaagtacacagcggagcccatcgatgactcatcggaggagtttgtcaattttgcagccattttagagcagatcctcagccaccgcttcaaagcctgtgccccagcaggtccagtgagctggttcagctcagacgggcagcggggcttttgggactatatccggctggcctgcagcaaagtgcccaacaactgtgtgagcagcatcgagaacatggagaacatcagcacagcccgggccaagggccgggcatggatccgggtggcactgatggagaagcgcatgtcagaatacatcaccacggctctgcgtgacacccggaccaccagacggttctatgactctggagccatcatgctgcgggatgaagccaccatcctcaccggaatgctgatcggactgagcgccatcgacttcagcttctgtctaaagggggaagtcctggacgggaagacccccgtggtcatcgattacacgccctacctaaagttcacgcagagctacgactacctgacggacgaggaggagcggcacagcgccgagagcagcacgagcgaggacaactcgcccgagcacccgtacctcccgctcgtcaccgatgaggacagctggtacagcaagtggcacaagatggagcagaagttccgcatcgtctacgcgcagaagggctacctggaggagctggtgcgtctgcgcgagtcgcagctgaaggacctggaggcggagaaccggcggcttcagctgcagctggaggaggcggcggcgcagaaccagcgcgagaaacgggagctggaaggcgtgatcctggagctgcaggagcagctgacaggtctgatccccagtgaccacgcccctctggcccagggttccaaggagctcactacacccctggtcaatcaatggccctcactgggaacgcttaatggggccgagggcgccagcaactccaagctctaccggagacacagcttcatgagcacggagccgctgtcagctgaagccagtctgagctcggactcccagcgcctgggagagggcacgcgggacgaggagccctggggtcccatcggaagctcagagccaaattagtggctcccttcgagcgaatgcccaggacttcaacgcatgcactttgtgttgacctcatccctggcttcaccttggtttttcccatcctagttctccctatgcctgaatatcctgtcttttcttttttataagcaaccacactgtattggatgaccctagatcttctttgagacaaggcaggctgtggccatgtagccccatcacactgtgtttgtgattgtctgtgtgtctgtctcccccaccagactgtgagctccatgagggcagggaccgtgtcttgtccgttctctgtatccccagtgcttggaacagagcgagtgctcactgtgtatttaataaatggacaaagagagaggatgaccctca

SEQ ID NO: 178581 - DNA, 2048 bp, Homo sapiens
  Payload ID: 15197
  Gene Symbol: RUNDC3A
  Gene Name: RUN domain containing 3A
  Uniprot ID: Q59EK9
  ENST ID: ENST00000426726
  CDS Start-End: 275-1615
actggccgaggggggcgggcggctggaggagggggtgacggggccccggctcagcacctcggagagctccctccccggccttgttttgctctggcatcgccgccgggggagggagcgagggggccgggcaccgggcgcaaaggcagggggatggccatggaagggttgaggggccccgtcggacagagggcccagccgtgatccagcgacgggtttggggctccgggaggggtgggggggcagcgggcggcggcagcagtggccgcacatctggatggaagcgagctttgtccagaccaccatggctctggggctgtcctccaagaaagcgtcctctcgcaacgtggctgtggagcgtaagaacctgatcaccgtgtgcaggttctctgtgaaaacgctgctggagaagtacacagcggagcccatcgatgactcatcggaggagtttgtcaattttgcagccattttagagcagatcctcagccaccgcttcaaagcctgtgccccagcaggtccagtgagctggttcagctcagacgggcagcggggcttttgggactatatccggctggcctgcagcaaagtgcccaacaactgtgtgagcagcatcgagaacatggagaacatcagcacagcccgggccaagggccgggcatggatccgggtggcactgatggagaagcgcatgtcagaatacatcaccacggctctgcgtgacacccggaccaccagacggttctatgactctggagccatcatgctgcgggatgaagccaccatcctcaccggaatgctgatcggactgagcgccatcgacttcagcttctgtctaaagggggaagtcctggacgggaagacccccgtggtcatcgattacacgccctacctaaagttcacgcagagctacgactacctgacggacgaggaggagcggcacagcgccgagagcagcacgagcgaggacaactcgcccgagcacccgtacctcccgctcgtcaccgatgaggacagctggtacagcaagtggcacaagatggagcagaagttccgcatcgtctacgcgcagaagggctacctggaggagctggtgcgtctgcgcgagtcgcagctgaaggacctggaggcggagaaccggcggcttcagctgcagctggaggaggcggcggcgcagaaccagcgcgagaaacgggagctggaaggcgtgatcctggagctgcaggagcagctgacaggtctgatccccagtgaccacgcccctctggcccagggttccaaggagctcactacacccctggtcaatcaatggccctcactgggaacgcttaatggggccgagggcgccagcaactccaagctctaccggagacacagcttcatgagcacggagccgctgtcagctgaagccagtctgagctcggactcccagcgcctgggagagggcacgcgggacgaggagccctggggtcccatcgggaaggaccccacgccctccatgctgggcctctgcggctccctggcctccattcccagctgcaagtccctggcgagcttcaaatccaacgagtgcctggtgagcgacagtcccgagggcagcccagcactgagccccagctgaggaacagcatgggcagtgccagccccacctgccaggggccatggacacctgccacctttcttcaacaagagtcccccaatccaggctacccttccagagaacgctacccacccagccagggttctctcggggaagatctcgtctgctcaccttagctttctgccttggcagcacgggctgcggaagaaagcacgctgggccaggaggcaggggtgcccaagccacagggagcccctggggaagcctgctccattcttctggtgaccttggcgctccttcactcatctcccctgccccctcaggaactggtggcccagcttccacacccccacctcccagtctctagcctctccatctgtctgtgtatggcctggagtcactccttcctcagcccccagggcaagagagctcaaataaaaaccagaggactgag

SEQ ID NO: 178582 - DNA, 1675 bp, Homo sapiens
  Payload ID: 15197
  Gene Symbol: RUNDC3A
  Gene Name: RUN domain containing 3A
  Uniprot ID: Q59EK9
  ENST ID: ENST00000590941
  CDS Start-End: 251-1453
ggaggagggggtgacggggccccggctcagcacctcggagagctccctccccggccttgttttgctctggcatcgccgccgggggagggagcgagggggccgggcaccgggcgcaaaggcagggggatggccatggaagggttgaggggccccgtcggacagagggcccagccgtgatccagcgacgggtttggggctccgggaggggtgggggggcagcgggcggcggcagcagtggccgcacatctggatggaagcgagctttgtccagaccaccatggctctggggctgtcctccaagaaagcgtcctctcgcaacgtggctgtggagcgtaagaacctgatcaccgtgtgcaggttctctgtgaaaacgctgctggagaagtacacagcggagcccatcgatgactcatcggaggagtttgtcaattttgcagccattttagagcagatcctcagccaccgcttcaaaggtccagtgagctggttcagctcagacgggcagcggggcttttgggactatatccggctggcctgcagcaaagtgcccaacaactgtgtgagcagcatcgagaacatggagaacatcagcacagcccgggccaagggccgggcatggatccgggtggcactgatggagaagcgcatgtcagaatacatcaccacggctctgcgtgacacccggaccaccagacggttctatgactctggagccatcatgctgcgggatgaagccaccatcctcaccggaatgctgatcggactgagcgccatcgacttcagcttctgtctaaagggggaagtcctggacgggaagacccccgtggtcatcgattacacgccctacctaaagttcacgcagagctacgactacctgacggacgaggaggagcggcacagcgccgagagcagcacgagcgaggacaactcgcccgagcacccgtacctcccgctcgtcaccgatgaggacagctggtacagcaagtggcacaagatggagcagaagttccgcatcgtctacgcgcagaagggctacctggaggagctggtgcgtctgcgcgagtcgcagctgaaggacctggaggcggagaaccggcggcttcagctgcagctggaggaggcggcggcgcagaaccagcgcgagaaacgggagctggaaggcgtgatcctggagctgcaggagcagctgacaggtctgatccccagtgaccacgcccctctggcccagggttccaaggagctcactacacccctggtcaatcaatggccctcactgggaacgcttaatggggccgagggcgccagcaactccaagctctaccggagacacagcttcatgagcacggagccgctgtcagctgaagccagtctgagctcggactcccagcgcctgggagagggcacgcgggacgaggagccctggggtcccatcggaagctcagagccaaattagtggctcccttcgagcgaatgcccaggacttcaacgcatgcactttgtgttgacctcatccctggcttcaccttggtttttcccatcctagttctccctatgcctgaatatcctgtcttttcttttttataagcaaccacactgtattggatgaccctagatcttctttgagacaaggcaggctgtggccatgtagccccatcacactgtgtttgtgattgtc

SEQ ID NO: 178583 - DNA, 1212 bp, Homo sapiens
  Payload ID: 15197
  Gene Symbol: RUNDC3A
  Gene Name: RUN domain containing 3A
  ENST ID: ENST00000612735
  CDS Start-End: 1-1212
atggaagcgagctttgtccagaccaccatggctctggggctgtcctccaagaaagcgtcctctcgcaacgtggctgtggagcgtaagaacctgatcaccgtgtgcaggttctctgtgaaaacgctgctggagaagtacacagcggagcccatcgatgactcatcggaggagtttgtcaattttgcagccattttagagcagatcctcagccaccgcttcaaagcctgtgccccagcaggtccagtgagctggttcagctcagacgggcagcggggcttttgggactatatccggctggcctgcagcaaagtgcccaacaactgtgtgagcagcatcgagaacatggagaacatcagcacagcccgggccaagggccgggcatggatccgggtggcactgatggagaagcgcatgtcagaatacatcaccacggctctgcgtgacacccggaccaccagacggttctatgactctggagccatcatgctgcgggatgaagccaccatcctcaccggaatgctgatcggactgagcgccatcgacttcagcttctgtctaaagggggaagtcctggacgggaagacccccgtggtcatcgattacacgccctacctaaagttcacgcagagctacgactacctgacggacgaggaggagcggcacagcgccgagagcagcacgagcgaggacaactcgcccgagcacccgtacctcccgctcgtcaccgatgaggacagctggtacagcaagtggcacaagatggagcagaagttccgcatcgtctacgcgcagaagggctacctggaggagctggtgcgtctgcgcgagtcgcagctgaaggacctggaggcggagaaccggcggcttcagctgcagctggaggaggcggcggcgcagaaccagcgcgagaaacgggagctggaaggcgtgatcctggagctgcaggagcagctgacaggtctgatccccagtgaccacgcccctctggcccagggttccaaggagctcactacacccctggtcaatcaatggccctcactgggaacgcttaatggggccgagggcgccagcaactccaagctctaccggagacacagcttcatgagcacggagccgctgtcagctgaagccagtctgagctcggactcccagcgcctgggagagggcacgcgggacgaggagccctggggtcccatcggtagctcccccaac

SEQ ID NO: 178584 - DNA, 4099 bp, Homo sapiens
  Payload ID: 15198
  Gene Symbol: RUNDC3B
  Gene Name: RUN domain containing 3B
  Uniprot ID: Q96NL0
  ENST ID: ENST00000338056
  CDS Start-End: 412-1833
gctggggcacgagtggctgcggagtgtgggtggttgggcgtgaggggccgacgggctcgcgcgcgcgccgtctgctgaggtccctcgggaaggaggagagcgcctgacgccgacccgcaggcgcagcccggcagtcggcggcgcgccgagggcggaggtggtgcgtgcgtgcgtgtgtgtgtgtgtgtgtgtgtgtgtgtgtgtgtgtgtgtggagctcgggtgccaagggcgagccgtcagtccccgggtgcgagtccctgctgtcttccacacccttcctccctccaggctcctttcctacatccttcccgcgcccccacggttgcggaccgagcgagaacccccttaagcaggtgtggggggcgtgcggggtggcacgagacaaaaggggcacgggggtaagcccgccatggcctcccggagcctggggggcctgagcgggatccgcggcggtggcggcggaggcggcaagaaaagcctgagcgcccgcaatgctgcggtggagaggaggaacctgatcaccgtgtgcaggttttctgtgaagaccctgattgatcggtcttgctttgagacaattgatgattcttctcctgaatttaacaattttgcagctattttggaacagattttaagccaccggctaaaagagatttcccaaagttgcagatggctggctcatctccaaatacctcttcaaggtcaagtaacctggtttggttatgaaagtcctcgtagcttctgggactatatcagagtggcttgccggaaagtttcacagaattgtatctgcagcattgaaaatatggaaaatgtcagttcttctagagctaagggtagagcctggatcagagtagcactcatggaaaaacatttatctgaatacatctctacagctctgagagacttcaaaacaaccaggagattttatgaagatggagcaattgtcttgggtgaagaagcaaatatgcttgctggcatgcttctaggactcaatgctattgatttcagtttctgcctaaagggagaggggctggatggcagttttcctgctgtaatagactatacaccatatttgaagtatatccaaagttctgatagtatcagcagtgatgaggaggagctaaggactttgggaagcagtggtagcgaaagcagtactccagagaatgtcggacctcctttcctcatggatgagaacagttggttcaacaagtgtaagagagttaaacaaaagtatcagcttaccctggaacagaagggttaccttgaagaactcttacgacttcgagagaaccaactatctgaatctgtctcccagaataaaatactacttcaaaggattgaagattccgatctggctcataaactggagaaggaacaattagaatatataattgtggagcttcaagatcagctgactgtgctaaagaataatgatttaagatcgagacaagagttaactgcccatctcaccaaccagtggccttctccaggagctctggatgtcaatgctgttgccttggatacgttgctttaccgaaaacacaataaacagtggtatgagaaaagttatcaaagtcttgaccagttatcagcagaagttagcctttctcagacttcactagatccaggccagtcacaagaaggagatggaaaacaagacacattaaatgtaatgagtgaaggtaaggaagatactccctcattacttggcctctgtggatctctaacgtcagtggcaagttacaagtctctaacaagcttaaaatctaatgactaccttgcaagtcctacaacagagatgacaagtccaggcctaactccatcctgaaaatttttgtgtaaaagccaaaactttttatgttgtaaatgtttaatttacatgtttgactgctgggaagacctttgaaattttatattgttctggtacatgtctgaaattctattgcttggagagaatcccctccagataagagattttgagtgaaaaacataatgatcctgccatttttcatttttaaaattcttacatttgtcattgagaaagttcaaaatggaataggctttaaaaaaaaaaaaactttcaaagatccgccaaatcattcatagcaaattgtacatattgttcagctgatttttatatatttaaatacaccttagtggccagagactgacttcaaggttttattccagagactccagagacttaagctaagtattttttcattctttcagattttcaaaaaaaaaaaaaaaaaaagttaatttcattttttcattaatgtcttcctaagttctatgctttaaatgccttgtttttaataacgggaaagttctcagctgcattttcacagtggcttattcagtttttctttaatatttaccatttggtatcaattcagcattccacttaacattttataaattccataggaacatgcctgttttggtagttactgacttaatttgttagtgccacaaggaaaatattttacagtattttatgccatttaggcaaaatgaataaactgttttccaagattttcttaaaagattatcaatttaaaagtatgatcaagtatgcctcaaaaactagaaacatttcaaaatgtagaacaaacgttgaaaaattgttttgccaggaaagagttcaagttcagttaaggatttgagaggcttttaaacaaggatcagtaggatagttatcatatttacttaatatatgtctgatattcagtgctggttctttttcctgtttgtgcaacaatgaagtgtgtcatgtgtgttttatagcctctatcattaatcacaccagagtctcattttaaaacattttaatgttaaaacatccccacacttatacacaggtaaaattagtttttttttttttaaagttgtaatctgtacttttttttttttgcaatttttgaaacagctacattaatccctaaaaatcccaccatactgaaaatgtatggcgtgtattttctatagtaagtaatatgaggaaaacatgattagctgtgccaaagaaattttatacattgtttacatgatgaggccacagtacttactgaggacttcatatggtttttttgtttattattattgagaaaagagctgaggttaccacattcattctttgtgttagaaatgtaggagtgtggtggttttctgcaatatttagagcttagtctcataatttggaatttaagataataagtagtaacaaggcaagtcttttatgtaagacagtcaaacagtgtcacttcagggacaaaggcctggaagcccttaaaataagttatcttagatgtgccagaacatattcagagctttattcctttaagcttaaggcttcaatacttgtagaaatgcaaatattcttgagaaatgatacattttttgttctcaatttctcaattctacatacctgattatgagtgaagtatccaaagcaggttttcatcagcatgggggatggaaggtaggtataatatgaggacaatggaaactttgggagaagggagtgaggaaatggataaagagaaatttgaaaattttaggctggacttgagcactattgctgctttcctatgaactatcagaatgtttaaatgctttatcattcatggtccactctcaaccaacatttattatcctttagtaattaaacaatggttttacatacatttttataatgtagaaggaaattcaagattccataatcgtaaaatttttcagatttgtctaatgtgtaatttgtgcatcttcacatgctgctaaatgcagatttaaacattacatctgaggatcatgacttttcctcctttcttggagatcttggtataaaattcatctgctgttataaaatcaggtttctacagagttcgtttcacactaaaggtagtttgttactgtttgcatgaggaaaccatgtatgtctcaatctttaattttaggtggtagtgtttattgttcaccctccctcttgcctccaaaagaatgctgaattatacgccaatatttccatgtgtattctgttgccttgatgcgtactatacttgttgcatgtatattaaaaattttgtactatg

SEQ ID NO: 178585 - DNA, 2064 bp, Homo sapiens
  Payload ID: 15198
  Gene Symbol: RUNDC3B
  Gene Name: RUN domain containing 3B
  Uniprot ID: Q96NL0
  ENST ID: ENST00000394654
  CDS Start-End: 210-1580
gtgtgtgtgtggagctcgggtgccaagggcgagccgtcagtccccgggtgcgagtccctgctgtcttccacacccttcctccctccaggctcctttcctacatccttcccgcgcccccacggttgcggaccgagcgagaacccccttaagcaggtgtggggggcgtgcggggtggcacgagacaaaaggggcacgggggtaagcccgccatggcctcccggagcctggggggcctgagcgggatccgcggcggtggcggcggaggcggcaagaaaagcctgagcgcccgcaatgctgcggtggagaggaggaacctgatcaccgtgtgcaggttttctgtgaagaccctgattgatcggtcttgctttgagacaattgatgattcttctcctgaatttaacaattttgcagctattttggaacagattttaagccaccggctaaaaggtcaagtaacctggtttggttatgaaagtcctcgtagcttctgggactatatcagagtggcttgccggaaagtttcacagaattgtatctgcagcattgaaaatatggaaaatgtcagttcttctagagctaagggtagagcctggatcagagtagcactcatggaaaaacatttatctgaatacatctctacagctctgagagacttcaaaacaaccaggagattttatgaagatggagcaattgtcttgggtgaagaagcaaatatgcttgctggcatgcttctaggactcaatgctattgatttcagtttctgcctaaagggagaggggctggatggcagttttcctgctgtaatagactatacaccatatttgaagtatatccaaagttctgatagtatcagcagtgatgaggaggagctaaggactttgggaagcagtggtagcgaaagcagtactccagagaatgtcggacctcctttcctcatggatgagaacagttggttcaacaagtgtaagagagttaaacaaaagtatcagcttaccctggaacagaagggttaccttgaagaactcttacgacttcgagagaaccaactatctgaatctgtctcccagaataaaatactacttcaaaggattgaagattccgatctggctcataaactggagaaggaacaattagaatatataattgtggagcttcaagatcagctgactgtgctaaagaataatgatttaagatcgagacaagagttaactgcccatctcaccaaccagtggccttctccaggagctctggatgtcaatgctgttgccttggatacgttgctttaccgaaaacacaataaacagtggtatgagaaaagttatcaaagtcttgaccagttatcagcagaagttagcctttctcagacttcactagatccaggccagtcacaagaaggagatggaaaacaagacacattaaatgtaatgagtgaaggtaaggaagatactccctcattacttggcctctgtggatctctaacgtcagtggcaagttacaagtctctaacaagcttaaaatctaatgactaccttgcaagtcctacaacagagatgacaagtccaggcctaactccatcctgaaaatttttgtgtaaaagccaaaactttttatgttgtaaatgtttaatttacatgtttgactgctgggaagacctttgaaattttatattgttctggtacatgtctgaaattctattgcttggagagaatcccctccagataagagattttgagtgaaaaacataatgatcctgccatttttcatttttaaaattcttacatttgtcattgagaaagttcaaaatggaataggctttaaaaaaaaaaaaactttcaaagatccgccaaatcattcatagcaaattgtacatattgttcagctgatttttatatatttaaatacaccttagtggccagagactgacttcaaggttttattccagagactccagagacttaagctaagtattttttcattctttcagattttcaaaaaaaaaaaaaaaaaaagttaatttcattttttcattaatgtcttcctaagttctatgctttaaatgccttg

SEQ ID NO: 178586 - DNA, 2020 bp, Homo sapiens
  Payload ID: 15198
  Gene Symbol: RUNDC3B
  Gene Name: RUN domain containing 3B
  Uniprot ID: Q96NL0
  ENST ID: ENST00000493037
  CDS Start-End: 371-1594
gaggggccgacgggctcgcgcgcgcgccgtctgctgaggtccctcgggaaggaggagagcgcctgacgccgacccgcaggcgcagcccggcagtcggcggcgcgccgagggcggaggtggtgcgtgcgtgcgtgtgtgtgtgtgtgtgtgtgtgtgtgtgtgtgtgtgtgtggagctcgggtgccaagggcgagccgtcagtccccgggtgcgagtccctgctgtcttccacacccttcctccctccaggctcctttcctacatccttcccgcgcccccacggttgcggaccgagcgagaacccccttaagcaggtgtggggggcgtgcggggtggcacgagacaaaaggggcacgggggtaagcccgccatggcctcccggagcctggggggcctgagcgggatccgcggcggtggcggcggaggcggcaagaaaagcctgagcgcccgcaatgctgcggtggagaggaggaacctgatcaccgtgtgcaggttttctgtgaagaccctgattgatcggtcttgctttgagacaattgatgattcttctcctgaatttaacaattttgcagctattttggaacagattttaagccaccggctaaaaggtcaagtaacctggtttggttatgaaagtcctcgtagcttctgggactatatcagagtggcttgccggaaagtttcacagaattgtatctgcagcattgaaaatatggaaaatgtcagttcttctagagctaagggtagagcctggatcagagtagcactcatggaaaaacatttatctgaatacatctctacagctctgagagacttcaaaacaaccaggagattttatgaagatggagcaattgtcttgggtgaagaagcaaatatgcttgctggcatgcttctaggactcaatgctattgatttcagtttctgcctaaagggagaggggctggatggcagttttcctgctgtaatagactatacaccatatttgaagtatatccaaagttctgatagtatcagcagtgatgaggaggagctaaggactttgggaagcagtggtagcgaaagcagtactccagagaatgtcggacctcctttcctcatggatgagaacagttggttcaacaagtgtaagagagttaaacaaaagtatcagcttaccctggaacagaagggttaccttgaagaactcttacgacttcgagagaaccaactatctgaatctgtctcccagaataaaatactacttcaaaggattgaagattccgatctggctcataaactggagaaggaacaattagaatatataattgtggagcttcaagatcagctgaaaagttatcaaagtcttgaccagttatcagcagaagttagcctttctcagacttcactagatccaggccagtcacaagaaggagatggaaaacaagacacattaaatgtaatgagtgaaggtaaggaagatactccctcattacttggcctctgtggatctctaacgtcagtggcaagttacaagtctctaacaagcttaaaatctaatgactaccttgcaagtcctacaacagagatgacaagtccaggcctaactccatcctgaaaatttttgtgtaaaagccaaaactttttatgttgtaaatgtttaatttacatgtttgactgctgggaagacctttgaaattttatattgttctggtacatgtctgaaattctattgcttggagagaatcccctccagataagagattttgagtgaaaaacataatgatcctgccatttttcatttttaaaattcttacatttgtcattgagaaagttcaaaatggaataggctttaaaaaaaaaaaaactttcaaagatccgccaaatcattcatagcaaattgtacatattgttcagctgatttttatatatttaaatacaccttagtggccagagactgacttcaaggttttattccagagactccagagacttaagctaagtattttttcattctttcagattttcaaaaaaaaaaaaaaaa

SEQ ID NO: 178587 - DNA, 6222 bp, Homo sapiens
  Payload ID: 15199
  Gene Symbol: RUNX1
  Gene Name: runt-related transcription factor 1
  Uniprot ID: Q01196
  ENST ID: ENST00000300305
  CDS Start-End: 446-1888
ggaaaggggaacagttaaatttgtaatttgggttgtgtgaaaacttctttgggcctcataaacaaccacagaaccacaagttgggtagcctggcagtgtcagaagtctgaacccagcatagtggtcagcaggcaggacgaatcacactgaatgcaaaccacagggtttcgcagcgtggtgagcatcaccaacccacagccaaggcggcgctggctttttttttttttttaatctttaacaatttgaatatttgtttttacaaaggtgcattttttaatagggcttggggagtcccagaggtatccagcagaggggagaagaaagagagatgtagggctagaggggtgaggctgaaacagtgacctgtcttggttttcgctccgaaggtaaaagaaatcattgagtcccccgccttcagaagagggtgcattttcaggaggaagcgatggcttcagacagcatatttgagtcatttccttcgtacccacagtgcttcatgagagaatgcatacttggaatgaatccttctagagacgtccacgatgccagcacgagccgccgcttcacgccgccttccaccgcgctgagcccaggcaagatgagcgaggcgttgccgctgggcgccccggacgccggcgctgccctggccggcaagctgaggagcggcgaccgcagcatggtggaggtgctggccgaccacccgggcgagctggtgcgcaccgacagccccaacttcctctgctccgtgctgcctacgcactggcgctgcaacaagaccctgcccatcgctttcaaggtggtggccctaggggatgttccagatggcactctggtcactgtgatggctggcaatgatgaaaactactcggctgagctgagaaatgctaccgcagccatgaagaaccaggttgcaagatttaatgacctcaggtttgtcggtcgaagtggaagagggaaaagcttcactctgaccatcactgtcttcacaaacccaccgcaagtcgccacctaccacagagccatcaaaatcacagtggatgggccccgagaacctcgaagacatcggcagaaactagatgatcagaccaagcccgggagcttgtccttttccgagcggctcagtgaactggagcagctgcggcgcacagccatgagggtcagcccacaccacccagcccccacgcccaaccctcgtgcctccctgaaccactccactgcctttaaccctcagcctcagagtcagatgcaggatacaaggcagatccaaccatccccaccgtggtcctacgatcagtcctaccaatacctgggatccattgcctctccttctgtgcacccagcaacgcccatttcacctggacgtgccagcggcatgacaaccctctctgcagaactttccagtcgactctcaacggcacccgacctgacagcgttcagcgacccgcgccagttccccgcgctgccctccatctccgacccccgcatgcactatccaggcgccttcacctactccccgacgccggtcacctcgggcatcggcatcggcatgtcggccatgggctcggccacgcgctaccacacctacctgccgccgccctaccccggctcgtcgcaagcgcagggaggcccgttccaagccagctcgccctcctaccacctgtactacggcgcctcggccggctcctaccagttctccatggtgggcggcgagcgctcgccgccgcgcatcctgccgccctgcaccaacgcctccaccggctccgcgctgctcaaccccagcctcccgaaccagagcgacgtggtggaggccgagggcagccacagcaactcccccaccaacatggcgccctccgcgcgcctggaggaggccgtgtggaggccctactgaggcgccaggcctggcccggctgggccccgcgggccgccgccttcgcctccgggcgcgcgggcctcctgttcgcgacaagcccgccgggatcccgggccctgggcccggccaccgtcctggggccgagggcgcccgacggccaggatctcgctgtaggtcaggcccgcgcagcctcctgcgcccagaagcccacgccgccgccgtctgctggcgccccggccctcgcggaggtgtccgaggcgacgcacctcgagggtgtccgccggccccagcacccaggggacgcgctggaaagcaaacaggaagattcccggagggaaactgtgaatgcttctgatttagcaatgctgtgaataaaaagaaagattttatacccttgacttaactttttaaccaagttgtttattccaaagagtgtggaattttggttggggtggggggagaggagggatgcaactcgccctgtttggcatctaattcttatttttaatttttccgcaccttatcaattgcaaaatgcgtatttgcatttgggtggtttttatttttatatacgtttatataaatatatataaattgagcttgcttctttcttgctttgaccatggaaagaaatatgattcccttttctttaagttttatttaacttttcttttggacttttgggtagttgtttttttttgttttgttttgtttttttgagaaacagctacagctttgggtcatttttaactactgtattcccacaaggaatccccagatatttatgtatcttgatgttcagacatttatgtgttgataattttttaattatttaaatgtacttatattaagaaaaatatcaagtactacattttcttttgttcttgatagtagccaaagttaaatgtatcacattgaagaaggctagaaaaaaagaatgagtaatgtgatcgcttggttatccagaagtattgtttacattaaactccctttcatgttaatcaaacaagtgagtagctcacgcagcaacgtttttaataggatttttagacactgagggtcactccaaggatcagaagtatggaattttctgccaggctcaacaagggtctcatatctaacttcctccttaaaacagagaaggtcaatctagttccagagggttgaggcaggtgccaataattacatctttggagaggatttgatttctgcccagggatttgctcaccccaaggtcatctgataatttcacagatgctgtgtaacagaacacagccaaagtaaactgtgtaggggagccacatttacataggaaccaaatcaatgaatttaggggttacgattatagcaatttaagggcccaccagaagcaggcctcgaggagtcaatttgcctctgtgtgcctcagtggagacaagtgggaaaacatggtcccacctgtgcgagaccccctgtcctgtgctgctcactcaacaacatctttgtgttgctttcaccaggctgagaccctaccctatggggtatatgggcttttacctgtgcaccagtgtgacaggaaagattcatgtcactactgtccgtggctacaattcaaaggtatccaatgtcgctgtaaattttatggcactatttttattggaggatttggtcagaatgcagttgttgtacaactcataaatactaactgctgattttgacacatgtgtgctccaaatgatctggtggttatttaacgtacctcttaaaattcgttgaaacgatttcaggtcaactctgaagagtatttgaaagcaggacttcagaacagtgtttgatttttattttataaatttaagcattcaaattaggcaaatctttggctgcaggcagcaaaaacagctggacttatttaaaacaacttgtttttgagttttcttatatatatattgattatttgttttacacacatgcagtagcactttggtaagagttaaagagtaaagcagcttatgttgtcaggtcgttcttatctagagaagagctatagcagatctcggacaaactcagaatatattcactttcatttttgacaggattccctccacaactcagtttcatatattattccgtattacatttttgcagctaaattaccataaaatgtcagcaaatgtaaaaatttaatttctgaaaagcaccattagcccatttcccccaaattaaacgtaaatgttttttttcagcacatgttaccatgtctgacctgcaaaaatgctggagaaaaatgaaggaaaaaattatgtttttcagtttaattctgttaactgaagatattccaactcaaaaccagcctcatgctctgattagataatcttttacattgaacctttactctcaaagccatgtgtggagggggcttgtcactattgtaggctcactggattggtcatttagagtttcacagactcttaccagcatatatagtatttaattgtttcaaaaaaaatcaaactgtagttgttttggcgataggtctcacgcaacacatttttgtatgtgtgtgtgtgtgcgtgtgtgtgtgtgtgtgtgaaaaattgcattcattgacttcaggtagattaaggtatctttttattcattgccctcaggaaagttaaggtatcaatgagacccttaagccaatcatgtaataactgcatgtgtctggtccaggagaagtattgaataagccatttctactgcttactcatgtccctatttatgatttcaacatggatacatatttcagttctttctttttctcactatctgaaaatacatttccctccctctcttccccccaatatctccctttttttctctcttcctctatcttccaaaccccactttctccctcctccttttcctgtgttctcttaagcagatagcacatacccccacccagtaccaaatttcagaacacaagaaggtccagttcttcccccttcacataaaggaacatggtttgtcagcctttctcctgtttatgggtttcttccagcagaacagagacattgccaaccatattggatctgcttgctgtccaaaccagcaaactttcctgggcaaatcacaatcagtgagtaaatagacagcctttctgctgccttgggtttctgtgcagataaacagaaatgctctgattagaaaggaaatgaatggttccactcaaatgtcctgcaatttaggattgcagatttctgccttgaaatacctgtttctttgggacattccgtcctgatgatttttatttttgttggtttttatttttggggggaatgacatgtttgggtcttttatacatgaaaatttgtttgacaataatctcacaaaacatattttacatctgaacaaaatgcctttttgtttaccgtagcgtatacatttgttttgggatttttgtgtgtttgttgggaattttgtttttagccaggtcagtattgatgaggctgatcatttggctctttttttccttccagaagagttgcatcaacaaagttaattgtatttatgtatgtaaatagattttaagcttcattataaaatattgttaatgcctataactttttttcaatttttttgtgtgtgtttctaaggactttttcttaggtttgctaaatactgtagggaaaaaaatgcttctttctactttgtttattttagactttaaaatgagctacttcttattcacttttgtaaacagctaatagcatggttccaattttttttaagttcactttttttgttctaggggaaatgaatgtgcaaaaaaagaaaaagaactgttggttatttgtgttattctggatgtataaaaatcaatggaaaaaaataaactttcaaattgaaatgacggtataacacatctactgaaaaagcaacgggaaatgtggtcctatttaagccagcccccacctagggtctatttgtgtggcagttattgggtttggtcacaaaacatcctgaaaattcgtgcgtgggcttctttctccctggtacaaacgtatggaatgcttcttaaaggggaactgtcaagctggtgtcttcagccagatgacatgagagaatatcccagaaccctctctccaaggtgtttctagatagcacaggagagcaggcactgcactgtccacagtccacggtacacagtcgggtgggccgcctcccctctcctgggagcattcgtcgtgcccagcctgagcagggcagctggactgctgctgttcaggagccaccagagccttcctctctttgtaccacagtttcttctgtaaatccagtgttacaatcagtgtgaatggcaaataaacagtttgacaagtacatacaccata

SEQ ID NO: 178588 - DNA, 7274 bp, Homo sapiens
  Payload ID: 15199
  Gene Symbol: RUNX1
  Gene Name: runt-related transcription factor 1
  Uniprot ID: Q01196
  ENST ID: ENST00000344691
  CDS Start-End: 1579-2940
catagagccagcgggcgcgggcgggacgggcgccccgcggccggacccagccagggcaccacgctgcccggccctgcgccgccaggcacttctttccggggctcctagggacgccagaaggaagtcaacctctgctgcttctccttggcctgcgttggaccttcctttttttgttgtttttttttgtttttcccctttcttccttttgaattaactggcttcttggctggatgttttcaacttctttcctggctgcgaacttttccccaattgttttccttttacaacagggggagaaagtgctctgtggtccgaggcgagccgtgaagttgcgtgtgcgtggcagtgtgcgtggcaggatgtgcgtgcgtgtgtaacccgagccgcccgatctgtttcgatctgcgccgcggagccctccctcaaggcccgctccacctgctgcggttacgcggcgctcgtgggtgttcgtgcctcggagcagctaaccggcgggtgctgggcgacggtggaggagtatcgtctcgctgctgcccgagtcagggctgagtcacccagctgatgtagacagtggctgccttccgaagagtgcgtgtttgcatgtgtgtgactctgcggctgctcaactcccaacaaaccagaggaccagccacaaacttaaccaacatccccaaacccgagttcacagatgtgggagagctgtagaaccctgagtgtcatcgactgggccttcttatgattgttgttttaagattagctgaagatctctgaaacgctgaattttctgcactgagcgttttgacagaattcattgagagaacagagaacatgacaagtacttctagctcagcactgctccaactactgaagctgattttcaaggctacttaaaaaaatctgcagcgtacattaatggatttctgttgtgtttaaattctccacagattgtattgtaaatattttatgaagtagagcatatgtatatatttatatatacgtgcacatacattagtagcactacctttggaagtctcagctcttgcttttcgggactgaagccagttttgcatgataaaagtggccttgttacgggagataattgtgttctgttgggactttagacaaaactcacctgcaaaaaactgacaggcattaactactggaacttccaaataatgtgtttgctgatcgttttactcttcgcataaatattttaggaagtgtatgagaattttgccttcaggaacttttctaacagccaaagacagaacttaacctctgcaagcaagattcgtggaagatagtctccactttttaatgcactaagcaatcggttgctaggagcccatcctgggtcagaggccgatccgcagaaccagaacgttttcccctcctggactgttagtaacttagtctccctcctcccctaaccacccccgcccccccccaccccccgcagtaataaaggcccctgaacgtgtatgttggtctcccgggagctgcttgctgaagatccgcgcccctgtcgccgtctggtaggagctgtttgcagggtcctaactcaatcggcttgttgtgatgcgtatccccgtagatgccagcacgagccgccgcttcacgccgccttccaccgcgctgagcccaggcaagatgagcgaggcgttgccgctgggcgccccggacgccggcgctgccctggccggcaagctgaggagcggcgaccgcagcatggtggaggtgctggccgaccacccgggcgagctggtgcgcaccgacagccccaacttcctctgctccgtgctgcctacgcactggcgctgcaacaagaccctgcccatcgctttcaaggtggtggccctaggggatgttccagatggcactctggtcactgtgatggctggcaatgatgaaaactactcggctgagctgagaaatgctaccgcagccatgaagaaccaggttgcaagatttaatgacctcaggtttgtcggtcgaagtggaagagggaaaagcttcactctgaccatcactgtcttcacaaacccaccgcaagtcgccacctaccacagagccatcaaaatcacagtggatgggccccgagaacctcgaagacatcggcagaaactagatgatcagaccaagcccgggagcttgtccttttccgagcggctcagtgaactggagcagctgcggcgcacagccatgagggtcagcccacaccacccagcccccacgcccaaccctcgtgcctccctgaaccactccactgcctttaaccctcagcctcagagtcagatgcaggatacaaggcagatccaaccatccccaccgtggtcctacgatcagtcctaccaatacctgggatccattgcctctccttctgtgcacccagcaacgcccatttcacctggacgtgccagcggcatgacaaccctctctgcagaactttccagtcgactctcaacggcacccgacctgacagcgttcagcgacccgcgccagttccccgcgctgccctccatctccgacccccgcatgcactatccaggcgccttcacctactccccgacgccggtcacctcgggcatcggcatcggcatgtcggccatgggctcggccacgcgctaccacacctacctgccgccgccctaccccggctcgtcgcaagcgcagggaggcccgttccaagccagctcgccctcctaccacctgtactacggcgcctcggccggctcctaccagttctccatggtgggcggcgagcgctcgccgccgcgcatcctgccgccctgcaccaacgcctccaccggctccgcgctgctcaaccccagcctcccgaaccagagcgacgtggtggaggccgagggcagccacagcaactcccccaccaacatggcgccctccgcgcgcctggaggaggccgtgtggaggccctactgaggcgccaggcctggcccggctgggccccgcgggccgccgccttcgcctccgggcgcgcgggcctcctgttcgcgacaagcccgccgggatcccgggccctgggcccggccaccgtcctggggccgagggcgcccgacggccaggatctcgctgtaggtcaggcccgcgcagcctcctgcgcccagaagcccacgccgccgccgtctgctggcgccccggccctcgcggaggtgtccgaggcgacgcacctcgagggtgtccgccggccccagcacccaggggacgcgctggaaagcaaacaggaagattcccggagggaaactgtgaatgcttctgatttagcaatgctgtgaataaaaagaaagattttatacccttgacttaactttttaaccaagttgtttattccaaagagtgtggaattttggttggggtggggggagaggagggatgcaactcgccctgtttggcatctaattcttatttttaatttttccgcaccttatcaattgcaaaatgcgtatttgcatttgggtggtttttatttttatatacgtttatataaatatatataaattgagcttgcttctttcttgctttgaccatggaaagaaatatgattcccttttctttaagttttatttaacttttcttttggacttttgggtagttgtttttttttgttttgttttgtttttttgagaaacagctacagctttgggtcatttttaactactgtattcccacaaggaatccccagatatttatgtatcttgatgttcagacatttatgtgttgataattttttaattatttaaatgtacttatattaagaaaaatatcaagtactacattttcttttgttcttgatagtagccaaagttaaatgtatcacattgaagaaggctagaaaaaaagaatgagtaatgtgatcgcttggttatccagaagtattgtttacattaaactccctttcatgttaatcaaacaagtgagtagctcacgcagcaacgtttttaataggatttttagacactgagggtcactccaaggatcagaagtatggaattttctgccaggctcaacaagggtctcatatctaacttcctccttaaaacagagaaggtcaatctagttccagagggttgaggcaggtgccaataattacatctttggagaggatttgatttctgcccagggatttgctcaccccaaggtcatctgataatttcacagatgctgtgtaacagaacacagccaaagtaaactgtgtaggggagccacatttacataggaaccaaatcaatgaatttaggggttacgattatagcaatttaagggcccaccagaagcaggcctcgaggagtcaatttgcctctgtgtgcctcagtggagacaagtgggaaaacatggtcccacctgtgcgagaccccctgtcctgtgctgctcactcaacaacatctttgtgttgctttcaccaggctgagaccctaccctatggggtatatgggcttttacctgtgcaccagtgtgacaggaaagattcatgtcactactgtccgtggctacaattcaaaggtatccaatgtcgctgtaaattttatggcactatttttattggaggatttggtcagaatgcagttgttgtacaactcataaatactaactgctgattttgacacatgtgtgctccaaatgatctggtggttatttaacgtacctcttaaaattcgttgaaacgatttcaggtcaactctgaagagtatttgaaagcaggacttcagaacagtgtttgatttttattttataaatttaagcattcaaattaggcaaatctttggctgcaggcagcaaaaacagctggacttatttaaaacaacttgtttttgagttttcttatatatatattgattatttgttttacacacatgcagtagcactttggtaagagttaaagagtaaagcagcttatgttgtcaggtcgttcttatctagagaagagctatagcagatctcggacaaactcagaatatattcactttcatttttgacaggattccctccacaactcagtttcatatattattccgtattacatttttgcagctaaattaccataaaatgtcagcaaatgtaaaaatttaatttctgaaaagcaccattagcccatttcccccaaattaaacgtaaatgttttttttcagcacatgttaccatgtctgacctgcaaaaatgctggagaaaaatgaaggaaaaaattatgtttttcagtttaattctgttaactgaagatattccaactcaaaaccagcctcatgctctgattagataatcttttacattgaacctttactctcaaagccatgtgtggagggggcttgtcactattgtaggctcactggattggtcatttagagtttcacagactcttaccagcatatatagtatttaattgtttcaaaaaaaatcaaactgtagttgttttggcgataggtctcacgcaacacatttttgtatgtgtgtgtgtgtgcgtgtgtgtgtgtgtgtgtgaaaaattgcattcattgacttcaggtagattaaggtatctttttattcattgccctcaggaaagttaaggtatcaatgagacccttaagccaatcatgtaataactgcatgtgtctggtccaggagaagtattgaataagccatttctactgcttactcatgtccctatttatgatttcaacatggatacatatttcagttctttctttttctcactatctgaaaatacatttccctccctctcttccccccaatatctccctttttttctctcttcctctatcttccaaaccccactttctccctcctccttttcctgtgttctcttaagcagatagcacatacccccacccagtaccaaatttcagaacacaagaaggtccagttcttcccccttcacataaaggaacatggtttgtcagcctttctcctgtttatgggtttcttccagcagaacagagacattgccaaccatattggatctgcttgctgtccaaaccagcaaactttcctgggcaaatcacaatcagtgagtaaatagacagcctttctgctgccttgggtttctgtgcagataaacagaaatgctctgattagaaaggaaatgaatggttccactcaaatgtcctgcaatttaggattgcagatttctgccttgaaatacctgtttctttgggacattccgtcctgatgatttttatttttgttggtttttatttttggggggaatgacatgtttgggtcttttatacatgaaaatttgtttgacaataatctcacaaaacatattttacatctgaacaaaatgcctttttgtttaccgtagcgtatacatttgttttgggatttttgtgtgtttgttgggaattttgtttttagccaggtcagtattgatgaggctgatcatttggctctttttttccttccagaagagttgcatcaacaaagttaattgtatttatgtatgtaaatagattttaagcttcattataaaatattgttaatgcctataactttttttcaatttttttgtgtgtgtttctaaggactttttcttaggtttgctaaatactgtagggaaaaaaatgcttctttctactttgtttattttagactttaaaatgagctacttcttattcacttttgtaaacagctaatagcatggttccaattttttttaagttcactttttttgttctaggggaaatgaatgtgcaaaaaaagaaaaagaactgttggttatttgtgttattctggatgtataaaaatcaatggaaaaaaataaactttcaaattgaaatgacggtataacacatctactgaaaaagcaacgggaaatgtggtcctatttaagccagcccccacctagggtctatttgtgtggcagttattgggtttggtcacaaaacatcctgaaaattcgtgcgtgggcttctttctccctggtacaaacgtatggaatgcttcttaaaggggaactgtcaagctggtgtcttcagccagatgacatgagagaatatcccagaaccctctctccaaggtgtttctagatagcacaggagagcaggcactgcactgtccacagtccacggtacacagtcgggtgggccgcctcccctctcctgggagcattcgtcgtgcccagcctgagcagggcagctggactgctgctgttcaggagccaccagagccttcctctctttgtaccacagtttcttctgtaaatccagtgttacaatcagtgtgaatggcaaataaacagtttgacaagtacatacaccata

SEQ ID NO: 178589 - DNA, 2720 bp, Homo sapiens
  Payload ID: 15199
  Gene Symbol: RUNX1
  Gene Name: runt-related transcription factor 1
  Uniprot ID: Q01196
  ENST ID: ENST00000358356
  CDS Start-End: 1579-2331
catagagccagcgggcgcgggcgggacgggcgccccgcggccggacccagccagggcaccacgctgcccggccctgcgccgccaggcacttctttccggggctcctagggacgccagaaggaagtcaacctctgctgcttctccttggcctgcgttggaccttcctttttttgttgtttttttttgtttttcccctttcttccttttgaattaactggcttcttggctggatgttttcaacttctttcctggctgcgaacttttccccaattgttttccttttacaacagggggagaaagtgctctgtggtccgaggcgagccgtgaagttgcgtgtgcgtggcagtgtgcgtggcaggatgtgcgtgcgtgtgtaacccgagccgcccgatctgtttcgatctgcgccgcggagccctccctcaaggcccgctccacctgctgcggttacgcggcgctcgtgggtgttcgtgcctcggagcagctaaccggcgggtgctgggcgacggtggaggagtatcgtctcgctgctgcccgagtcagggctgagtcacccagctgatgtagacagtggctgccttccgaagagtgcgtgtttgcatgtgtgtgactctgcggctgctcaactcccaacaaaccagaggaccagccacaaacttaaccaacatccccaaacccgagttcacagatgtgggagagctgtagaaccctgagtgtcatcgactgggccttcttatgattgttgttttaagattagctgaagatctctgaaacgctgaattttctgcactgagcgttttgacagaattcattgagagaacagagaacatgacaagtacttctagctcagcactgctccaactactgaagctgattttcaaggctacttaaaaaaatctgcagcgtacattaatggatttctgttgtgtttaaattctccacagattgtattgtaaatattttatgaagtagagcatatgtatatatttatatatacgtgcacatacattagtagcactacctttggaagtctcagctcttgcttttcgggactgaagccagttttgcatgataaaagtggccttgttacgggagataattgtgttctgttgggactttagacaaaactcacctgcaaaaaactgacaggcattaactactggaacttccaaataatgtgtttgctgatcgttttactcttcgcataaatattttaggaagtgtatgagaattttgccttcaggaacttttctaacagccaaagacagaacttaacctctgcaagcaagattcgtggaagatagtctccactttttaatgcactaagcaatcggttgctaggagcccatcctgggtcagaggccgatccgcagaaccagaacgttttcccctcctggactgttagtaacttagtctccctcctcccctaaccacccccgcccccccccaccccccgcagtaataaaggcccctgaacgtgtatgttggtctcccgggagctgcttgctgaagatccgcgcccctgtcgccgtctggtaggagctgtttgcagggtcctaactcaatcggcttgttgtgatgcgtatccccgtagatgccagcacgagccgccgcttcacgccgccttccaccgcgctgagcccaggcaagatgagcgaggcgttgccgctgggcgccccggacgccggcgctgccctggccggcaagctgaggagcggcgaccgcagcatggtggaggtgctggccgaccacccgggcgagctggtgcgcaccgacagccccaacttcctctgctccgtgctgcctacgcactggcgctgcaacaagaccctgcccatcgctttcaaggtggtggccctaggggatgttccagatggcactctggtcactgtgatggctggcaatgatgaaaactactcggctgagctgagaaatgctaccgcagccatgaagaaccaggttgcaagatttaatgacctcaggtttgtcggtcgaagtggaagagggaaaagcttcactctgaccatcactgtcttcacaaacccaccgcaagtcgccacctaccacagagccatcaaaatcacagtggatgggccccgagaacctcgaagacatcggcagaaactagatgatcagaccaagcccgggagcttgtccttttccgagcggctcagtgaactggagcagctgcggcgcacagccatgagggtcagcccacaccacccagcccccacgcccaaccctcgtgcctccctgaaccactccactgcctttaaccctcagcctcagagtcagatgcaggaggaagacacagcaccctggagatgttaaggcagaagtcagttcttctgtccatccctctccccagccaggatagagctatcttttccatctcatcctcagaagagactcagaagaaagatgacagccctcagaatgcacgttatgaggaaggcagaatgtgggtctgtaattcctccgtgtcccttctccccctctgcaaaccgtcgtaacaataatagttcctaacacatgggacaattgtgaggattaaatgagttagcctgcagaaatcacttgatgcacagcacatgggaagcattgtgtgtatttattaatccttcacaaagtctttgagatatatttttatcaaatatttagcatggatcccggtacactttcaatacttaataaatggtcaatgttattctttttcacta

SEQ ID NO: 178590 - DNA, 822 bp, Homo sapiens
  Payload ID: 15199
  Gene Symbol: RUNX1
  Gene Name: runt-related transcription factor 1
  ENST ID: ENST00000399237
  CDS Start-End: 54-822
ggagttggcagcgcacgccggaccgggggcggggccctccgagctccgcgaaaatgcccgcagcaccgcggggaccggcgcagggggaagcggccgcccgcacgcgaagccgggatgccagcacgagccgccgcttcacgccgccttccaccgcgctgagcccaggcaagatgagcgaggcgttgccgctgggcgccccggacgccggcgctgccctggccggcaagctgaggagcggcgaccgcagcatggtggaggtgctggccgaccacccgggcgagctggtgcgcaccgacagccccaacttcctctgctccgtgctgcctacgcactggcgctgcaacaagaccctgcccatcgctttcaaggtggtggccctaggggatgttccagatggcactctggtcactgtgatggctggcaatgatgaaaactactcggctgagctgagaaatgctaccgcagccatgaagaaccaggttgcaagatttaatgacctcaggtttgtcggtcgaagtggaagagggaaaagcttcactctgaccatcactgtcttcacaaacccaccgcaagtcgccacctaccacagagccatcaaaatcacagtggatgggccccgagaacctcgaagacatcggcagaaactagatgatcagaccaagcccgggagcttgtccttttccgagcggctcagtgaactggagcagctgcggcgcacagccatgagggtcagcccacaccacccagcccccacgcccaaccctcgtgcctccctgaaccactccactgcctttaaccctcagcctcagagtcagatgcagg

SEQ ID NO: 178591 - DNA, 1590 bp, Homo sapiens
  Payload ID: 15199
  Gene Symbol: RUNX1
  Gene Name: runt-related transcription factor 1
  ENST ID: ENST00000399240
  CDS Start-End: 72-1241
tgaagatccgcgcccctgtcgccgtctggtaggagctgtttgcagggtcctaactcaatcggcttgttgtgatgcgtatccccgtagatgccagcacgagccgccgcttcacgccgccttccaccgcgctgagcccaggcaagatgagcgaggcgttgccgctgggcgccccggacgccggcgctgccctggccggcaagctgaggagcggcgaccgcagcatggtggaggtgctggccgaccacccgggcgagctggtgcgcaccgacagccccaacttcctctgctccgtgctgcctacgcactggcgctgcaacaagaccctgcccatcgctttcaaggtggtggccctaggggatgttccagatggcactctggtcactgtgatggctggcaatgatgaaaactactcggctgagctgagaaatgctaccgcagccatgaagaaccaggttgcaagatttaatgacctcaggtttgtcggtcgaagtggaagagggaaaagcttcactctgaccatcactgtcttcacaaacccaccgcaagtcgccacctaccacagagccatcaaaatcacagtggatgggccccgagaacctcgaaatacaaggcagatccaaccatccccaccgtggtcctacgatcagtcctaccaatacctgggatccattgcctctccttctgtgcacccagcaacgcccatttcacctggacgtgccagcggcatgacaaccctctctgcagaactttccagtcgactctcaacggcacccgacctgacagcgttcagcgacccgcgccagttccccgcgctgccctccatctccgacccccgcatgcactatccaggcgccttcacctactccccgacgccggtcacctcgggcatcggcatcggcatgtcggccatgggctcggccacgcgctaccacacctacctgccgccgccctaccccggctcgtcgcaagcgcagggaggcccgttccaagccagctcgccctcctaccacctgtactacggcgcctcggccggctcctaccagttctccatggtgggcggcgagcgctcgccgccgcgcatcctgccgccctgcaccaacgcctccaccggctccgcgctgctcaaccccagcctcccgaaccagagcgacgtggtggaggccgagggcagccacagcaactcccccaccaacatggcgccctccgcgcgcctggaggaggccgtgtggaggccctactgaggcgccaggcctggcccggctgggccccgcgggccgccgccttcgcctccgggcgcgcgggcctcctgttcgcgacaagcccgccgggatcccgggccctgggcccggccaccgtcctggggccgagggcgcccgacggccaggatctcgctgtaggtcaggcccgcgcagcctcctgcgcccagaagcccacgccgccgccgtctgctggcgccccggccctcgcggaggtgtccgaggcgacgcacctcgagggtgtccgccggccccagcacccaggggacgcgctggaaagcaaacaggaagattcccggagggaaactgtgaatgcttctgatttagcaatgct

SEQ ID NO: 178592 - DNA, 610 bp, Homo sapiens
  Payload ID: 15199
  Gene Symbol: RUNX1
  Gene Name: runt-related transcription factor 1
  ENST ID: ENST00000455571
  CDS Start-End: 191-610
ctttgggcctcataaacaaccacagaaccacaagttgggtagcctggcagtgtcagaagtctgaacccagcatagtggtcagcaggcaggacgaatcacactgaatgcaaaccacagggtttcgcagcgtggtaaaagaaatcattgagtcccccgccttcagaagagggtgcattttcaggaggaagcgatggcttcagacagcatatttgagtcatttccttcgtacccacagtgcttcatgagagatgccagcacgagccgccgcttcacgccgccttccaccgcgctgagcccaggcaagatgagcgaggcgttgccgctgggcgccccggacgccggcgctgccctggccggcaagctgaggagcggcgaccgcagcatggtggaggtgctggccgaccacccgggcgagctggtgcgcaccgacagccccaacttcctctgctccgtgctgcctacgcactggcgctgcaacaagaccctgcccatcgctttcaaggtggtggccctaggggatgttccagatggcactctggtcactgtgatggctggcaatgatgaaaactactcggctgagctgagaaatgctaccgcagccatgaagaac

SEQ ID NO: 178593 - DNA, 346 bp, Homo sapiens
  Payload ID: 15199
  Gene Symbol: RUNX1
  Gene Name: runt-related transcription factor 1
  ENST ID: ENST00000416754
  CDS Start-End: 250-346
cacaagttgggtagcctggcagtgtcagaagtctgaacccagcatagtggtcagcaggcaggacgaatcacactgaatgcaaaccacagggtttcgcagcgtggtgagcatcaccaacccacagccaaggcggcgctggctttttttttttttttaatctttaacaatttgaatatttgtttttacaaaggtaaaagaaatcattgagtcccccgccttcagaagagggtgcattttcaggaggaagcgatggcttcagacagcatatttgagtcatttccttcgtacccacagtgcttcatgagagaatgcatacttggaatgaatccttctagagacgtccacg

SEQ ID NO: 178594 - DNA, 5967 bp, Homo sapiens
  Payload ID: 15199
  Gene Symbol: RUNX1
  Gene Name: runt-related transcription factor 1
  Uniprot ID: Q01196
  ENST ID: ENST00000437180
  CDS Start-End: 191-1633
ctttgggcctcataaacaaccacagaaccacaagttgggtagcctggcagtgtcagaagtctgaacccagcatagtggtcagcaggcaggacgaatcacactgaatgcaaaccacagggtttcgcagcgtggtaaaagaaatcattgagtcccccgccttcagaagagggtgcattttcaggaggaagcgatggcttcagacagcatatttgagtcatttccttcgtacccacagtgcttcatgagagaatgcatacttggaatgaatccttctagagacgtccacgatgccagcacgagccgccgcttcacgccgccttccaccgcgctgagcccaggcaagatgagcgaggcgttgccgctgggcgccccggacgccggcgctgccctggccggcaagctgaggagcggcgaccgcagcatggtggaggtgctggccgaccacccgggcgagctggtgcgcaccgacagccccaacttcctctgctccgtgctgcctacgcactggcgctgcaacaagaccctgcccatcgctttcaaggtggtggccctaggggatgttccagatggcactctggtcactgtgatggctggcaatgatgaaaactactcggctgagctgagaaatgctaccgcagccatgaagaaccaggttgcaagatttaatgacctcaggtttgtcggtcgaagtggaagagggaaaagcttcactctgaccatcactgtcttcacaaacccaccgcaagtcgccacctaccacagagccatcaaaatcacagtggatgggccccgagaacctcgaagacatcggcagaaactagatgatcagaccaagcccgggagcttgtccttttccgagcggctcagtgaactggagcagctgcggcgcacagccatgagggtcagcccacaccacccagcccccacgcccaaccctcgtgcctccctgaaccactccactgcctttaaccctcagcctcagagtcagatgcaggatacaaggcagatccaaccatccccaccgtggtcctacgatcagtcctaccaatacctgggatccattgcctctccttctgtgcacccagcaacgcccatttcacctggacgtgccagcggcatgacaaccctctctgcagaactttccagtcgactctcaacggcacccgacctgacagcgttcagcgacccgcgccagttccccgcgctgccctccatctccgacccccgcatgcactatccaggcgccttcacctactccccgacgccggtcacctcgggcatcggcatcggcatgtcggccatgggctcggccacgcgctaccacacctacctgccgccgccctaccccggctcgtcgcaagcgcagggaggcccgttccaagccagctcgccctcctaccacctgtactacggcgcctcggccggctcctaccagttctccatggtgggcggcgagcgctcgccgccgcgcatcctgccgccctgcaccaacgcctccaccggctccgcgctgctcaaccccagcctcccgaaccagagcgacgtggtggaggccgagggcagccacagcaactcccccaccaacatggcgccctccgcgcgcctggaggaggccgtgtggaggccctactgaggcgccaggcctggcccggctgggccccgcgggccgccgccttcgcctccgggcgcgcgggcctcctgttcgcgacaagcccgccgggatcccgggccctgggcccggccaccgtcctggggccgagggcgcccgacggccaggatctcgctgtaggtcaggcccgcgcagcctcctgcgcccagaagcccacgccgccgccgtctgctggcgccccggccctcgcggaggtgtccgaggcgacgcacctcgagggtgtccgccggccccagcacccaggggacgcgctggaaagcaaacaggaagattcccggagggaaactgtgaatgcttctgatttagcaatgctgtgaataaaaagaaagattttatacccttgacttaactttttaaccaagttgtttattccaaagagtgtggaattttggttggggtggggggagaggagggatgcaactcgccctgtttggcatctaattcttatttttaatttttccgcaccttatcaattgcaaaatgcgtatttgcatttgggtggtttttatttttatatacgtttatataaatatatataaattgagcttgcttctttcttgctttgaccatggaaagaaatatgattcccttttctttaagttttatttaacttttcttttggacttttgggtagttgtttttttttgttttgttttgtttttttgagaaacagctacagctttgggtcatttttaactactgtattcccacaaggaatccccagatatttatgtatcttgatgttcagacatttatgtgttgataattttttaattatttaaatgtacttatattaagaaaaatatcaagtactacattttcttttgttcttgatagtagccaaagttaaatgtatcacattgaagaaggctagaaaaaaagaatgagtaatgtgatcgcttggttatccagaagtattgtttacattaaactccctttcatgttaatcaaacaagtgagtagctcacgcagcaacgtttttaataggatttttagacactgagggtcactccaaggatcagaagtatggaattttctgccaggctcaacaagggtctcatatctaacttcctccttaaaacagagaaggtcaatctagttccagagggttgaggcaggtgccaataattacatctttggagaggatttgatttctgcccagggatttgctcaccccaaggtcatctgataatttcacagatgctgtgtaacagaacacagccaaagtaaactgtgtaggggagccacatttacataggaaccaaatcaatgaatttaggggttacgattatagcaatttaagggcccaccagaagcaggcctcgaggagtcaatttgcctctgtgtgcctcagtggagacaagtgggaaaacatggtcccacctgtgcgagaccccctgtcctgtgctgctcactcaacaacatctttgtgttgctttcaccaggctgagaccctaccctatggggtatatgggcttttacctgtgcaccagtgtgacaggaaagattcatgtcactactgtccgtggctacaattcaaaggtatccaatgtcgctgtaaattttatggcactatttttattggaggatttggtcagaatgcagttgttgtacaactcataaatactaactgctgattttgacacatgtgtgctccaaatgatctggtggttatttaacgtacctcttaaaattcgttgaaacgatttcaggtcaactctgaagagtatttgaaagcaggacttcagaacagtgtttgatttttattttataaatttaagcattcaaattaggcaaatctttggctgcaggcagcaaaaacagctggacttatttaaaacaacttgtttttgagttttcttatatatatattgattatttgttttacacacatgcagtagcactttggtaagagttaaagagtaaagcagcttatgttgtcaggtcgttcttatctagagaagagctatagcagatctcggacaaactcagaatatattcactttcatttttgacaggattccctccacaactcagtttcatatattattccgtattacatttttgcagctaaattaccataaaatgtcagcaaatgtaaaaatttaatttctgaaaagcaccattagcccatttcccccaaattaaacgtaaatgttttttttcagcacatgttaccatgtctgacctgcaaaaatgctggagaaaaatgaaggaaaaaattatgtttttcagtttaattctgttaactgaagatattccaactcaaaaccagcctcatgctctgattagataatcttttacattgaacctttactctcaaagccatgtgtggagggggcttgtcactattgtaggctcactggattggtcatttagagtttcacagactcttaccagcatatatagtatttaattgtttcaaaaaaaatcaaactgtagttgttttggcgataggtctcacgcaacacatttttgtatgtgtgtgtgtgtgcgtgtgtgtgtgtgtgtgtgaaaaattgcattcattgacttcaggtagattaaggtatctttttattcattgccctcaggaaagttaaggtatcaatgagacccttaagccaatcatgtaataactgcatgtgtctggtccaggagaagtattgaataagccatttctactgcttactcatgtccctatttatgatttcaacatggatacatatttcagttctttctttttctcactatctgaaaatacatttccctccctctcttccccccaatatctccctttttttctctcttcctctatcttccaaaccccactttctccctcctccttttcctgtgttctcttaagcagatagcacatacccccacccagtaccaaatttcagaacacaagaaggtccagttcttcccccttcacataaaggaacatggtttgtcagcctttctcctgtttatgggtttcttccagcagaacagagacattgccaaccatattggatctgcttgctgtccaaaccagcaaactttcctgggcaaatcacaatcagtgagtaaatagacagcctttctgctgccttgggtttctgtgcagataaacagaaatgctctgattagaaaggaaatgaatggttccactcaaatgtcctgcaatttaggattgcagatttctgccttgaaatacctgtttctttgggacattccgtcctgatgatttttatttttgttggtttttatttttggggggaatgacatgtttgggtcttttatacatgaaaatttgtttgacaataatctcacaaaacatattttacatctgaacaaaatgcctttttgtttaccgtagcgtatacatttgttttgggatttttgtgtgtttgttgggaattttgtttttagccaggtcagtattgatgaggctgatcatttggctctttttttccttccagaagagttgcatcaacaaagttaattgtatttatgtatgtaaatagattttaagcttcattataaaatattgttaatgcctataactttttttcaatttttttgtgtgtgtttctaaggactttttcttaggtttgctaaatactgtagggaaaaaaatgcttctttctactttgtttattttagactttaaaatgagctacttcttattcacttttgtaaacagctaatagcatggttccaattttttttaagttcactttttttgttctaggggaaatgaatgtgcaaaaaaagaaaaagaactgttggttatttgtgttattctggatgtataaaaatcaatggaaaaaaataaactttcaaattgaaatgacggtataacacatctactgaaaaagcaacgggaaatgtggtcctatttaagccagcccccacctagggtctatttgtgtggcagttattgggtttggtcacaaaacatcctgaaaattcgtgcgtgggcttctttctccctggtacaaacgtatggaatgcttcttaaaggggaactgtcaagctggtgtcttcagccagatgacatgagagaatatcccagaaccctctctccaaggtgtttctagatagcacaggagagcaggcactgcactgtccacagtccacggtacacagtcgggtgggccgcctcccctctcctgggagcattcgtcgtgcccagcctgagcagggcagctggactgctgctgttcaggagccaccagagccttcctctctttgtaccacagtttcttctgtaaatccagtgttacaatcagtgtgaatggcaaataaacagtttgacaagtacatacaccata

SEQ ID NO: 178595 - DNA, 1710 bp, Homo sapiens
  Payload ID: 15199
  Gene Symbol: RUNX1
  Gene Name: runt-related transcription factor 1
  ENST ID: ENST00000482318
  CDS Start-End: 181-297
cataaacaaccacagaaccacaagttgggtagcctggcagtgtcagaagtctgaacccagcatagtggtcagcaggcaggacgaatcacactgaatgcaaaccacagggtttcgcagcgtggtaaaagaaatcattgagtcccccgccttcagaagagggtgcattttcaggaggaagcgatggcttcagacagcatatttgagtcatttccttcgtacccacagtgcttcatgagaggtggtggccctaggggatgttccagatggcactctggtcactgtgatggctggcaatgatgaaaactactcggctgagctgagaaatgctaccgcagccatgaagaaccaggttgcaagatttaatgacctcaggtttgtcggtcgaagtggaagagggaaaagcttcactctgaccatcactgtcttcacaaacccaccgcaagtcgccacctaccacagagccatcaaaatcacagtggatgggccccgagaacctcgaagacatcggcagaaactagatgatcagaccaagcccgggagcttgtccttttccgagcggctcagtgaactggagcagctgcggcgcacagccatgagggtcagcccacaccacccagcccccacgcccaaccctcgtgcctccctgaaccactccactgcctttaaccctcagcctcagagtcagatgcaggatacaaggcagatccaaccatccccaccgtggtcctacgatcagtcctaccaatacctgggatccattgcctctccttctgtgcacccagcaacgcccatttcacctggacgtgccagcggcatgacaaccctctctgcagaactttccagtcgactctcaacggcacccgacctgacagcgttcagcgacccgcgccagttccccgcgctgccctccatctccgacccccgcatgcactatccaggcgccttcacctactccccgacgccggtcacctcgggcatcggcatcggcatgtcggccatgggctcggccacgcgctaccacacctacctgccgccgccctaccccggctcgtcgcaagcgcagggaggcccgttccaagccagctcgccctcctaccacctgtactacggcgcctcggccggctcctaccagttctccatggtgggcggcgagcgctcgccgccgcgcatcctgccgccctgcaccaacgcctccaccggctccgcgctgctcaaccccagcctcccgaaccagagcgacgtggtggaggccgagggcagccacagcaactcccccaccaacatggcgccctccgcgcgcctggaggaggccgtgtggaggccctactgaggcgccaggcctggcccggctgggccccgcgggccgccgccttcgcctccgggcgcgcgggcctcctgttcgcgacaagcccgccgggatcccgggccctgggcccggccaccgtcctggggccgagggcgcccgacggccaggatctcgctgtaggtcaggcccgcgcagcctcctgcgcccagaagcccacgccgccgccgtctgctggcgccccggccctcgcggaggtgtccgaggcgacgcacctcgagggtgtccgccggccccagcacccaggggacgcgctggaaagcaaacaggaagattcccggagggaaactgtgaatgcttctgatttagcaatgctgtgaataaaaagaaagattttatacccttga

SEQ ID NO: 178596 - DNA, 1582 bp, Homo sapiens
  Payload ID: 15199
  Gene Symbol: RUNX1
  Gene Name: runt-related transcription factor 1
  ENST ID: ENST00000475045
  CDS Start-End: 1435-1582
aaactgctgcccttctagtgctgatgctggactgaagcttcctgcaggctgggatcctgtctgcatatctcgcaatgtgttcccaggaccaggcgtagtttctgaactgtgaagccaactatgcagcgatgactgtacccacagatgttaatgattaagaacaagtgcgacagagatcaacagctctgcgttcaagtccaaactcttcccctcggcaaggcacgtgacctccctgtgcctcaggttcttgcagagtggaaatgcccacttcacagaatggctgagggtgtggatgaacggtggacgctcctgcccggcacccatgggtgctcacgacgattgtgttttactgttggctgcaatatgtcatgacttatcatgtgtgatccttgagtgaataggcagctgcgagcctgagcggactcctatgaaccagtcttctccagcaatagaccctccttcaactcgtggtagcctgtacgccaagggtgacagactggaaagcaggatccaccggttcatctatgggaaaaggagggggaatgagatcaaggattgaggacgctaatggagatggggtttcaccatgttgcccaggctggtcttgaactcctagactcaagtgatccactcgccttggcctcccaaaatgctggaattacagtttatgtattgaagaacctgggccgtttgacccacggagtggttctcaatctggatttggctgattgggcactcatgttgcaggttaacatgctcctcggttttctgacctcctagaagttggcagctggatccagaagcttcaacagcctcaggttcagcctcctgggctggcggattgtaggccaaagcttgatttgggtatcagcaagttaaaactcaggcacatccatctttcctgatccaagtaaattctagtgggcaagaggaagagaagagaaactacaacatcattatcttactgctggaggcagcagattacggacccctgactgtgatgtgtcaaatgcactgtgtgacaaccaagaccctacacatctggggggcacttcaggattcctccaggcggcagttgctggcctagactcacttcttcaggagggaggttcgccctggaaaagctgatttgcatttctgctgggatcgatgccgtggagactgaatacattgaggtctccaggtgaaagaagaaagcttaacctggcttctgaattccaagagcacacggcaaagtgagcgagcccggcacccagctgtcgtccacttgcatttagtgtagctgccacccagcaattaacgcgcctgggctctcctttggaaaccgagcagagaagaacaataccacagcgagttcgcctggacccgaaagcaggtaaaagaaatcattgagtcccccgccttcagaagagggtgcattttcaggaggaagcgatggcttcagacagcatatttgagtcatttccttcgtacccacagtgcttcatgagagaatgcatacttggaatgaatccttctagagacgtccacgatgccagcacgagccgccgcttcacgccgccttccaccgcgctgagcccag

SEQ ID NO: 178597 - DNA, 7284 bp, Homo sapiens
  Payload ID: 15200
  Gene Symbol: RUNX1T1
  Gene Name: runt-related transcription factor 1
  translocated to, 1 (cyclin D-related)
  Uniprot ID: Q06455
  ENST ID: ENST00000265814
  CDS Start-End: 195-2009
tatgcaggcaacatagcccttcatagcaaagcagtctgaaaaattggcacctgcaggatttgcatgtgaaaaaaacggagtcagttgcattttgccggagtctattactaaaagattgatctctgggctggtgaacataatctctgtcccagtcagaaaaggagagaggaaattagcagagcgattggtggagaatgatatctgtcaaaagaaacacttggagagcactgagtttagtaataggtgactgccggaaaaaagggaactttgaatattgtcaagatcgtactgagaagcactccacaatgccagactcacctgtggatgtgaagacgcaatctaggctgactcctccaacaatgccacctcccccaactactcaaggagctccaagaaccagttcatttacaccgacaacgttaactaatggcacgagccattctcctacagccttgaatggcgccccctcaccacccaatggcttcagcaatgggccttcctcttcttcctcctcctctctggctaatcaacagctgcccccagcctgtggtgccaggcaactcagcaagctgaaaaggttccttactaccctgcagcagtttggcaatgacatttcacccgagataggagaaagagttcgcaccctcgttctgggactagtgaactccactttgacaattgaagaatttcattccaaactgcaagaagctactaacttcccactgagaccttttgtcatcccatttttgaaggccaacttgcccctgctgcagcgtgagctcctccactgcgcaagactggccaaacagaaccctgcccagtacctcgcccagcatgaacagctgcttctggatgccagcaccacctcacctgttgactcctcagagctgcttctcgatgtgaacgaaaacgggaagaggcgaactccagacagaaccaaagaaaatggctttgacagagagcctttgcactcagaacatccaagcaagcgaccatgcactattagcccaggccagcggtacagtccaaataacggcttatcctaccagcccaatggcctgcctcaccctaccccacctccacctcagcattaccgtttggatgatatggccattgcccaccactacagggactcctatcgacaccccagccacagggacctcagggacagaaacagacctatggggttgcatggcacacgtcaagaagaaatgattgatcacagactaacagacagagaatgggcagaagagtggaaacatcttgaccatctgttaaactgcataatggacatggtagaaaaaacaaggcgatctctcaccgtactaaggcggtgtcaagaagcagaccgggaagaattgaattactggatccggcggtacagtgacgccgaggacttaaaaaaaggtggcggcagtagcagcagccactctaggcagcagagtcccgtcaacccagacccagttgcactagacgcgcatcgggaattccttcacaggcctgcgtctggatacgtgccagaggagatctggaagaaagctgaggaggccgtcaatgaggtgaagcgccaggcgatgacggagctgcagaaggccgtgtctgaggcggagcggaaagcccacgacatgatcacaacagagagggccaagatggagcgcacggtcgccgaggccaaacggcaggcggcggaggacgcactggcagttatcaatcagcaggaggattcaagcgagagttgctggaattgtggccgtaaagcgagtgaaacctgcagtggctgtaacacagcccgatactgtggctcattttgccagcacaaagactgggagaagcaccatcacatctgtggacagaccctgcaggcccagcagcagggagacacacctgcagtcagctcctctgtcacgcccaacagcggggctgggagcccgatggacacaccaccagcagccactccgaggtcaaccaccccgggaaccccttccaccatagagacaacccctcgctagacgtgaactcagaactgtcggaggaaagacaacacaaccaacgcgaaaccaattcctcatcctcagatgctcaaagttgttttttttgtttgtttgtttattagatgaattatcctatttcagtacttcagcaagagagaacctaactgtatcttgaggtggtagtaaaacacagagggccagtaacgggtcgtaatgacttattgtggataacaaagatatcttttctttagagaactgaaaagagagcagagaatataacatgaaatgatagatttgacctcctccctgttattttcaagtagctgggattttaaactagatgacctcattaaccgatgctttaccaaacagcaaaccaagagattgctaattgctgttgaaagcaaaaatgctaatattaaaagtcacaatgttctttatatacaataatggaaaaaaaaaaaagaggaaaaccctcaagggcatgagcattggatacagcagtagacattttaacaagaagatgaatggcgtccgtgggttgctaactgaactttgaagacccgctacaaaacgcgcagatgtgcagcagattggaaggagacacagatgttcggtttttttcctgtttctgaaaagaaataataatatccaggtcaacagaatgaaaaatgaaagatgatttgcaatgggatgtatgaatacagcagcaagaaaaaaaaatgccataatacaaaaggctccatatatatatatatatatatatatatacacacacacacacgcacatatacacacacacacacacacacacacacacacacacacacacacacacacacacacaagtaagagactcagcctgcagttaattagcattctggcagttttgacatcagccagctgccctaaataacccttcaacgtttcttcacttttgcaaggttccacagagtaagacattgggtctattccagctcattcattttatattgaaaaaaataattttaaaaatggtggcttcagctccagcccctttccaaaatttttcaaccccaccctgtttggatttttaattaaaaactagtagttctcttggtgttaaaacacttctgtcctgtgaggtttcccaatggtgtttttcttgtaaatgtgttggacaaatgtgaagatgcattgtagtttaaccatatgcccacatttagtctctttattcctagttggtgagaaacctgtatctttctatgctgcttttatatctgtatgtattagtgatatttctctagtagttaaaaaaaaaaaaaggaaaaaaagactctttttggttgtcctcaagaaaagaaaagaagaaaagctatctttcggagctgctatttcactctcttataggatttttttttttcctgaaaaccagcatgcttcacggaatgctaacatattggtgtttttgtaagagggatgtacataaatgtattttgcactgtcacaatgactccctaggcatgctttttgtttttttttttttttttttgagcaaattctttttaaatatgctagagccatttcatcaagtttagctgtagcatagagtagtcgtggaatttttcttttttttttttttaaatcattattagggacttttttaaaaaaataaaataacaagatatcctactttaaaaaaaaaggacagtgcatgcatattgctgtaaggtcgtttaagtatttctaattttacaaaagtaaaaatcattagagctccaaatgctgaggtgtagattgacagctttaacactgctgaatgccaggttatacagtattcttacaaaaagggaagtcagccaaagactgatctgatggaccaaaatcggaattttgaaaagcaccagtactactttccaaatgatcagcaggttaaacatgttcagcaaggtatagtatgaatccattaacccttcgttgtccagggtccagaccagaactacttgttagttttgaaaacagtagcccaggatgtggttgtgtgctttaggaaagtcagcagtgctgcaggctgtgtagacaaccaaagtttacaaggctgggaagacacttctccaaatacatatacaccaggcatttctttaaaatcaaaaacaatccattagctttggggcggggggtggggggagggttaaatgtaggccttggaaacagttttaagtggcttttaagtatctgcatagaggcaatcctaaggtttgctttaagtctcttaaatctaacatttttaaaagcatttcttccctgtattttcatatacaagttggttttaattttgtttgggtggtgttattttttttaaatgactttttagtttagaaagttctgatgagcaaataaatacatctatctacatgttggaagtccatctgccagcacacctgcttaaagtgaaatgaaagcacataaccaggctctgaatgggttatattttatcatggtgctcccagaatcctttgacctcactctgctttctagtctgcttgtgacactggacagtcctttcttacagagctattatatgttctaggctacgaagggttaaataatcccaaaaatgaggtatgtcatacccacacgtctttatctctagaagctgtgatgtatgtgaaacagcactgttattcttaacactagtgtgtaaaataaggattagtacagtacgtctcattactttttaattcagggcaccctgagtgaaaacaaatacaaaaaaaaatccctaactctgagctctatctctgattcctcttcctccttcccctcttcctcctcttcctctcctcctgttttgctacattctcctcagtggcaaaaagtttcactctacctctgacagcatgtatattgcaccagtagctaacaaaaactggtctagtcaaaccaaatgggcacaaaagaaccaggataccaaaagttaagctcatacagctgcaaaccatatcacttcttggtaacaatgcagacctcataaacctaaagaagagaaagaaaagaaaacttttgttactttccttttttgcttgtcacttatatacaggctatgtgagaatataatttgtaggtataacacattaagaaaaagttatcttcattggatagaattgaatggtggtcgctgataggaatagggcgtcctctagctcttatctctgtctcttactcttttctctttctctttttctctgtcatgagactgtgtgtgacagggccacctgtcttttttttttcttaaattttttttttttttatgtgtaggtgcatgtcttggggatttaaaaatttcaaggctggtttacttatgcaaagcatgcctacgtctggaatacttagggaaagaaagcgactccatgttgtccgaattcctcaagggacagaaaaaaaattggagactgttgaaatgcagatttgaagtaatttttttaaaatattattttgggttctgcgacattgtgaaaaattaaagttgttgtgcaatacttaattcagacatgtaccacaagttaatggtagactaacactggggggtggggtctaggcatcatgcttttgtcagcatactcttgagcttttaagtctactatgtctgaactgtggtttcttgtttatccttttttccttagttggactgtaatgtatggtctgtcaacctgtgaatctttaaagtatgattcaggtattgttgtattctttactgtgtaataaaaaagttgaaaaaaatctggatcctctgtctccctcgtccccggtgtgccatggttgcccaccagtgaccccagcctgaggagtccatcctccatggtgctgaatcaaatctgtagagtttattcagctacaaagcgtggctctgtaacaggagttggcttatccatgcgtgttgagtagggaatgatgtcagaactttgcaaaagtcgagctcattcataaggggatgtttctcaggcaggaggagtaggaagagtgggaggagaattactaccttccataggaaaggagagcttggcttgcctagattagctgctgcatagatagcagaggcccttttggctgtgttttgataaaattagaaatgagtacctaaatctggatcactctgctcagagaggttcgtgccaacctcatgaggctctgactcttgtcaggttgcttggctgccttgtgcatacccgaatggcagatcagctgacatgacatggaactgctctatctgccttgtcccctctcctctaattaaaagtcgctaccattgtcactcttggttatgtagttaatatccactgtggctatctccaacttgctgggacatccagttatctcctctgacacatattttttcattctctagttacaaagtttgttagagtttgaaaaacaaacccttctcccctaccctgtgaatgctgttagtttttatgtgtagttttcaaaacacagattatcttatatactgtgttgtagcagaaattcctgtttcctctgaatgttctgactttatagaccaaaataatcgttgcaaaaaatcaaggatggcacagcaggtgcatgagcccgtgtctggagaaaggttatgaaggtgaatgctggttacatgggagggtgacttggagccctctagtttccttcttgtgccagctgggttcctgtttcaaggccaggcttctctaacttgtcttcctgggaaatgtagcttttccaagaatttggtagtgcacaccaggaaaaactaggtatcagaacagatttttttttaaatagtggaaacaccctcactcccacactttggacagttagggttggatatttaatttcatagttactctttttttccacagaagaaaggccagcctgacccaagttgcctatttttaatgtgttactgcatcttattttctcttcaaagtgaaaaaggccagaaactagcagatagaaatggaacccgttgacttagttcccttataagaagttcttgcaaacacctctgtgacgttttcattcaagtggatatgttggacaaataggaaacagttttagtttacgcgaacagtatgagacttccaggtggtggacgccatttttttagaagtgttgatgatgtatttgataacattataaaagtatgtgtctcccgtgaaagaacattgagctatttccctggaatggatggggaagaaatgagcaaaggagtgctgttctgtatgggtgtctatacccttattccaaggtgaataaataaagttgtgtttgcctaatcatg

SEQ ID NO: 178598 - DNA, 2370 bp, Homo sapiens
  Payload ID: 15200
  Gene Symbol: RUNX1T1
  Gene Name: runt-related transcription factor 1
  translocated to, 1 (cyclin D-related)
  Uniprot ID: Q06455
  ENST ID: ENST00000360348
  CDS Start-End: 212-1915
caggagaagtgaagatgtaacatgttatctgtcgctcctcttagctggcggagagaatttacatttaaagattagcagagtgagaaagagaaatctgccttttgttgtgtggggtgaggaggaggcatctacccctggccttgacgctatctcccatcacctctgctatccagacaggactcaccgagatcgtactgagaagcactccacaatgccagactcacctgtggatgtgaagacgcaatctaggctgactcctccaacaatgccacctcccccaactactcaaggagctccaagaaccagttcatttacaccgacaacgttaactaatggcacgagccattctcctacagccttgaatggcgccccctcaccacccaatggcttcagcaatgggccttcctcttcttcctcctcctctctggctaatcaacagctgcccccagcctgtggtgccaggcaactcagcaagctgaaaaggttccttactaccctgcagcagtttggcaatgacatttcacccgagataggagaaagagttcgcaccctcgttctgggactagtgaactccactttgacaattgaagaatttcattccaaactgcaagaagctactaacttcccactgagaccttttgtcatcccatttttgaaggccaacttgcccctgctgcagcgtgagctcctccactgcgcaagactggccaaacagaaccctgcccagtacctcgcccagcatgaacagctgcttctggatgccagcaccacctcacctgttgactcctcagagctgcttctcgatgtgaacgaaaacgggaagaggcgaactccagacagaaccaaagaaaatggctttgacagagagcctttgcactcagaacatccaagcaagcgaccatgcactattagcccaggccagcggtacagtccaaataacggcttatcctaccagcccaatggcctgcctcaccctaccccacctccacctcagcattaccgtttggatgatatggccattgcccaccactacagggactcctatcgacaccccagccacagggacctcagggacagaaacagacctatggggttgcatggcacacgtcaagaagaaatgattgatcacagactaacagacagagaatgggcagaagagtggaaacatcttgaccatctgttaaactgcataatggacatggtagaaaaaacaaggcgatctctcaccgtactaaggcggtgtcaagaagcagaccgggaagaattgaattactggatccggcggtacagtgacgccgaggacttaaaaaaaggtggcggcagtagcagcagccactctaggcagcagagtcccgtcaacccagacccagttgcactagacgcgcatcgggaattccttcacaggcctgcgtctggatacgtgccagaggagatctggaagaaagctgaggaggccgtcaatgaggtgaagcgccaggcgatgacggagctgcagaaggccgtgtctgaggcggagcggaaagcccacgacatgatcacaacagagagggccaagatggagcgcacggtcgccgaggccaaacggcaggcggcggaggacgcactggcagttatcaatcagcaggaggattcaagcgagagttgctggaattgtggccgtaaagcgagtgaaacctgcagtggctgtaacacagcccgatactgtggctcattttgccagcacaaagactgggagaagcaccatcacatctgtggacagaccctgcaggcccagcagcagggagacacacctgcagtcagctcctctgtcacgcccaacagcggggctgggagcccgatggacacaccaccagcagccactccgaggtcaaccaccccgggaaccccttccaccatagagacaacccctcgctagacgtgaactcagaactgtcggaggaaagacaacacaaccaacgcgaaaccaattcctcatcctcagatgctcaaagttgttttttttgtttgtttgtttattagatgaattatcctatttcagtacttcagcaagagagaacctaactgtatcttgaggtggtagtaaaacacagagggccagtaacgggtcgtaatgacttattgtggataacaaagatatcttttctttagagaactgaaaagagagcagagaatataacatgaaatgatagatttgacctcctccctgttattttcaagtagctgggattttaaactagatgacctcattaaccgatgctttaccaaacagcaaaccaagagattgctaattgctgttgaaagcaaaaatgctaatattaaaagtcacaatgttctttatatacaataatggaaaaaaaaaaaagaggaaaa

SEQ ID NO: 178599 - DNA, 3463 bp, Homo sapiens
  Payload ID: 15200
  Gene Symbol: RUNX1T1
  Gene Name: runt-related transcription factor 1
  translocated to, 1 (cyclin D-related)
  Uniprot ID: Q06455
  ENST ID: ENST00000396218
  CDS Start-End: 412-2145
tgaataaattattcggcatttagcttatcattctgaatttcactttttgctttttggtgctctgaaacttgcagagagaggtggagtgctaaggggagggtaggggttgtgatactttgcacacacatccctgtcattgttctgcctaaagagacagggctgggttcaaggccacatgtgctcctgtcatcctccacatttctgctccaagtgcaatccggagtgtcagctctccatctgtctctgcctggcaggcgcacgcgcccagcaccctgcctccggcgatgccgccccagcccctctgatggccctcctctctgctgccactcattccagaacaggaggcatgagcccggaacgcgcttgcttttaggagacagccactttctgtgtggtacgctggattcaaggatgcctgatcgtactgagaagcactccacaatgccagactcacctgtggatgtgaagacgcaatctaggctgactcctccaacaatgccacctcccccaactactcaaggagctccaagaaccagttcatttacaccgacaacgttaactaatggcacgagccattctcctacagccttgaatggcgccccctcaccacccaatggcttcagcaatgggccttcctcttcttcctcctcctctctggctaatcaacagctgcccccagcctgtggtgccaggcaactcagcaagctgaaaaggttccttactaccctgcagcagtttggcaatgacatttcacccgagataggagaaagagttcgcaccctcgttctgggactagtgaactccactttgacaattgaagaatttcattccaaactgcaagaagctactaacttcccactgagaccttttgtcatcccatttttgaaggccaacttgcccctgctgcagcgtgagctcctccactgcgcaagactggccaaacagaaccctgcccagtacctcgcccagcatgaacagctgcttctggatgccagcaccacctcacctgttgactcctcagagctgcttctcgatgtgaacgaaaacgggaagaggcgaactccagacagaaccaaagaaaatggctttgacagagagcctttgcactcagaacatccaagcaagcgaccatgcactattagcccaggccagcggtacagtccaaataacggcttatcctaccagcccaatggcctgcctcaccctaccccacctccacctcagcattaccgtttggatgatatggccattgcccaccactacagggactcctatcgacaccccagccacagggacctcagggacagaaacagacctatggggttgcatggcacacgtcaagaagaaatgattgatcacagactaacagacagagaatgggcagaagagtggaaacatcttgaccatctgttaaactgcataatggacatggtagaaaaaacaaggcgatctctcaccgtactaaggcggtgtcaagaagcagaccgggaagaattgaattactggatccggcggtacagtgacgccgaggacttaaaaaaaggtggcggcagtagcagcagccactctaggcagcagagtcccgtcaacccagacccagttgcactagacgcgcatcgggaattccttcacaggcctgcgtctggatacgtgccagaggagatctggaagaaagctgaggaggccgtcaatgaggtgaagcgccaggcgatgacggagctgcagaaggccgtgtctgaggcggagcggaaagcccacgacatgatcacaacagagagggccaagatggagcgcacggtcgccgaggccaaacggcaggcggcggaggacgcactggcagttatcaatcagcaggaggattcaagcgagagttgctggaattgtggccgtaaagcgagtgaaacctgcagtggctgtaacacagcccgatactgtggctcattttgccagcacaaagactgggagaagcaccatcacatctgtggacagaccctgcaggcccagcagcagggagacacacctgcagtcagctcctctgtcacgcccaacagcggggctgggagcccgatggacacaccaccagcagccactccgaggtcaaccaccccgggaaccccttccaccatagagacaacccctcgctagacgtgaactcagaactgtcggaggaaagacaacacaaccaacgcgaaaccaattcctcatcctcagatgctcaaagttgttttttttgtttgtttgtttattagatgaattatcctatttcagtacttcagcaagagagaacctaactgtatcttgaggtggtagtaaaacacagagggccagtaacgggtcgtaatgacttattgtggataacaaagatatcttttctttagagaactgaaaagagagcagagaatataacatgaaatgatagatttgacctcctccctgttattttcaagtagctgggattttaaactagatgacctcattaaccgatgctttaccaaacagcaaaccaagagattgctaattgctgttgaaagcaaaaatgctaatattaaaagtcacaatgttctttatatacaataatggaaaaaaaaaaaagaggaaaaccctcaagggcatgagcattggatacagcagtagacattttaacaagaagatgaatggcgtccgtgggttgctaactgaactttgaagacccgctacaaaacgcgcagatgtgcagcagattggaaggagacacagatgttcggtttttttcctgtttctgaaaagaaataataatatccaggtcaacagaatgaaaaatgaaagatgatttgcaatgggatgtatgaatacagcagcaagaaaaaaaaatgccataatacaaaaggctccatatatatatatatatatatatatatacacacacacacacgcacatatacacacacacacacacacacacacacacacacacacacacacacacacacacacaagtaagagactcagcctgcagttaattagcattctggcagttttgacatcagccagctgccctaaataacccttcaacgtttcttcacttttgcaaggttccacagagtaagacattgggtctattccagctcattcattttatattgaaaaaaataattttaaaaatggtggcttcagctccagcccctttccaaaatttttcaaccccaccctgtttggatttttaattaaaaactagtagttctcttggtgttaaaacacttctgtcctgtgaggtttcccaatggtgtttttcttgtaaatgtgttggacaaatgtgaagatgcattgtagtttaaccatatgcccacatttagtctctttattcctagttggtgagaaacctgtatctttctatgctgcttttatatctgtatgtattagtgatatttctctagtagttaaaaaaaaaaaaaggaaaaaaagactctttttggttgtcctcaag

SEQ ID NO: 178600 - DNA, 2450 bp, Homo sapiens
  Payload ID: 15200
  Gene Symbol: RUNX1T1
  Gene Name: runt-related transcription factor 1
  translocated to, 1 (cyclin D-related)
  Uniprot ID: Q06455
  ENST ID: ENST00000422361
  CDS Start-End: 298-2001
tataacactaccaaggtagcatctgcctaagccagaaataacaataggatataatataacctagttacaaatgaggtcctgccatctgtgctataccttcttaagtggggtttggatgataaaatcctgatttaaacgtcagtagataagtgtattttattgatagaagatgttgaatttcttctgttcacttgcttttaaaaaagataaaccccacttgaaaaactgaggtgcttaaggagtaaaataatatgttcctggtggcatcctccagatcgtactgagaagcactccacaatgccagactcacctgtggatgtgaagacgcaatctaggctgactcctccaacaatgccacctcccccaactactcaaggagctccaagaaccagttcatttacaccgacaacgttaactaatggcacgagccattctcctacagccttgaatggcgccccctcaccacccaatggcttcagcaatgggccttcctcttcttcctcctcctctctggctaatcaacagctgcccccagcctgtggtgccaggcaactcagcaagctgaaaaggttccttactaccctgcagcagtttggcaatgacatttcacccgagataggagaaagagttcgcaccctcgttctgggactagtgaactccactttgacaattgaagaatttcattccaaactgcaagaagctactaacttcccactgagaccttttgtcatcccatttttgaaggccaacttgcccctgctgcagcgtgagctcctccactgcgcaagactggccaaacagaaccctgcccagtacctcgcccagcatgaacagctgcttctggatgccagcaccacctcacctgttgactcctcagagctgcttctcgatgtgaacgaaaacgggaagaggcgaactccagacagaaccaaagaaaatggctttgacagagagcctttgcactcagaacatccaagcaagcgaccatgcactattagcccaggccagcggtacagtccaaataacggcttatcctaccagcccaatggcctgcctcaccctaccccacctccacctcagcattaccgtttggatgatatggccattgcccaccactacagggactcctatcgacaccccagccacagggacctcagggacagaaacagacctatggggttgcatggcacacgtcaagaagaaatgattgatcacagactaacagacagagaatgggcagaagagtggaaacatcttgaccatctgttaaactgcataatggacatggtagaaaaaacaaggcgatctctcaccgtactaaggcggtgtcaagaagcagaccgggaagaattgaattactggatccggcggtacagtgacgccgaggacttaaaaaaaggtggcggcagtagcagcagccactctaggcagcagagtcccgtcaacccagacccagttgcactagacgcgcatcgggaattccttcacaggcctgcgtctggatacgtgccagaggagatctggaagaaagctgaggaggccgtcaatgaggtgaagcgccaggcgatgacggagctgcagaaggccgtgtctgaggcggagcggaaagcccacgacatgatcacaacagagagggccaagatggagcgcacggtcgccgaggccaaacggcaggcggcggaggacgcactggcagttatcaatcagcaggaggattcaagcgagagttgctggaattgtggccgtaaagcgagtgaaacctgcagtggctgtaacacagcccgatactgtggctcattttgccagcacaaagactgggagaagcaccatcacatctgtggacagaccctgcaggcccagcagcagggagacacacctgcagtcagctcctctgtcacgcccaacagcggggctgggagcccgatggacacaccaccagcagccactccgaggtcaaccaccccgggaaccccttccaccatagagacaacccctcgctagacgtgaactcagaactgtcggaggaaagacaacacaaccaacgcgaaaccaattcctcatcctcagatgctcaaagttgttttttttgtttgtttgtttattagatgaattatcctatttcagtacttcagcaagagagaacctaactgtatcttgaggtggtagtaaaacacagagggccagtaacgggtcgtaatgacttattgtggataacaaagatatcttttctttagagaactgaaaagagagcagagaatataacatgaaatgatagatttgacctcctccctgttattttcaagtagctgggattttaaactagatgacctcattaaccgatgctttaccaaacagcaaaccaagagattgctaattgctgttgaaagcaaaaatgctaatattaaaagtcacaatgttctttatatacaataatggaaaaaaaaaaaaga

SEQ ID NO: 178601 - DNA, 7454 bp, Homo sapiens
  Payload ID: 15200
  Gene Symbol: RUNX1T1
  Gene Name: runt-related transcription factor 1
  translocated to, 1 (cyclin D-related)
  ENST ID: ENST00000436581
  CDS Start-End: 188-2179
ccctcctgcctgtccctttctgtcttctctctctctctcccacttttcctccctctcccgctccgtctcacacgcaccctctgtttattttcctgcctccatctgggccctgctgatattgtaatcaccctgatgcacgttggcttctctcctctccctcctgcgctcacacactcactcacacacaatgtgccatcctgacaaggcttttacttctgataagctccaatgtgtgtttaatgaatacaaagccgcggtctgggtgccgcctcggccgcggccgctctcccgcgctcctttgccagaagctggcggagagaatttacatttaaagattagcagagtgagaaagagaaatctgccttttgttgtgtggggtgaggaggaggcatctacccctggccttgacgctatctcccatcacctctgctatccagacaggactcaccgagatcgtactgagaagcactccacaatgccagactcacctgtggatgtgaagacgcaatctaggctgactcctccaacaatgccacctcccccaactactcaaggagctccaagaaccagttcatttacaccgacaacgttaactaatggcacgagccattctcctacagccttgaatggcgccccctcaccacccaatggcttcagcaatgggccttcctcttcttcctcctcctctctggctaatcaacagctgcccccagcctgtggtgccaggcaactcagcaagctgaaaaggttccttactaccctgcagcagtttggcaatgacatttcacccgagataggagaaagagttcgcaccctcgttctgggactagtgaactccactttgacaattgaagaatttcattccaaactgcaagaagctactaacttcccactgagaccttttgtcatcccatttttgaaggccaacttgcccctgctgcagcgtgagctcctccactgcgcaagactggccaaacagaaccctgcccagtacctcgcccagcatgaacagctgcttctggatgccagcaccacctcacctgttgactcctcagagctgcttctcgatgtgaacgaaaacgggaagaggcgaactccagacagaaccaaagaaaatggctttgacagagagcctttgcactcagaacatccaagcaagcgaccatgcactattagcccaggccagcggtacagtccaaataacggcttatcctaccagcccaatggcctgcctcaccctaccccacctccacctcagcattaccgtttggatgatatggccattgcccaccactacagggactcctatcgacaccccagccacagggacctcagggacagaaacagacctatggggttgcatggcacacgtcaagaagaaatgattgatcacagactaacagacagagaatgggcagaagagtggaaacatcttgaccatctgttaaactgcataatggacatggtagaaaaaacaaggcgatctctcaccgtactaaggcggtgtcaagaagcagaccgggaagaattgaattactggatccggcggtacagtgacgccgaggacttaaaaaaaggtggcggcagtagcagcagccactctaggcagcagagtcccgtcaacccagacccagttgcactagacgcgcatcgggaattccttcacaggcctgcgtctggatacgtgccagaggagatctggaagaaagctgaggaggccgtcaatgaggtgaagcgccaggcgatgacggagctgcagaaggccgtgtctgaggcggagcggaaagcccacgacatgatcacaacagagagggccaagatggagcgcacggtcgccgaggccaaacggcaggcggcggaggacgcactggcagttatcaatcagcaggaggattcaagcgagagttgctggaattgtggccgtaaagcgagtgaaacctgcagtggctgtaacacagcccgatactgtggctcattttgccagcacaaagactgggagaagcaccatcacatctgtggacagaccctgcaggcccagcagcagggagacacacctgcagtcagctcctctgtcacgcccaacagcggggctgggagcccgatggacacaccaccagcagccactccgaggtcaaccaccccgggaaccccttccaccatagagacaacccctcgctagacgtgaactcagaactgtcggaggaaagacaacacaaccaacgcgaaaccaattcctcatcctcagatgctcaaagttgttttttttgtttgtttgtttattagatgaattatcctatttcagtacttcagcaagagagaacctaactgtatcttgaggtggtagtaaaacacagagggccagtaacgggtcgtaatgacttattgtggataacaaagatatcttttctttagagaactgaaaagagagcagagaatataacatgaaatgatagatttgacctcctccctgttattttcaagtagctgggattttaaactagatgacctcattaaccgatgctttaccaaacagcaaaccaagagattgctaattgctgttgaaagcaaaaatgctaatattaaaagtcacaatgttctttatatacaataatggaaaaaaaaaaaagaggaaaaccctcaagggcatgagcattggatacagcagtagacattttaacaagaagatgaatggcgtccgtgggttgctaactgaactttgaagacccgctacaaaacgcgcagatgtgcagcagattggaaggagacacagatgttcggtttttttcctgtttctgaaaagaaataataatatccaggtcaacagaatgaaaaatgaaagatgatttgcaatgggatgtatgaatacagcagcaagaaaaaaaaatgccataatacaaaaggctccatatatatatatatatatatatatatacacacacacacacgcacatatacacacacacacacacacacacacacacacacacacacacacacacacacacacaagtaagagactcagcctgcagttaattagcattctggcagttttgacatcagccagctgccctaaataacccttcaacgtttcttcacttttgcaaggttccacagagtaagacattgggtctattccagctcattcattttatattgaaaaaaataattttaaaaatggtggcttcagctccagcccctttccaaaatttttcaaccccaccctgtttggatttttaattaaaaactagtagttctcttggtgttaaaacacttctgtcctgtgaggtttcccaatggtgtttttcttgtaaatgtgttggacaaatgtgaagatgcattgtagtttaaccatatgcccacatttagtctctttattcctagttggtgagaaacctgtatctttctatgctgcttttatatctgtatgtattagtgatatttctctagtagttaaaaaaaaaaaaaggaaaaaaagactctttttggttgtcctcaagaaaagaaaagaagaaaagctatctttcggagctgctatttcactctcttataggatttttttttttcctgaaaaccagcatgcttcacggaatgctaacatattggtgtttttgtaagagggatgtacataaatgtattttgcactgtcacaatgactccctaggcatgctttttgtttttttttttttttttttgagcaaattctttttaaatatgctagagccatttcatcaagtttagctgtagcatagagtagtcgtggaatttttcttttttttttttttaaatcattattagggacttttttaaaaaaataaaataacaagatatcctactttaaaaaaaaaggacagtgcatgcatattgctgtaaggtcgtttaagtatttctaattttacaaaagtaaaaatcattagagctccaaatgctgaggtgtagattgacagctttaacactgctgaatgccaggttatacagtattcttacaaaaagggaagtcagccaaagactgatctgatggaccaaaatcggaattttgaaaagcaccagtactactttccaaatgatcagcaggttaaacatgttcagcaaggtatagtatgaatccattaacccttcgttgtccagggtccagaccagaactacttgttagttttgaaaacagtagcccaggatgtggttgtgtgctttaggaaagtcagcagtgctgcaggctgtgtagacaaccaaagtttacaaggctgggaagacacttctccaaatacatatacaccaggcatttctttaaaatcaaaaacaatccattagctttggggcggggggtggggggagggttaaatgtaggccttggaaacagttttaagtggcttttaagtatctgcatagaggcaatcctaaggtttgctttaagtctcttaaatctaacatttttaaaagcatttcttccctgtattttcatatacaagttggttttaattttgtttgggtggtgttattttttttaaatgactttttagtttagaaagttctgatgagcaaataaatacatctatctacatgttggaagtccatctgccagcacacctgcttaaagtgaaatgaaagcacataaccaggctctgaatgggttatattttatcatggtgctcccagaatcctttgacctcactctgctttctagtctgcttgtgacactggacagtcctttcttacagagctattatatgttctaggctacgaagggttaaataatcccaaaaatgaggtatgtcatacccacacgtctttatctctagaagctgtgatgtatgtgaaacagcactgttattcttaacactagtgtgtaaaataaggattagtacagtacgtctcattactttttaattcagggcaccctgagtgaaaacaaatacaaaaaaaaatccctaactctgagctctatctctgattcctcttcctccttcccctcttcctcctcttcctctcctcctgttttgctacattctcctcagtggcaaaaagtttcactctacctctgacagcatgtatattgcaccagtagctaacaaaaactggtctagtcaaaccaaatgggcacaaaagaaccaggataccaaaagttaagctcatacagctgcaaaccatatcacttcttggtaacaatgcagacctcataaacctaaagaagagaaagaaaagaaaacttttgttactttccttttttgcttgtcacttatatacaggctatgtgagaatataatttgtaggtataacacattaagaaaaagttatcttcattggatagaattgaatggtggtcgctgataggaatagggcgtcctctagctcttatctctgtctcttactcttttctctttctctttttctctgtcatgagactgtgtgtgacagggccacctgtcttttttttttcttaaattttttttttttttatgtgtaggtgcatgtcttggggatttaaaaatttcaaggctggtttacttatgcaaagcatgcctacgtctggaatacttagggaaagaaagcgactccatgttgtccgaattcctcaagggacagaaaaaaaattggagactgttgaaatgcagatttgaagtaatttttttaaaatattattttgggttctgcgacattgtgaaaaattaaagttgttgtgcaatacttaattcagacatgtaccacaagttaatggtagactaacactggggggtggggtctaggcatcatgcttttgtcagcatactcttgagcttttaagtctactatgtctgaactgtggtttcttgtttatccttttttccttagttggactgtaatgtatggtctgtcaacctgtgaatctttaaagtatgattcaggtattgttgtattctttactgtgtaataaaaaagttgaaaaaaatctggatcctctgtctccctcgtccccggtgtgccatggttgcccaccagtgaccccagcctgaggagtccatcctccatggtgctgaatcaaatctgtagagtttattcagctacaaagcgtggctctgtaacaggagttggcttatccatgcgtgttgagtagggaatgatgtcagaactttgcaaaagtcgagctcattcataaggggatgtttctcaggcaggaggagtaggaagagtgggaggagaattactaccttccataggaaaggagagcttggcttgcctagattagctgctgcatagatagcagaggcccttttggctgtgttttgataaaattagaaatgagtacctaaatctggatcactctgctcagagaggttcgtgccaacctcatgaggctctgactcttgtcaggttgcttggctgccttgtgcatacccgaatggcagatcagctgacatgacatggaactgctctatctgccttgtcccctctcctctaattaaaagtcgctaccattgtcactcttggttatgtagttaatatccactgtggctatctccaacttgctgggacatccagttatctcctctgacacatattttttcattctctagttacaaagtttgttagagtttgaaaaacaaacccttctcccctaccctgtgaatgctgttagtttttatgtgtagttttcaaaacacagattatcttatatactgtgttgtagcagaaattcctgtttcctctgaatgttctgactttatagaccaaaataatcgttgcaaaaaatcaaggatggcacagcaggtgcatgagcccgtgtctggagaaaggttatgaaggtgaatgctggttacatgggagggtgacttggagccctctagtttccttcttgtgccagctgggttcctgtttcaaggccaggcttctctaacttgtcttcctgggaaatgtagcttttccaagaatttggtagtgcacaccaggaaaaactaggtatcagaacagatttttttttaaatagtggaaacaccctcactcccacactttggacagttagggttggatatttaatttcatagttactctttttttccacagaagaaaggccagcctgacccaagttgcctatttttaatgtgttactgcatcttattttctcttcaaagtgaaaaaggccagaaactagcagatagaaatggaacccgttgacttagttcccttataagaagttcttgcaaacacctctgtgacgttttcattcaagtggatatgttggacaaataggaaacagttttagtttacgcgaacagtatgagacttccaggtggtggacgccatttttttagaagtgttgatgatgtatttgataacattataaaagtatgtgtctcccgtgaaagaacattgagctatttccctggaatggatggggaagaaatgagcaaaggagtgctgttctgtatgggtgtctatacccttattccaaggtgaataaataaagttgtgtttgcctaatcatg

SEQ ID NO: 178602 - DNA, 585 bp, Homo sapiens
  Payload ID: 15200
  Gene Symbol: RUNX1T1
  Gene Name: runt-related transcription factor 1
  translocated to, 1 (cyclin D-related)
  ENST ID: ENST00000521054
  CDS Start-End: 72-585
aacataagtgggaagctatttattcccttgttgctgaggttggttgagatcgtactgagaagcactccacaatgccagactcacctgtggatgtgaagacgcaatctaggctgactcctccaacaatgccacctcccccaactactcaaggagctccaagaaccagttcatttacaccgacaacgttaactaatggcacgagccattctcctacagccttgaatggcgccccctcaccacccaatggcttcagcaatgggccttcctcttcttcctcctcctctctggctaatcaacagctgcccccagcctgtggtgccaggcaactcagcaagctgaaaaggttccttactaccctgcagcagtttggcaatgacatttcacccgagataggagaaagagttcgcaccctcgttctgggactagtgaactccactttgacaattgaagaatttcattccaaactgcaagaagctactaacttcccactgagaccttttgtcatcccatttttgaaggccaacttgcccctgctgcagcgtgagctcctccactgcgcaagactggccaaacagaaccctgccc

SEQ ID NO: 178603 - DNA, 574 bp, Homo sapiens
  Payload ID: 15200
  Gene Symbol: RUNX1T1
  Gene Name: runt-related transcription factor 1
  translocated to, 1 (cyclin D-related)
  ENST ID: ENST00000520556
  CDS Start-End: 300-574
gattcagaagtcgataagaccaggagaagtgaagatgtaacatgttatctgtcgctcctcttagctggcggagagaatttacatttaaagattagcagagtgagaaagagaaatctgccttttgttgtgtggggtgaggaggaggcatctacccctggccttgacgctatctcccatcacctctgctatccagacaggactcaccgagataaaccccacttgaaaaactgaggtgcttaaggagtaaaataatatgttcctggtggcatcctccagatcgtactgagaagcactccacaatgccagactcacctgtggatgtgaagacgcaatctaggctgactcctccaacaatgccacctcccccaactactcaaggagctccaagaaccagttcatttacaccgacaacgttaactaatggcacgagccattctcctacagccttgaatggcgccccctcaccacccaatggcttcagcaatgggccttcctcttcttcctcctcctctctggctaatcaacagctgcccccagcctgtggtgccaggcaactcagcaagctgaaaaggtt

SEQ ID NO: 178604 - DNA, 553 bp, Homo sapiens
  Payload ID: 15200
  Gene Symbol: RUNX1T1
  Gene Name: runt-related transcription factor 1
  translocated to, 1 (cyclin D-related)
  ENST ID: ENST00000518449
  CDS Start-End: 380-553
ctctctccctctctccctttccaaatgattcagaagtcgataagaccaggagaagtgaagatgtaacatgttatctgtcgctcctcttagctggcggagagaatttacatttaaagattagcagagtgagaaagagaaatctgccttttgttgtgtggggtgaggaggaggcatctacccctggccttgacgctatctcccatcacctctgctatccagacaggactcaccgagtatcaaatgataagaactgagcacactggatgaaataatacttgcactgggagcactaagaaaagattgatctctgggctggtgaacataatctctgtcccagtcagaaaaggagagaggaaattagcagagcgattggtggagaatgatatctgtcaaaagaaacacttggagagcactgagtttagtaataggtgactgccggaaaaaagggaactttgaatattgtcaaggcgcacgcgcccagcaccctgcctccggcgatgccgccccagcccctctgatggccctcctctctgctgccactcattccagaaca

SEQ ID NO: 178605 - DNA, 556 bp, Homo sapiens
  Payload ID: 15200
  Gene Symbol: RUNX1T1
  Gene Name: runt-related transcription factor 1
  translocated to, 1 (cyclin D-related)
  ENST ID: ENST00000518823
  CDS Start-End: 319-556
aatgaatacaaagccgcggtctgggtgccgcctcggccgcggccgctctcccgcgctcctttgccagaagaaaagattgatctctgggctggtgaacataatctctgtcccagtcagaaaaggagagaggaaattagcagagcgattggtggagaatgatatctgtcaaaagaaacacttggagagcactgagtttagtaataggtgactgccggaaaaaagggaactttgaatattgtcaagaacaggaggcatgagcccggaacgcgcttgcttttaggagacagccactttctgtgtggtacgctggattcaaggatgcctgatcgtactgagaagcactccacaatgccagactcacctgtggatgtgaagacgcaatctaggctgactcctccaacaatgccacctcccccaactactcaaggagctccaagaaccagttcatttacaccgacaacgttaactaatggcacgagccattctcctacagccttgaatggcgccccctcaccacccaatggcttcagcaatgggccttcctcttcttcctcct

SEQ ID NO: 178606 - DNA, 7537 bp, Homo sapiens
  Payload ID: 15200
  Gene Symbol: RUNX1T1
  Gene Name: runt-related transcription factor 1
  translocated to, 1 (cyclin D-related)
  Uniprot ID: Q06455
  ENST ID: ENST00000523629
  CDS Start-End: 456-2270
atcacatttgtctgccacagcagcaacaacagaaaagcggagggagggagggaggcgggaggaggggagcagagctccgcaagtcttgggctctgcgtggaggttgcgtttggctggcgtccccgaccccgggctttttgcacggcagctctctctgcgcagcgccgggcggccgtagtcgctccgcggcgcgactccgcggtctcgtggcgagcgcgcgtgggcgagtggccgcggacactctggcctcgcgagggaagccgcgccgcgtcctcgccccgtcgccccgcgggccggccgagacgacgggaagttttatttgcagctcggagcctgtggcggatggtgggactctccggccctgtgcagtaaaagattgatctctgggctggtgaacataatctctgtcccagtcagaaaaggagagaggaaattagcagagcgattggtggagaatgatatctgtcaaaagaaacacttggagagcactgagtttagtaataggtgactgccggaaaaaagggaactttgaatattgtcaagatcgtactgagaagcactccacaatgccagactcacctgtggatgtgaagacgcaatctaggctgactcctccaacaatgccacctcccccaactactcaaggagctccaagaaccagttcatttacaccgacaacgttaactaatggcacgagccattctcctacagccttgaatggcgccccctcaccacccaatggcttcagcaatgggccttcctcttcttcctcctcctctctggctaatcaacagctgcccccagcctgtggtgccaggcaactcagcaagctgaaaaggttccttactaccctgcagcagtttggcaatgacatttcacccgagataggagaaagagttcgcaccctcgttctgggactagtgaactccactttgacaattgaagaatttcattccaaactgcaagaagctactaacttcccactgagaccttttgtcatcccatttttgaaggccaacttgcccctgctgcagcgtgagctcctccactgcgcaagactggccaaacagaaccctgcccagtacctcgcccagcatgaacagctgcttctggatgccagcaccacctcacctgttgactcctcagagctgcttctcgatgtgaacgaaaacgggaagaggcgaactccagacagaaccaaagaaaatggctttgacagagagcctttgcactcagaacatccaagcaagcgaccatgcactattagcccaggccagcggtacagtccaaataacggcttatcctaccagcccaatggcctgcctcaccctaccccacctccacctcagcattaccgtttggatgatatggccattgcccaccactacagggactcctatcgacaccccagccacagggacctcagggacagaaacagacctatggggttgcatggcacacgtcaagaagaaatgattgatcacagactaacagacagagaatgggcagaagagtggaaacatcttgaccatctgttaaactgcataatggacatggtagaaaaaacaaggcgatctctcaccgtactaaggcggtgtcaagaagcagaccgggaagaattgaattactggatccggcggtacagtgacgccgaggacttaaaaaaaggtggcggcagtagcagcagccactctaggcagcagagtcccgtcaacccagacccagttgcactagacgcgcatcgggaattccttcacaggcctgcgtctggatacgtgccagaggagatctggaagaaagctgaggaggccgtcaatgaggtgaagcgccaggcgatgacggagctgcagaaggccgtgtctgaggcggagcggaaagcccacgacatgatcacaacagagagggccaagatggagcgcacggtcgccgaggccaaacggcaggcggcggaggacgcactggcagttatcaatcagcaggaggattcaagcgagagttgctggaattgtggccgtaaagcgagtgaaacctgcagtggctgtaacacagcccgatactgtggctcattttgccagcacaaagactgggagaagcaccatcacatctgtggacagaccctgcaggcccagcagcagggagacacacctgcagtcagctcctctgtcacgcccaacagcggggctgggagcccgatggacacaccaccagcagccactccgaggtcaaccaccccgggaaccccttccaccatagagacaacccctcgctagacgtgaactcagaactgtcggaggaaagacaacacaaccaacgcgaaaccaattcctcatcctcagatgctcaaagttgttttttttgtttgtttgtttattagatgaattatcctatttcagtacttcagcaagagagaacctaactgtatcttgaggtggtagtaaaacacagagggccagtaacgggtcgtaatgacttattgtggataacaaagatatcttttctttagagaactgaaaagagagcagagaatataacatgaaatgatagatttgacctcctccctgttattttcaagtagctgggattttaaactagatgacctcattaaccgatgctttaccaaacagcaaaccaagagattgctaattgctgttgaaagcaaaaatgctaatattaaaagtcacaatgttctttatatacaataatggaaaaaaaaaaaagaggaaaaccctcaagggcatgagcattggatacagcagtagacattttaacaagaagatgaatggcgtccgtgggttgctaactgaactttgaagacccgctacaaaacgcgcagatgtgcagcagattggaaggagacacagatgttcggtttttttcctgtttctgaaaagaaataataatatccaggtcaacagaatgaaaaatgaaagatgatttgcaatgggatgtatgaatacagcagcaagaaaaaaaaatgccataatacaaaaggctccatatatatatatatatatatatatatacacacacacacacgcacatatacacacacacacacacacacacacacacacacacacacacacacacacacacacaagtaagagactcagcctgcagttaattagcattctggcagttttgacatcagccagctgccctaaataacccttcaacgtttcttcacttttgcaaggttccacagagtaagacattgggtctattccagctcattcattttatattgaaaaaaataattttaaaaatggtggcttcagctccagcccctttccaaaatttttcaaccccaccctgtttggatttttaattaaaaactagtagttctcttggtgttaaaacacttctgtcctgtgaggtttcccaatggtgtttttcttgtaaatgtgttggacaaatgtgaagatgcattgtagtttaaccatatgcccacatttagtctctttattcctagttggtgagaaacctgtatctttctatgctgcttttatatctgtatgtattagtgatatttctctagtagttaaaaaaaaaaaaaggaaaaaaagactctttttggttgtcctcaagaaaagaaaagaagaaaagctatctttcggagctgctatttcactctcttataggatttttttttttcctgaaaaccagcatgcttcacggaatgctaacatattggtgtttttgtaagagggatgtacataaatgtattttgcactgtcacaatgactccctaggcatgctttttgtttttttttttttttttttgagcaaattctttttaaatatgctagagccatttcatcaagtttagctgtagcatagagtagtcgtggaatttttcttttttttttttttaaatcattattagggacttttttaaaaaaataaaataacaagatatcctactttaaaaaaaaaggacagtgcatgcatattgctgtaaggtcgtttaagtatttctaattttacaaaagtaaaaatcattagagctccaaatgctgaggtgtagattgacagctttaacactgctgaatgccaggttatacagtattcttacaaaaagggaagtcagccaaagactgatctgatggaccaaaatcggaattttgaaaagcaccagtactactttccaaatgatcagcaggttaaacatgttcagcaaggtatagtatgaatccattaacccttcgttgtccagggtccagaccagaactacttgttagttttgaaaacagtagcccaggatgtggttgtgtgctttaggaaagtcagcagtgctgcaggctgtgtagacaaccaaagtttacaaggctgggaagacacttctccaaatacatatacaccaggcatttctttaaaatcaaaaacaatccattagctttggggcggggggtggggggagggttaaatgtaggccttggaaacagttttaagtggcttttaagtatctgcatagaggcaatcctaaggtttgctttaagtctcttaaatctaacatttttaaaagcatttcttccctgtattttcatatacaagttggttttaattttgtttgggtggtgttattttttttaaatgactttttagtttagaaagttctgatgagcaaataaatacatctatctacatgttggaagtccatctgccagcacacctgcttaaagtgaaatgaaagcacataaccaggctctgaatgggttatattttatcatggtgctcccagaatcctttgacctcactctgctttctagtctgcttgtgacactggacagtcctttcttacagagctattatatgttctaggctacgaagggttaaataatcccaaaaatgaggtatgtcatacccacacgtctttatctctagaagctgtgatgtatgtgaaacagcactgttattcttaacactagtgtgtaaaataaggattagtacagtacgtctcattactttttaattcagggcaccctgagtgaaaacaaatacaaaaaaaaatccctaactctgagctctatctctgattcctcttcctccttcccctcttcctcctcttcctctcctcctgttttgctacattctcctcagtggcaaaaagtttcactctacctctgacagcatgtatattgcaccagtagctaacaaaaactggtctagtcaaaccaaatgggcacaaaagaaccaggataccaaaagttaagctcatacagctgcaaaccatatcacttcttggtaacaatgcagacctcataaacctaaagaagagaaagaaaagaaaacttttgttactttccttttttgcttgtcacttatatacaggctatgtgagaatataatttgtaggtataacacattaagaaaaagttatcttcattggatagaattgaatggtggtcgctgataggaatagggcgtcctctagctcttatctctgtctcttactcttttctctttctctttttctctgtcatgagactgtgtgtgacagggccacctgtcttttttttttcttaaattttttttttttttatgtgtaggtgcatgtcttggggatttaaaaatttcaaggctggtttacttatgcaaagcatgcctacgtctggaatacttagggaaagaaagcgactccatgttgtccgaattcctcaagggacagaaaaaaaattggagactgttgaaatgcagatttgaagtaatttttttaaaatattattttgggttctgcgacattgtgaaaaattaaagttgttgtgcaatacttaattcagacatgtaccacaagttaatggtagactaacactggggggtggggtctaggcatcatgcttttgtcagcatactcttgagcttttaagtctactatgtctgaactgtggtttcttgtttatccttttttccttagttggactgtaatgtatggtctgtcaacctgtgaatctttaaagtatgattcaggtattgttgtattctttactgtgtaataaaaaagttgaaaaaaatctggatcctctgtctccctcgtccccggtgtgccatggttgcccaccagtgaccccagcctgaggagtccatcctccatggtgctgaatcaaatctgtagagtttattcagctacaaagcgtggctctgtaacaggagttggcttatccatgcgtgttgagtagggaatgatgtcagaactttgcaaaagtcgagctcattcataaggggatgtttctcaggcaggaggagtaggaagagtgggaggagaattactaccttccataggaaaggagagcttggcttgcctagattagctgctgcatagatagcagaggcccttttggctgtgttttgataaaattagaaatgagtacctaaatctggatcactctgctcagagaggttcgtgccaacctcatgaggctctgactcttgtcaggttgcttggctgccttgtgcatacccgaatggcagatcagctgacatgacatggaactgctctatctgccttgtcccctctcctctaattaaaagtcgctaccattgtcactcttggttatgtagttaatatccactgtggctatctccaacttgctgggacatccagttatctcctctgacacatattttttcattctctagttacaaagtttgttagagtttgaaaaacaaacccttctcccctaccctgtgaatgctgttagtttttatgtgtagttttcaaaacacagattatcttatatactgtgttgtagcagaaattcctgtttcctctgaatgttctgactttatagaccaaaataatcgttgcaaaaaatcaaggatggcacagcaggtgcatgagcccgtgtctggagaaaggttatgaaggtgaatgctggttacatgggagggtgacttggagccctctagtttccttcttgtgccagctgggttcctgtttcaaggccaggcttctctaacttgtcttcctgggaaatgtagcttttccaagaatttggtagtgcacaccaggaaaaactaggtatcagaacagatttttttttaaatagtggaaacaccctcactcccacactttggacagttagggttggatatttaatttcatagttactctttttttccacagaagaaaggccagcctgacccaagttgcctatttttaatgtgttactgcatcttattttctcttcaaagtgaaaaaggccagaaactagcagatagaaatggaacccgttgacttagttcccttataagaagttcttgcaaacacctctgtgacgttttcattcaagtggatatgttggacaaataggaaacagttttagtttacgcgaacagtatgagacttccaggtggtggacgccatttttttagaagtgttgatgatgtatttgataacattataaaagtatgtgtctcccgtgaaagaacattgagctatttccctggaatggatggggaagaaatgagcaaaggagtgctgttctgtatgggtgtctatacccttattccaaggtgaataaataaagttgtgtttgcc

SEQ ID NO: 178607 - DNA, 2103 bp, Homo sapiens
  Payload ID: 15200
  Gene Symbol: RUNX1T1
  Gene Name: runt-related transcription factor 1
  translocated to, 1 (cyclin D-related)
  Uniprot ID: Q06455
  ENST ID: ENST00000520724
  CDS Start-End: 145-1992
ttttcctccctctcccgctccgtctcacacgcaccctctgtttattttcctgcctccatctgggccctgctgatattgtaatcaccctgatgcacgttggcttctctcctctccctcctgcgctcacacactcactcacacacaatgtgccatcctgacaaggcttttacttctgataagctccaatgtgtgtttaatgaatacaaagccgcggtctgggtgccgcctcggccgcggccgctctcccgcgctcctttgccagaagatcgtactgagaagcactccacaatgccagactcacctgtggatgtgaagacgcaatctaggctgactcctccaacaatgccacctcccccaactactcaaggagctccaagaaccagttcatttacaccgacaacgttaactaatggcacgagccattctcctacagccttgaatggcgccccctcaccacccaatggcttcagcaatgggccttcctcttcttcctcctcctctctggctaatcaacagctgcccccagcctgtggtgccaggcaactcagcaagctgaaaaggttccttactaccctgcagcagtttggcaatgacatttcacccgagataggagaaagagttcgcaccctcgttctgggactagtgaactccactttgacaattgaagaatttcattccaaactgcaagaagctactaacttcccactgagaccttttgtcatcccatttttgaaggccaacttgcccctgctgcagcgtgagctcctccactgcgcaagactggccaaacagaaccctgcccagtacctcgcccagcatgaacagctgcttctggatgccagcaccacctcacctgttgactcctcagagctgcttctcgatgtgaacgaaaacgggaagaggcgaactccagacagaaccaaagaaaatggctttgacagagagcctttgcactcagaacatccaagcaagcgaccatgcactattagcccaggccagcggtacagtccaaataacggcttatcctaccagcccaatggcctgcctcaccctaccccacctccacctcagcattaccgtttggatgatatggccattgcccaccactacagggactcctatcgacaccccagccacagggacctcagggacagaaacagacctatggggttgcatggcacacgtcaagaagaaatgattgatcacagactaacagacagagaatgggcagaagagtggaaacatcttgaccatctgttaaactgcataatggacatggtagaaaaaacaaggcgatctctcaccgtactaaggcggtgtcaagaagcagaccgggaagaattgaattactggatccggcggtacagtgacgccgaggacttaaaaaaaggtggcggcagtagcagcagccactctaggcagcagagtcccgtcaacccagacccagttgcactagacgcgcatcgggaattccttcacaggcctgcgtctggatacgtgccagaggagatctggaagaaagctgaggaggccgtcaatgaggtgaagcgccaggcgatgacggagctgcagaaggccgtgtctgaggcggagcggaaagcccacgacatgatcacaacagagagggccaagatggagcgcacggtcgccgaggccaaacggcaggcggcggaggacgcactggcagttatcaatcagcaggaggattcaagcgagagttgctggaattgtggccgtaaagcgagtgaaacctgcagtggctgtaacacagcccgatactgtggctcattttgccagcacaaagactgggagaagcaccatcacatctgtggacagaccctgcaggcccagcagcagggagacacacctgcagtcagctcctctgtcacgcccaacagcggggctgggagcccgatggacacaccaccagcagccactccgaggtcaaccaccccgggaaccccttccaccatagagacaacccctcgctagacgtgaactcagaactgtcggaggaaagacaacacaaccaacgcgaaaccaattcctcatcctcagatgctcaaagttgttttttttgtttgtttgtttattagatgaatt

SEQ ID NO: 178608 - DNA, 565 bp, Homo sapiens
  Payload ID: 15200
  Gene Symbol: RUNX1T1
  Gene Name: runt-related transcription factor 1
  translocated to, 1 (cyclin D-related)
  ENST ID: ENST00000524215
  CDS Start-End: 143-349
ttttatttgcagctcggagcctgtggcggatggtgggactctccggccctgtgcagtaaaagattgatctctgggctggtgaacataatctctgtcccagtcagaaaaggagagaggaaattagcagagcgattggtggagaatgatatctgtcaaaagaaacacttggagagcactgagtttagtaataggtgactgccggaaaaaagggaactttgaatattgtcaaggcgcacgcgcccagcaccctgcctccggcgatgccgccccagcccctctgatggccctcctctctgctgccactcattccagaacaggaggcatgagcccggaacgcgcttgcttttaggagacagccactttctgtgtggtacgctggattcaaggatgcctgatcgtactgagaagcactccacaatgccagactcacctgtggatgtgaagacgcaatctaggctgactcctccaacaatgccacctcccccaactactcaaggagctccaagaaccagttcatttacaccgacaacgttaactaatggcacgagccattctcctacagcct

SEQ ID NO: 178609 - DNA, 574 bp, Homo sapiens
  Payload ID: 15200
  Gene Symbol: RUNX1T1
  Gene Name: runt-related transcription factor 1
  translocated to, 1 (cyclin D-related)
  ENST ID: ENST00000518317
  CDS Start-End: 366-574
gattcagaagtcgataagaccaggagaagtgaagatgtaacatgttatctgtcgctcctcttagctggcggagagaatttacatttaaagattagcagagtgagaaagagaaatctgccttttgttgtgtggggtgaggaggaggcatctacccctggccttgacgctatctcccatcacctctgctatccagacaggactcaccgaggcgcacgcgcccagcaccctgcctccggcgatgccgccccagcccctctgatggccctcctctctgctgccactcattccagaacaggaggcatgagcccggaacgcgcttgcttttaggagacagccactttctgtgtggtacgctggattcaaggatgcctgatcgtactgagaagcactccacaatgccagactcacctgtggatgtgaagacgcaatctaggctgactcctccaacaatgccacctcccccaactactcaaggagctccaagaaccagttcatttacaccgacaacgttaactaatggcacgagccattctcctacagccttgaatggcgccccctcaccacccaatggctt

SEQ ID NO: 178610 - DNA, 882 bp, Homo sapiens
  Payload ID: 15200
  Gene Symbol: RUNX1T1
  Gene Name: runt-related transcription factor 1
  translocated to, 1 (cyclin D-related)
  ENST ID: ENST00000520978
  CDS Start-End: 1-92
gactcctcagagctgcttctcgatgtgaacgaaaacgggaagaggcgaactccagacagatgaataaactgaggtccagagaggttaagtgacttgaccaaggtcacacagctagtcatggaagagccaggactagatctcaggtctcttgattcccagtccagtgctctttccactacaccacaatgccagtaagaaccaaagaaaatggctttgacagagagcctttgcactcagaacatccaagcaagcgaccatgcactattagcccaggccagcggtacagtccaaataacggcttatcctaccagcccaatggcctgcctcaccctaccccacctccacctcagcattaccgtttggatgatatggccattgcccaccactacagggactcctatcgacaccccagccacagggacctcagggacagaaacagacctatggggttgcatggcacacgtcaagaagaaatgattgatcacagactaacagacagagaatgggcagaagagtggaaacatcttgaccatctgttaaactgcataatggacatggtagaaaaaacaaggcgatctctcaccgtactaaggcggtgtcaagaagcagaccgggaagaattgaattactggatccggcggtacagtgacgccgaggacttaaaaaaaggtggcggcagtagcagcagccactctaggcagcagagtcccgtcaacccagacccagttgcactagacgcgcatcgggaattccttcacaggcctgcgtctggatacgtgccagaggagatctggaagaaagctgaggaggccgtcaatgaggtgaagcgccaggcgatgacggagctgcagaaggccgtgtctgaggcggagcggaaagccc

SEQ ID NO: 178611 - DNA, 553 bp, Homo sapiens
  Payload ID: 15200
  Gene Symbol: RUNX1T1
  Gene Name: runt-related transcription factor 1
  translocated to, 1 (cyclin D-related)
  ENST ID: ENST00000523168
  CDS Start-End: 195-553
tatgcaggcaacatagcccttcatagcaaagcagtctgaaaaattggcacctgcaggatttgcatgtgaaaaaaacggagtcagttgcattttgccggagtctattactaaaagattgatctctgggctggtgaacataatctctgtcccagtcagaaaaggagagaggaaattagcagagcgattggtggagaatgatatctgtcaaaagaaacacttggagagcactgagtttagtaataggtgactgccggaaaaaagggaactttgaatattgtcaagatcgtactgagaagcactccacaatgccagactcacctgtggatgtgaagacgcaatctaggctgactcctccaacaatgccacctcccccaactactcaaggagctccaagaaccagttcatttacaccgacaacgttaactaatggcacgagccattctcctacagccttgaatggcgccccctcaccacccaatggcttcagcaatgggccttcctcttcttcctcctcctctctggctaatcaacagctgcccccagcctgtggtgc

SEQ ID NO: 178612 - DNA, 730 bp, Homo sapiens
  Payload ID: 15200
  Gene Symbol: RUNX1T1
  Gene Name: runt-related transcription factor 1
  translocated to, 1 (cyclin D-related)
  ENST ID: ENST00000521319
  CDS Start-End: 465-730
tgattcagaagtcgataagaccaggagaagtgaagatgtaacatgttatctgtcgctcctcttagctggcggagagaatttacatttaaagattagcagagtgagaaagagaaatctgccttttgttgtgtggggtgaggaggaggcatctacccctggccttgacgctatctcccatcacctctgctatccagacaggactcaccgaggcgcacgcgcccagcaccctgcctccggcgatgccgccccagcccctctgatggccctcctctctgctgccactcattccagaacaggaggcatgagcccggaacgcgcttgcttttaggagacagccactttctgtgtggtacgctggattcaaggatgcctgataaaccccacttgaaaaactgaggtgcttaaggagtaaaataatatgttcctggtggcatcctccagatcgtactgagaagcactccacaatgccagactcacctgtggatgtgaagacgcaatctaggctgactcctccaacaatgccacctcccccaactactcaaggagctccaagaaccagttcatttacaccgacaacgttaactaatggcacgagccattctcctacagccttgaatggcgccccctcaccacccaatggcttcagcaatgggccttcctcttcttcctcctcctctctggctaatcaacagctgcccccagcctgtggtgccaggcaactcagcaagct

SEQ ID NO: 178613 - DNA, 564 bp, Homo sapiens
  Payload ID: 15200
  Gene Symbol: RUNX1T1
  Gene Name: runt-related transcription factor 1
  translocated to, 1 (cyclin D-related)
  ENST ID: ENST00000520974
  CDS Start-End: 310-564
ttctctcctctccctcctgcgctcacacactcactcacacacaatgtgccatcctgacaaggcttttacttctgataagctccaatgtgtgtttaatgaatacaaagccgcggtctgggtgccgcctcggccgcggccgctctcccgcgctcctttgccagaagtatcaaatgataagaactgagcacactggatgaaataatacttgcactgggagcactaagaaaagattgatctctgggctggtgaacataatctctgtcccagtcagaaaaggagagaggaaattagcagagcgattggtggagaatgatatctgtcaaaagaaacacttggagagcactgagtttagtaataggtgactgccggaaaaaagggaactttgaatattgtcaagatcgtactgagaagcactccacaatgccagactcacctgtggatgtgaagacgcaatctaggctgactcctccaacaatgccacctcccccaactactcaaggagctccaagaaccagttcatttacaccgacaacgttaactaatggcacgagccattctcctaca

SEQ ID NO: 178614 - DNA, 782 bp, Homo sapiens
  Payload ID: 15200
  Gene Symbol: RUNX1T1
  Gene Name: runt-related transcription factor 1
  translocated to, 1 (cyclin D-related)
  ENST ID: ENST00000517919
  CDS Start-End: 377-782
ttctgtcttctctctctctctcccacttttcctccctctcccgctccgtctcacacgcaccctctgtttattttcctgcctccatctgggccctgctgatattgtaatcaccctgatgcacgttggcttctctcctctccctcctgcgctcacacactcactcacacacaatgtgccatcctgacaaggcttttacttctgataagctccaatgtgtgtttaatgaatacaaagccgcggtctgggtgccgcctcggccgcggccgctctcccgcgctcctttgccagaagaaaagattgatctctgggctggtgaacataatctctgtcccagtcagaaaaggagagaggaaattagcagagcgattggtggagaatgatatctgtcaaaagaaacacttggagagcactgagtttagtaataggtgactgccggaaaaaagggaactttgaatattgtcaagatcgtactgagaagcactccacaatgccagactcacctgtggatgtgaagacgcaatctaggctgactcctccaacaatgccacctcccccaactactcaaggagctccaagaaccagttcatttacaccgacaacgttaactaatggcacgagccattctcctacagccttgaatggcgccccctcaccacccaatggcttcagcaatgggccttcctcttcttcctcctcctctctggctaatcaacagctgcccccagcctgtggtgccaggcaactcagcaagctgaaaaggttccttactaccctgcagcagt

SEQ ID NO: 178615 - DNA, 690 bp, Homo sapiens
  Payload ID: 15200
  Gene Symbol: RUNX1T1
  Gene Name: runt-related transcription factor 1
  translocated to, 1 (cyclin D-related)
  ENST ID: ENST00000522467
  CDS Start-End: 223-690
agtctgaaaaattggcacctgcaggatttgcatgtgaaaaaaacggagtcagttgcattttgccggagtctattacttatcaaatgataagaactgagcacactggatgaaataatacttgcactgggagcactaagaaaagattgatctctgggctggtgaacataatctctgtcccagtcagaaaaggagagaggaaattagcagagcgattggtggagaatgatatctgtcaaaagaaacacttggagagcactgagtttagtaataggtgactgccggaaaaaagggaactttgaatattgtcaagatcgtactgagaagcactccacaatgccagactcacctgtggatgtgaagacgcaatctaggctgactcctccaacaatgccacctcccccaactactcaaggagctccaagaaccagttcatttacaccgacaacgttaactaatggcacgagccattctcctacagccttgaatggcgccccctcaccacccaatggcttcagcaatgggccttcctcttcttcctcctcctctctggctaatcaacagctgcccccagcctgtggtgccaggcaactcagcaagctgaaaaggttccttactaccctgcagcagtttggcaatgacatttcacccgagataggagaaagagttcgcaccctcgttctgggactagtg

SEQ ID NO: 178616 - DNA, 630 bp, Homo sapiens
  Payload ID: 15200
  Gene Symbol: RUNX1T1
  Gene Name: runt-related transcription factor 1
  translocated to, 1 (cyclin D-related)
  ENST ID: ENST00000519422
  CDS Start-End: 282-392
actcactcacacacaatgtgccatcctgacaaggcttttacttctgataagctccaatgtgtgtttaatgaatacaaagccgcggtctgggtgccgcctcggccgcggccgctctcccgcgctcctttgccagaagtatcaaatgataagaactgagcacactggatgaaataatacttgcactgggagcactaagaaaagattgatctctgggctggtgaacataatctctgtcccagtcagaaaaggagagaggaaattagcagagcgattggtggagaatgatatctgtcaaaagaaacacttggagagcactgagtttagtaataggtgactgccggaaaaaagggaactttgaatattgtcaagataaaccccacttgaaaaactgaggtgcttaaggagtaaaataatatgttcctggtggcatcctccagatcgtactgagaagcactccacaatgccagactcacctgtggatgtgaagacgcaatctaggctgactcctccaacaatgccacctcccccaactactcaaggagctccaagaaccagttcatttacaccgacaacgttaactaatggcacgagccattctcctacagccttgaatggcgccccctcaccacc

SEQ ID NO: 178617 - DNA, 557 bp, Homo sapiens
  Payload ID: 15200
  Gene Symbol: RUNX1T1
  Gene Name: runt-related transcription factor 1
  translocated to, 1 (cyclin D-related)
  ENST ID: ENST00000521897
  CDS Start-End: 190-300
ggcttttacttctgataagctccaatgtgtgtttaatgaatacaaagccgcggtctgggtgccgcctcggccgcggccgctctcccgcgctcctttgccagaagaaaagattgatctctgggctggtgaacataatctctgtcccagtcagaaaaggagagaggaaattagcagagcgattggtggagaatgatatctgtcaaaagaaacacttggagagcactgagtttagtaataggtgactgccggaaaaaagggaactttgaatattgtcaagataaaccccacttgaaaaactgaggtgcttaaggagtaaaataatatgttcctggtggcatcctccagatcgtactgagaagcactccacaatgccagactcacctgtggatgtgaagacgcaatctaggctgactcctccaacaatgccacctcccccaactactcaaggagctccaagaaccagttcatttacaccgacaacgttaactaatggcacgagccattctcctacagccttgaatggcgccccctcaccacccaatggcttcagcaatggg

SEQ ID NO: 178618 - DNA, 596 bp, Homo sapiens
  Payload ID: 15200
  Gene Symbol: RUNX1T1
  Gene Name: runt-related transcription factor 1
  translocated to, 1 (cyclin D-related)
  ENST ID: ENST00000521375
  CDS Start-End: 316-596
ctccctctctccctttccaaatgattcagaagtcgataagaccaggagaagtgaagatgtaacatgttatctgtcgctcctcttagctggcggagagaatttacatttaaagattagcagagtgagaaagagaaatctgccttttgttgtgtggggtgaggaggaggcatctacccctggccttgacgctatctcccatcacctctgctatccagacaggactcaccgagaaaagattgatctctgggctggtgaacataatctctgtcccagtcagaaaaggagagaggaaattagcagagcgattggtggagaatgatatctgtcaaaagaaacacttggagagcactgagtttagtaataggtgactgccggaaaaaagggaactttgaatattgtcaagatcgtactgagaagcactccacaatgccagactcacctgtggatgtgaagacgcaatctaggctgactcctccaacaatgccacctcccccaactactcaaggagctccaagaaccagttcatttacaccgacaacgttaactaatggcacgagccattctcctacagccttgaatggcgccccctcaccacc

SEQ ID NO: 178619 - DNA, 1346 bp, Homo sapiens
  Payload ID: 15200
  Gene Symbol: RUNX1T1
  Gene Name: runt-related transcription factor 1
  translocated to, 1 (cyclin D-related)
  ENST ID: ENST00000521553
  CDS Start-End: 24-656
atcgtactgagaagcactccacaatgccagactcacctgtggatgtgaagacgcaatctaggctgactcctccaacaatgccacctcccccaactactcaaggagctccaagaaccagttcatttacaccgacaacgttaactaatggcacgagccattctcctacagccttgaatggcgccccctcaccacccaatggcttcagcaatgggccttcctcttcttcctcctcctctctggctaatcaacagctgcccccagcctgtggtgccaggcaactcagcaagctgaaaaggttccttactaccctgcagcagtttggcaatgacatttcacccgagataggagaaagagttcgcaccctcgttctgggactagtgaactccactttgacaattgaagaatttcattccaaactgcaagaagctactaacttcccactgagaccttttgtcatcccatttttgaaggccaacttgcccctgctgcagcgtgagctcctccactgcgcaagactggccaaacagaaccctgcccagtacctcgcccagcatgaacagctgcttctggatgccagcaccacctcacctgttgactcctcagagctgcttctcgatgtgaacgaaaacgggaagaggcgaactccagacaggtgagagggaggaggagcctggatgaaccatgacctttttcccatacctgtggcatgaggaaacatttcatgtcacaattaaaccgctggcctatgtcattcttgcacaatagcaataagccattgtggccatcttgagaatctggctctggcctgggattttacagagttttgaatctctggcctgggacagtttggcttttgtgtaggttaatcttttctgcttgtagtattaaagcgaaatggtgaagacgaatgatttttctgatttgccaagtaccactgatggctcttagatgcacatcaatattaaaattctcattcattatgtaatttaacccaaccacatattttacttcaatattctgaaattggctgttcctagtttccttaaaatgtgatggtttggaagcttgtctgtatgtatttcttaacacagtacagtagttatttgttttggtttgtatatgaactaagagaaaacttctgggacactagatgaactgagtgaagataagagttatacagtagagacaatagatggtatttttgctgaaaattttacttgttagatactgttctatcagatactgtgctctcataactaagaattctaagaaatgtaaaataaaaccacttctccattaaaccctacagagtaattgttgaataaagcatacacatgaaatttccc

SEQ ID NO: 178620 - DNA, 491 bp, Homo sapiens
  Payload ID: 15200
  Gene Symbol: RUNX1T1
  Gene Name: runt-related transcription factor 1
  translocated to, 1 (cyclin D-related)
  ENST ID: ENST00000520428
  CDS Start-End: 347-491
aagtcgataagaccaggagaagtgaagatgtaacatgttatctgtcgctcctcttagctggcggagagaatttacatttaaagattagcagagtgagaaagagaaatctgccttttgttgtgtggggtgaggaggaggcatctacccctggccttgacgctatctcccatcacctctgctatccagacaggactcaccgagtatcaaatgataagaactgagcacactggatgaaataatacttgcactgggagcactaagaaaagattgatctctgggctggtgaacataatctctgtcccagtcagaaaaggagagaggaaattagcagagcgattggtggagaatgatatctgtcaaaagaaacacttggagagcactgagtttagtaataggtgactgccggaaaaaagggaactttgaatattgtcaagatcgtactgagaagcactccacaatgccagactcacctgtggatgtgaagacgcaat

SEQ ID NO: 178621 - DNA, 591 bp, Homo sapiens
  Payload ID: 15200
  Gene Symbol: RUNX1T1
  Gene Name: runt-related transcription factor 1
  translocated to, 1 (cyclin D-related)
  ENST ID: ENST00000518832
  CDS Start-End: 454-591
gagggcgggcgagggagacgcagacgccgcctgtgacagtggcaattccctgcgccccacatcacatttgtctgccacagcagcaacaacagaaaagcggagggagggagggaggcgggaggaggggagcagagctccgcaagtcttgggctctgcgtggaggttgcgtttggctggcgtccccgaccccgggctttttgcacggcagctctctctgcgcagcgccgggcggccgtagtcgctccgcggcgcgactccgcggtctcgtggcgagcgcgcgtgggcgagtggccgcggacactctggcctcgcgagggaagccgcgccgcgtcctcgccccgtcgccccgcgggccggccgagacgacgggaagttttatttgcagctcggagcctgtggcggatggtgggactctccggccctgtgcagtatcgtactgagaagcactccacaatgccagactcacctgtggatgtgaagacgcaatctaggctgactcctccaacaatgccacctcccccaactactcaaggagctccaagaaccagttcatttacaccgacaacgttaactaatggcacgagccattct

SEQ ID NO: 178622 - DNA, 548 bp, Homo sapiens
  Payload ID: 15200
  Gene Symbol: RUNX1T1
  Gene Name: runt-related transcription factor 1
  translocated to, 1 (cyclin D-related)
  ENST ID: ENST00000517792
  CDS Start-End: 188-548
attttctgagttcccattatatagtgtcctatgtgtgttgctcttttccagtcagactcattagtagtctggtgtggagctagtagctcagagattgcttttatgaggcggttttggaatcttcatctgcccatgaaaatagaatagtccacttttaaaaaaagatcgtactgagaagcactccacaatgccagactcacctgtggatgtgaagacgcaatctaggctgactcctccaacaatgccacctcccccaactactcaaggagctccaagaaccagttcatttacaccgacaacgttaactaatggcacgagccattctcctacagccttgaatggcgccccctcaccacccaatggcttcagcaatgggccttcctcttcttcctcctcctctctggctaatcaacagctgcccccagcctgtggtgccaggcaactcagcaagctgaaaaggttccttactaccctgcagcagtttggcaatgacatttcacccgagataggagaaagagttcgcaccctcgttctgggactagtgaact

SEQ ID NO: 178623 - DNA, 573 bp, Homo sapiens
  Payload ID: 15200
  Gene Symbol: RUNX1T1
  Gene Name: runt-related transcription factor 1
  translocated to, 1 (cyclin D-related)
  ENST ID: ENST00000520583
  CDS Start-End: 213-573
actcacacacaatgtgccatcctgacaaggcttttacttctgataagctccaatgtgtgtttaatgaatacaaagccgcggtctgggtgccgcctcggccgcggccgctctcccgcgctcctttgccagaagattgatctctgggctggtgaacataatctctgtcccagtcagaaaaggagagaggaaattagcagagcgattggtggagaatgatatctgtcaaaagaaacacttggagagcactgagtttagtaataggtgactgccggaaaaaagggaactttgaatattgtcaagatcgtactgagaagcactccacaatgccagactcacctgtggatgtgaagacgcaatctaggctgactcctccaacaatgccacctcccccaactactcaaggagctccaagaaccagttcatttacaccgacaacgttaactaatggcacgagccattctcctacagccttgaatggcgccccctcaccacccaatggcttcagcaatgggccttcctcttcttcctcctcctctctggctaatcaacagctgcccccagcctgtggtgcca

SEQ ID NO: 178624 - DNA, 548 bp, Homo sapiens
  Payload ID: 15200
  Gene Symbol: RUNX1T1
  Gene Name: runt-related transcription factor 1
  translocated to, 1 (cyclin D-related)
  ENST ID: ENST00000518954
  CDS Start-End: 387-548
acttctgataagctccaatgtgtgtttaatgaatacaaagccgcggtctgggtgccgcctcggccgcggccgctctcccgcgctcctttgccagaagctggcggagagaatttacatttaaagattagcagagtgagaaagagaaatctgccttttgttgtgtggggtgaggaggaggcatctacccctggccttgacgctatctcccatcacctctgctatccagacaggactcaccgagtatcaaatgataagaactgagcacactggatgaaataatacttgcactgggagcactaagaaaagattgatctctgggctggtgaacataatctctgtcccagtcagaaaaggagagaggaaattagcagagcgattggtggagaatgatatctgtcaaaagaaacacttggagagcactgagtttagtaataggtgactgccggaaaaaagggaactttgaatattgtcaagatcgtactgagaagcactccacaatgccagactcacctgtggatgtgaagacgcaatctaggctgactcctcca

SEQ ID NO: 178625 - DNA, 586 bp, Homo sapiens
  Payload ID: 15200
  Gene Symbol: RUNX1T1
  Gene Name: runt-related transcription factor 1
  translocated to, 1 (cyclin D-related)
  ENST ID: ENST00000519577
  CDS Start-End: 197-307
ttgcagctcggagcctgtggcggatggtgggactctccggccctgtgcagttatcaaatgataagaactgagcacactggatgaaataatacttgcactgggagcactaagaaaagattgatctctgggctggtgaacataatctctgtcccagtcagaaaaggagagaggaaattagcagagcgattggtggagaatgatatctgtcaaaagaaacacttggagagcactgagtttagtaataggtgactgccggaaaaaagggaactttgaatattgtcaagataaaccccacttgaaaaactgaggtgcttaaggagtaaaataatatgttcctggtggcatcctccagatcgtactgagaagcactccacaatgccagactcacctgtggatgtgaagacgcaatctaggctgactcctccaacaatgccacctcccccaactactcaaggagctccaagaaccagttcatttacaccgacaacgttaactaatggcacgagccattctcctacagccttgaatggcgccccctcaccacccaatggcttcagcaatgggccttcctcttcttcctcctcct

SEQ ID NO: 178626 - DNA, 1044 bp, Homo sapiens
  Payload ID: 15200
  Gene Symbol: RUNX1T1
  Gene Name: runt-related transcription factor 1
  translocated to, 1 (cyclin D-related)
  ENST ID: ENST00000519847
  CDS Start-End: 538-1044
ccctcctgcctgtccctttctgtcttctctctctctctcccacttttcctccctctcccgctccgtctcacacgcaccctctgtttattttcctgcctccatctgggccctgctgatattgtaatcaccctgatgcacgttggcttctctcctctccctcctgcgctcacacactcactcacacacaatgtgccatcctgacaaggcttttacttctgataagctccaatgtgtgtttaatgaatacaaagccgcggtctgggtgccgcctcggccgcggccgctctcccgcgctcctttgccagaagctggcggagagaatttacatttaaagattagcagagtgagaaagagaaatctgccttttgttgtgtggggtgaggaggaggcatctacccctggccttgacgctatctcccatcacctctgctatccagacaggactcaccgagaaaagattgatctctgggctggtgaacataatctctgtcccagtcagaaaaggagagaggaaattagcagagcgattggtggagaatgatatctgtcaaaagaaacacttggagagcactgagtttagtaataggtgactgccggaaaaaagggaactttgaatattgtcaagatcgtactgagaagcactccacaatgccagactcacctgtggatgtgaagacgcaatctaggctgactcctccaacaatgccacctcccccaactactcaaggagctccaagaaccagttcatttacaccgacaacgttaactaatggcacgagccattctcctacagccttgaatggcgccccctcaccacccaatggcttcagcaatgggccttcctcttcttcctcctcctctctggctaatcaacagctgcccccagcctgtggtgccaggcaactcagcaagctgaaaaggttccttactaccctgcagcagtttggcaatgacatttcacccgagataggagaaagagttcgcaccctcgttctgggactagtgaactccactttgacaattgaagaatttcattccaaactg

SEQ ID NO: 178627 - DNA, 544 bp, Homo sapiens
  Payload ID: 15200
  Gene Symbol: RUNX1T1
  Gene Name: runt-related transcription factor 1
  translocated to, 1 (cyclin D-related)
  ENST ID: ENST00000519061
  CDS Start-End: 467-544
actcactcacacacaatgtgccatcctgacaaggcttttacttctgataagctccaatgtgtgtttaatgaatacaaagccgcggtctgggtgccgcctcggccgcggccgctctcccgcgctcctttgccagaagaaaagattgatctctgggctggtgaacataatctctgtcccagtcagaaaaggagagaggaaattagcagagcgattggtggagaatgatatctgtcaaaagaaacacttggagagcactgagtttagtaataggtgactgccggaaaaaagggaactttgaatattgtcaaggcgcacgcgcccagcaccctgcctccggcgatgccgccccagcccctctgatggccctcctctctgctgccactcattccagaacaggaggcatgagcccggaacgcgcttgcttttaggagacagccactttctgtgtggtacgctggattcaaggatgcctgatcgtactgagaagcactccacaatgccagactcacctgtggatgtgaagacgcaatctaggctgactcct

SEQ ID NO: 178628 - DNA, 572 bp, Homo sapiens
  Payload ID: 15200
  Gene Symbol: RUNX1T1
  Gene Name: runt-related transcription factor 1
  translocated to, 1 (cyclin D-related)
  ENST ID: ENST00000521733
  CDS Start-End: 268-572
gagaagaaaatagccagctttagataaagcactataacaaaggcttctagttttatatatcatggtgtccattaaagcttaatagggaagagtccattgaacctggctgggcgcacgcgcccagcaccctgcctccggcgatgccgccccagcccctctgatggccctcctctctgctgccactcattccagaacaggaggcatgagcccggaacgcgcttgcttttaggagacagccactttctgtgtggtacgctggattcaaggatgcctgatcgtactgagaagcactccacaatgccagactcacctgtggatgtgaagacgcaatctaggctgactcctccaacaatgccacctcccccaactactcaaggagctccaagaaccagttcatttacaccgacaacgttaactaatggcacgagccattctcctacagccttgaatggcgccccctcaccacccaatggcttcagcaatgggccttcctcttcttcctcctcctctctggctaatcaacagctgcccccagcctgtggtgccaggcaactcagcaagctgaaaaggtt

SEQ ID NO: 178629 - DNA, 2453 bp, Homo sapiens
  Payload ID: 15200
  Gene Symbol: RUNX1T1
  Gene Name: runt-related transcription factor 1
  translocated to, 1 (cyclin D-related)
  Uniprot ID: Q06455
  ENST ID: ENST00000518844
  CDS Start-End: 720-2453
acttttcctccctctcccgctccgtctcacacgcaccctctgtttattttcctgcctccatctgggccctgctgatattgtaatcaccctgatgcacgttggcttctctcctctccctcctgcgctcacacactcactcacacacaatgtgccatcctgacaaggcttttacttctgataagctccaatgtgtgtttaatgaatacaaagccgcggtctgggtgccgcctcggccgcggccgctctcccgcgctcctttgccagaagctggcggagagaatttacatttaaagattagcagagtgagaaagagaaatctgccttttgttgtgtggggtgaggaggaggcatctacccctggccttgacgctatctcccatcacctctgctatccagacaggactcaccgagtatcaaatgataagaactgagcacactggatgaaataatacttgcactgggagcactaagaaaagattgatctctgggctggtgaacataatctctgtcccagtcagaaaaggagagaggaaattagcagagcgattggtggagaatgatatctgtcaaaagaaacacttggagagcactgagtttagtaataggtgactgccggaaaaaagggaactttgaatattgtcaagaacaggaggcatgagcccggaacgcgcttgcttttaggagacagccactttctgtgtggtacgctggattcaaggatgcctgatcgtactgagaagcactccacaatgccagactcacctgtggatgtgaagacgcaatctaggctgactcctccaacaatgccacctcccccaactactcaaggagctccaagaaccagttcatttacaccgacaacgttaactaatggcacgagccattctcctacagccttgaatggcgccccctcaccacccaatggcttcagcaatgggccttcctcttcttcctcctcctctctggctaatcaacagctgcccccagcctgtggtgccaggcaactcagcaagctgaaaaggttccttactaccctgcagcagtttggcaatgacatttcacccgagataggagaaagagttcgcaccctcgttctgggactagtgaactccactttgacaattgaagaatttcattccaaactgcaagaagctactaacttcccactgagaccttttgtcatcccatttttgaaggccaacttgcccctgctgcagcgtgagctcctccactgcgcaagactggccaaacagaaccctgcccagtacctcgcccagcatgaacagctgcttctggatgccagcaccacctcacctgttgactcctcagagctgcttctcgatgtgaacgaaaacgggaagaggcgaactccagacagaaccaaagaaaatggctttgacagagagcctttgcactcagaacatccaagcaagcgaccatgcactattagcccaggccagcggtacagtccaaataacggcttatcctaccagcccaatggcctgcctcaccctaccccacctccacctcagcattaccgtttggatgatatggccattgcccaccactacagggactcctatcgacaccccagccacagggacctcagggacagaaacagacctatggggttgcatggcacacgtcaagaagaaatgattgatcacagactaacagacagagaatgggcagaagagtggaaacatcttgaccatctgttaaactgcataatggacatggtagaaaaaacaaggcgatctctcaccgtactaaggcggtgtcaagaagcagaccgggaagaattgaattactggatccggcggtacagtgacgccgaggacttaaaaaaaggtggcggcagtagcagcagccactctaggcagcagagtcccgtcaacccagacccagttgcactagacgcgcatcgggaattccttcacaggcctgcgtctggatacgtgccagaggagatctggaagaaagctgaggaggccgtcaatgaggtgaagcgccaggcgatgacggagctgcagaaggccgtgtctgaggcggagcggaaagcccacgacatgatcacaacagagagggccaagatggagcgcacggtcgccgaggccaaacggcaggcggcggaggacgcactggcagttatcaatcagcaggaggattcaagcgagagttgctggaattgtggccgtaaagcgagtgaaacctgcagtggctgtaacacagcccgatactgtggctcattttgccagcacaaagactgggagaagcaccatcacatctgtggacagaccctgcaggcccagcagcagggagacacacctgcagtcagctcctctgtcacgcccaacagcggggctgggagcccgatggacacaccaccagcagccactccgaggtcaaccaccccgggaaccccttccaccatagagacaacccctcgctag

SEQ ID NO: 178630 - DNA, 870 bp, Homo sapiens
  Payload ID: 15200
  Gene Symbol: RUNX1T1
  Gene Name: runt-related transcription factor 1
  translocated to, 1 (cyclin D-related)
  ENST ID: ENST00000521751
  CDS Start-End: 1-383
gtttggatgatatggccattgcccaccactacagggactcctatcgacaccccagccacagggacctcagggacagaaacagacctatggggttgcatggcacacgtcaagaagaaatgattgatcacagactaacagacagagaatgggcagaagagtggaaacatcttgaccatctgttaaactgcataatggacatggtagaaaaaacaaggcgatctctcaccgtactaaggcggtgtcaagaagcagaccgggaagaattgaattactggatccggcggtacagtgacgccgaggacttaaaaaaaggtggcggcagtagcagcagccactctaggcagcagagtcccgtcaacccagacccagttgcactaggatgaaggccatacctaggtgctgcccagctttgagcattgctgtcctgggtcatatgaggtcacattgcttctccaaaggctatcagctcatcccttcatgtatattgatggcggcccttgcagtatctagtatccaatggtctccatcctgtcacgcgcatcgggaattccttcacaggcctgcgtctggatacgtgccagaggagatctggaagaaagctgaggaggccgtcaatgaggtgaagcgccaggcgatgacggagctgcagaaggccgtgtctgaggcggagcggaaagcccacgacatgatcacaacagagagggccaagatggagcgcacggtcgccgaggccaaacggcaggcggcggaggacgcactggcagttatcaatcagcaggaggattcaagcgagagttgctggaattgtggccgtaaagcgagtgaaacctgcagtggctgtaacacagcccgatactgtggctcattttg

SEQ ID NO: 178631 - DNA, 431 bp, Homo sapiens
  Payload ID: 15200
  Gene Symbol: RUNX1T1
  Gene Name: runt-related transcription factor 1
  translocated to, 1 (cyclin D-related)
  ENST ID: ENST00000518361
  CDS Start-End: 1-96
gcttctcgatgtgaacgaaaacgggaagaggcgaactccagacagctattttcccaccagctctttcccagtatttcatatttgaatgtattgtgacttttgactatccttgcacagtcttaagaaccaaagaaaatggctttgacagagagcctttgcactcagaacatccaagcaagcgaccatgcactattagcccaggccagcggtacagtccaaataacggcttatcctaccagcccaatggcctgcctcaccctaccccacctccacctcagcattaccgtttggatgatatggccattgcccaccactacagggactcctatcgacaccccagccacagggacctcagggacagaaacagacctatggggttgcatggcacacgtcaagaagaaatgattgatcacagactaacagacagagaa

SEQ ID NO: 178632 - DNA, 976 bp, Homo sapiens
  Payload ID: 15200
  Gene Symbol: RUNX1T1
  Gene Name: runt-related transcription factor 1
  translocated to, 1 (cyclin D-related)
  ENST ID: ENST00000518992
  CDS Start-End: 289-976
agaagtcgataagaccaggagaagtgaagatgtaacatgttatctgtcgctcctcttagctggcggagagaatttacatttaaagattagcagagtgagaaagagaaatctgccttttgttgtgtggggtgaggaggaggcatctacccctggccttgacgctatctcccatcacctctgctatccagacaggactcaccgagaaaagattgatctctgggctggtgaacataatctctgtcccagtcagaaaaggagagaggaaattagcagagcgattggtggagaatgatatctgtcaaaagaaacacttggagagcactgagtttagtaataggtgactgccggaaaaaagggaactttgaatattgtcaagatcgtactgagaagcactccacaatgccagactcacctgtggatgtgaagacgcaatctaggctgactcctccaacaatgccacctcccccaactactcaaggagctccaagaaccagttcatttacaccgacaacgttaactaatggcacgagccattctcctacagccttgaatggcgccccctcaccacccaatggcttcagcaatgggccttcctcttcttcctcctcctctctggctaatcaacagctgcccccagcctgtggtgccaggcaactcagcaagctgaaaaggttccttactaccctgcagcagtttggcaatgacatttcacccgagataggagaaagagttcgcaccctcgttctgggactagtgaactccactttgacaattgaagaatttcattccaaactgcaagaagctactaacttcccactgagaccttttgtcatcccatttttgaaggccaacttgcccctgctgcagcgtgagctcctccactgcgcaagactggccaaacagaaccctgcccagtacctcgcccagcatgaacagctgcttctggatgccagcaccacctcacctgttgactcct

SEQ ID NO: 178633 - DNA, 7401 bp, Homo sapiens
  Payload ID: 15200
  Gene Symbol: RUNX1T1
  Gene Name: runt-related transcription factor 1
  translocated to, 1 (cyclin D-related)
  Uniprot ID: Q06455
  ENST ID: ENST00000613886
  CDS Start-End: 393-2126
tctctctccctctctccctttccaaatgattcagaagtcgataagaccaggagaagtgaagatgtaacatgttatctgtcgctcctcttagctggcggagagaatttacatttaaagattagcagagtgagaaagagaaatctgccttttgttgtgtggggtgaggaggaggcatctacccctggccttgacgctatctcccatcacctctgctatccagacaggactcaccgaggcgcacgcgcccagcaccctgcctccggcgatgccgccccagcccctctgatggccctcctctctgctgccactcattccagaacaggaggcatgagcccggaacgcgcttgcttttaggagacagccactttctgtgtggtacgctggattcaaggatgcctgatcgtactgagaagcactccacaatgccagactcacctgtggatgtgaagacgcaatctaggctgactcctccaacaatgccacctcccccaactactcaaggagctccaagaaccagttcatttacaccgacaacgttaactaatggcacgagccattctcctacagccttgaatggcgccccctcaccacccaatggcttcagcaatgggccttcctcttcttcctcctcctctctggctaatcaacagctgcccccagcctgtggtgccaggcaactcagcaagctgaaaaggttccttactaccctgcagcagtttggcaatgacatttcacccgagataggagaaagagttcgcaccctcgttctgggactagtgaactccactttgacaattgaagaatttcattccaaactgcaagaagctactaacttcccactgagaccttttgtcatcccatttttgaaggccaacttgcccctgctgcagcgtgagctcctccactgcgcaagactggccaaacagaaccctgcccagtacctcgcccagcatgaacagctgcttctggatgccagcaccacctcacctgttgactcctcagagctgcttctcgatgtgaacgaaaacgggaagaggcgaactccagacagaaccaaagaaaatggctttgacagagagcctttgcactcagaacatccaagcaagcgaccatgcactattagcccaggccagcggtacagtccaaataacggcttatcctaccagcccaatggcctgcctcaccctaccccacctccacctcagcattaccgtttggatgatatggccattgcccaccactacagggactcctatcgacaccccagccacagggacctcagggacagaaacagacctatggggttgcatggcacacgtcaagaagaaatgattgatcacagactaacagacagagaatgggcagaagagtggaaacatcttgaccatctgttaaactgcataatggacatggtagaaaaaacaaggcgatctctcaccgtactaaggcggtgtcaagaagcagaccgggaagaattgaattactggatccggcggtacagtgacgccgaggacttaaaaaaaggtggcggcagtagcagcagccactctaggcagcagagtcccgtcaacccagacccagttgcactagacgcgcatcgggaattccttcacaggcctgcgtctggatacgtgccagaggagatctggaagaaagctgaggaggccgtcaatgaggtgaagcgccaggcgatgacggagctgcagaaggccgtgtctgaggcggagcggaaagcccacgacatgatcacaacagagagggccaagatggagcgcacggtcgccgaggccaaacggcaggcggcggaggacgcactggcagttatcaatcagcaggaggattcaagcgagagttgctggaattgtggccgtaaagcgagtgaaacctgcagtggctgtaacacagcccgatactgtggctcattttgccagcacaaagactgggagaagcaccatcacatctgtggacagaccctgcaggcccagcagcagggagacacacctgcagtcagctcctctgtcacgcccaacagcggggctgggagcccgatggacacaccaccagcagccactccgaggtcaaccaccccgggaaccccttccaccatagagacaacccctcgctagacgtgaactcagaactgtcggaggaaagacaacacaaccaacgcgaaaccaattcctcatcctcagatgctcaaagttgttttttttgtttgtttgtttattagatgaattatcctatttcagtacttcagcaagagagaacctaactgtatcttgaggtggtagtaaaacacagagggccagtaacgggtcgtaatgacttattgtggataacaaagatatcttttctttagagaactgaaaagagagcagagaatataacatgaaatgatagatttgacctcctccctgttattttcaagtagctgggattttaaactagatgacctcattaaccgatgctttaccaaacagcaaaccaagagattgctaattgctgttgaaagcaaaaatgctaatattaaaagtcacaatgttctttatatacaataatggaaaaaaaaaaaagaggaaaaccctcaagggcatgagcattggatacagcagtagacattttaacaagaagatgaatggcgtccgtgggttgctaactgaactttgaagacccgctacaaaacgcgcagatgtgcagcagattggaaggagacacagatgttcggtttttttcctgtttctgaaaagaaataataatatccaggtcaacagaatgaaaaatgaaagatgatttgcaatgggatgtatgaatacagcagcaagaaaaaaaaatgccataatacaaaaggctccatatatatatatatatatatatatatacacacacacacacgcacatatacacacacacacacacacacacacacacacacacacacacacacacacacacacaagtaagagactcagcctgcagttaattagcattctggcagttttgacatcagccagctgccctaaataacccttcaacgtttcttcacttttgcaaggttccacagagtaagacattgggtctattccagctcattcattttatattgaaaaaaataattttaaaaatggtggcttcagctccagcccctttccaaaatttttcaaccccaccctgtttggatttttaattaaaaactagtagttctcttggtgttaaaacacttctgtcctgtgaggtttcccaatggtgtttttcttgtaaatgtgttggacaaatgtgaagatgcattgtagtttaaccatatgcccacatttagtctctttattcctagttggtgagaaacctgtatctttctatgctgcttttatatctgtatgtattagtgatatttctctagtagttaaaaaaaaaaaaaggaaaaaaagactctttttggttgtcctcaagaaaagaaaagaagaaaagctatctttcggagctgctatttcactctcttataggatttttttttttcctgaaaaccagcatgcttcacggaatgctaacatattggtgtttttgtaagagggatgtacataaatgtattttgcactgtcacaatgactccctaggcatgctttttgtttttttttttttttttttgagcaaattctttttaaatatgctagagccatttcatcaagtttagctgtagcatagagtagtcgtggaatttttcttttttttttttttaaatcattattagggacttttttaaaaaaataaaataacaagatatcctactttaaaaaaaaaggacagtgcatgcatattgctgtaaggtcgtttaagtatttctaattttacaaaagtaaaaatcattagagctccaaatgctgaggtgtagattgacagctttaacactgctgaatgccaggttatacagtattcttacaaaaagggaagtcagccaaagactgatctgatggaccaaaatcggaattttgaaaagcaccagtactactttccaaatgatcagcaggttaaacatgttcagcaaggtatagtatgaatccattaacccttcgttgtccagggtccagaccagaactacttgttagttttgaaaacagtagcccaggatgtggttgtgtgctttaggaaagtcagcagtgctgcaggctgtgtagacaaccaaagtttacaaggctgggaagacacttctccaaatacatatacaccaggcatttctttaaaatcaaaaacaatccattagctttggggcggggggtggggggagggttaaatgtaggccttggaaacagttttaagtggcttttaagtatctgcatagaggcaatcctaaggtttgctttaagtctcttaaatctaacatttttaaaagcatttcttccctgtattttcatatacaagttggttttaattttgtttgggtggtgttattttttttaaatgactttttagtttagaaagttctgatgagcaaataaatacatctatctacatgttggaagtccatctgccagcacacctgcttaaagtgaaatgaaagcacataaccaggctctgaatgggttatattttatcatggtgctcccagaatcctttgacctcactctgctttctagtctgcttgtgacactggacagtcctttcttacagagctattatatgttctaggctacgaagggttaaataatcccaaaaatgaggtatgtcatacccacacgtctttatctctagaagctgtgatgtatgtgaaacagcactgttattcttaacactagtgtgtaaaataaggattagtacagtacgtctcattactttttaattcagggcaccctgagtgaaaacaaatacaaaaaaaaatccctaactctgagctctatctctgattcctcttcctccttcccctcttcctcctcttcctctcctcctgttttgctacattctcctcagtggcaaaaagtttcactctacctctgacagcatgtatattgcaccagtagctaacaaaaactggtctagtcaaaccaaatgggcacaaaagaaccaggataccaaaagttaagctcatacagctgcaaaccatatcacttcttggtaacaatgcagacctcataaacctaaagaagagaaagaaaagaaaacttttgttactttccttttttgcttgtcacttatatacaggctatgtgagaatataatttgtaggtataacacattaagaaaaagttatcttcattggatagaattgaatggtggtcgctgataggaatagggcgtcctctagctcttatctctgtctcttactcttttctctttctctttttctctgtcatgagactgtgtgtgacagggccacctgtcttttttttttcttaaattttttttttttttatgtgtaggtgcatgtcttggggatttaaaaatttcaaggctggtttacttatgcaaagcatgcctacgtctggaatacttagggaaagaaagcgactccatgttgtccgaattcctcaagggacagaaaaaaaattggagactgttgaaatgcagatttgaagtaatttttttaaaatattattttgggttctgcgacattgtgaaaaattaaagttgttgtgcaatacttaattcagacatgtaccacaagttaatggtagactaacactggggggtggggtctaggcatcatgcttttgtcagcatactcttgagcttttaagtctactatgtctgaactgtggtttcttgtttatccttttttccttagttggactgtaatgtatggtctgtcaacctgtgaatctttaaagtatgattcaggtattgttgtattctttactgtgtaataaaaaagttgaaaaaaatctggatcctctgtctccctcgtccccggtgtgccatggttgcccaccagtgaccccagcctgaggagtccatcctccatggtgctgaatcaaatctgtagagtttattcagctacaaagcgtggctctgtaacaggagttggcttatccatgcgtgttgagtagggaatgatgtcagaactttgcaaaagtcgagctcattcataaggggatgtttctcaggcaggaggagtaggaagagtgggaggagaattactaccttccataggaaaggagagcttggcttgcctagattagctgctgcatagatagcagaggcccttttggctgtgttttgataaaattagaaatgagtacctaaatctggatcactctgctcagagaggttcgtgccaacctcatgaggctctgactcttgtcaggttgcttggctgccttgtgcatacccgaatggcagatcagctgacatgacatggaactgctctatctgccttgtcccctctcctctaattaaaagtcgctaccattgtcactcttggttatgtagttaatatccactgtggctatctccaacttgctgggacatccagttatctcctctgacacatattttttcattctctagttacaaagtttgttagagtttgaaaaacaaacccttctcccctaccctgtgaatgctgttagtttttatgtgtagttttcaaaacacagattatcttatatactgtgttgtagcagaaattcctgtttcctctgaatgttctgactttatagaccaaaataatcgttgcaaaaaatcaaggatggcacagcaggtgcatgagcccgtgtctggagaaaggttatgaaggtgaatgctggttacatgggagggtgacttggagccctctagtttccttcttgtgccagctgggttcctgtttcaaggccaggcttctctaacttgtcttcctgggaaatgtagcttttccaagaatttggtagtgcacaccaggaaaaactaggtatcagaacagatttttttttaaatagtggaaacaccctcactcccacactttggacagttagggttggatatttaatttcatagttactctttttttccacagaagaaaggccagcctgacccaagttgcctatttttaatgtgttactgcatcttattttctcttcaaagtgaaaaaggccagaaactagcagatagaaatggaacccgttgacttagttcccttataagaagttcttgcaaacacctctgtgacgttttcattcaagtggatatgttggacaaataggaaacagttttagtttacgcgaacagtatgagacttccaggtggtggacgccatttttttagaagtgttgatgatgtatttgataacattataaaagtatgtgtctcccgtgaaagaacattgagctatttccctggaatggatggggaagaaatgagcaaaggagtgctgttctgtatgggtgtctatacccttattccaaggtgaataaataaagttgtgtttgcctaatcatg

SEQ ID NO: 178634 - DNA, 7372 bp, Homo sapiens
  Payload ID: 15200
  Gene Symbol: RUNX1T1
  Gene Name: runt-related transcription factor 1
  translocated to, 1 (cyclin D-related)
  ENST ID: ENST00000615601
  CDS Start-End: 343-2097
atcacatttgtctgccacagcagcaacaacagaaaagcggagggagggagggaggcgggaggaggggagcagagctccgcaagtcttgggctctgcgtggaggttgcgtttggctggcgtccccgaccccgggctttttgcacggcagctctctctgcgcagcgccgggcggccgtagtcgctccgcggcgcgactccgcggtctcgtggcgagcgcgcgtgggcgagtggccgcggacactctggcctcgcgagggaagccgcgccgcgtcctcgccccgtcgccccgcgggccggccgagacgacgggaagttttatttgcagctcggagcctgtggcggatggtgggactctccggccctgtgcagtatcgtactgagaagcactccacaatgccagactcacctgtggatgtgaagacgcaatctaggctgactcctccaacaatgccacctcccccaactactcaaggagctccaagaaccagttcatttacaccgacaacgttaactaatggcacgagccattctcctacagccttgaatggcgccccctcaccacccaatggcttcagcaatgggccttcctcttcttcctcctcctctctggctaatcaacagctgcccccagcctgtggtgccaggcaactcagcaagctgaaaaggttccttactaccctgcagcagtttggcaatgacatttcacccgagataggagaaagagttcgcaccctcgttctgggactagtgaactccactttgacaattgaagaatttcattccaaactgcaagaagctactaacttcccactgagaccttttgtcatcccatttttgaaggccaacttgcccctgctgcagcgtgagctcctccactgcgcaagactggccaaacagaaccctgcccagtacctcgcccagcatgaacagctgcttctggatgccagcaccacctcacctgttgactcctcagagctgcttctcgatgtgaacgaaaacgggaagaggcgaactccagacagaaccaaagaaaatggctttgacagagagcctttgcactcagaacatccaagcaagcgaccatgcactattagcccaggccagcggtacagtccaaataacggcttatcctaccagcccaatggcctgcctcaccctaccccacctccacctcagcattaccgtttggatgatatggccattgcccaccactacagggactcctatcgacaccccagccacagggacctcagggacagaaacagacctatggggttgcatggcacacgtcaagaagaaatgattgatcacagactaacagacagagaatgggcagaagagtggaaacatcttgaccatctgttaaactgcataatggacatggtagaaaaaacaaggcgatctctcaccgtactaaggcggtgtcaagaagcagaccgggaagaattgaattactggatccggcggtacagtgacgccgaggacttaaaaaaaggtggcggcagtagcagcagccactctaggcagcagagtcccgtcaacccagacccagttgcactagacgcgcatcgggaattccttcacaggcctgcgtctggatacgtgccagaggagatctggaagaaagctgaggaggccgtcaatgaggtgaagcgccaggcgatgacggagctgcagaaggccgtgtctgaggcggagcggaaagcccacgacatgatcacaacagagagggccaagatggagcgcacggtcgccgaggccaaacggcaggcggcggaggacgcactggcagttatcaatcagcaggaggattcaagcgagagttgctggaattgtggccgtaaagcgagtgaaacctgcagtggctgtaacacagcccgatactgtggctcattttgccagcacaaagactgggagaagcaccatcacatctgtggacagaccctgcaggcccagcagcagggagacacacctgcagtcagctcctctgtcacgcccaacagcggggctgggagcccgatggacacaccaccagcagccactccgaggtcaaccaccccgggaaccccttccaccatagagacaacccctcgctagacgtgaactcagaactgtcggaggaaagacaacacaaccaacgcgaaaccaattcctcatcctcagatgctcaaagttgttttttttgtttgtttgtttattagatgaattatcctatttcagtacttcagcaagagagaacctaactgtatcttgaggtggtagtaaaacacagagggccagtaacgggtcgtaatgacttattgtggataacaaagatatcttttctttagagaactgaaaagagagcagagaatataacatgaaatgatagatttgacctcctccctgttattttcaagtagctgggattttaaactagatgacctcattaaccgatgctttaccaaacagcaaaccaagagattgctaattgctgttgaaagcaaaaatgctaatattaaaagtcacaatgttctttatatacaataatggaaaaaaaaaaaagaggaaaaccctcaagggcatgagcattggatacagcagtagacattttaacaagaagatgaatggcgtccgtgggttgctaactgaactttgaagacccgctacaaaacgcgcagatgtgcagcagattggaaggagacacagatgttcggtttttttcctgtttctgaaaagaaataataatatccaggtcaacagaatgaaaaatgaaagatgatttgcaatgggatgtatgaatacagcagcaagaaaaaaaaatgccataatacaaaaggctccatatatatatatatatatatatatatacacacacacacacgcacatatacacacacacacacacacacacacacacacacacacacacacacacacacacacaagtaagagactcagcctgcagttaattagcattctggcagttttgacatcagccagctgccctaaataacccttcaacgtttcttcacttttgcaaggttccacagagtaagacattgggtctattccagctcattcattttatattgaaaaaaataattttaaaaatggtggcttcagctccagcccctttccaaaatttttcaaccccaccctgtttggatttttaattaaaaactagtagttctcttggtgttaaaacacttctgtcctgtgaggtttcccaatggtgtttttcttgtaaatgtgttggacaaatgtgaagatgcattgtagtttaaccatatgcccacatttagtctctttattcctagttggtgagaaacctgtatctttctatgctgcttttatatctgtatgtattagtgatatttctctagtagttaaaaaaaaaaaaaggaaaaaaagactctttttggttgtcctcaagaaaagaaaagaagaaaagctatctttcggagctgctatttcactctcttataggatttttttttttcctgaaaaccagcatgcttcacggaatgctaacatattggtgtttttgtaagagggatgtacataaatgtattttgcactgtcacaatgactccctaggcatgctttttgtttttttttttttttttttgagcaaattctttttaaatatgctagagccatttcatcaagtttagctgtagcatagagtagtcgtggaatttttcttttttttttttttaaatcattattagggacttttttaaaaaaataaaataacaagatatcctactttaaaaaaaaaggacagtgcatgcatattgctgtaaggtcgtttaagtatttctaattttacaaaagtaaaaatcattagagctccaaatgctgaggtgtagattgacagctttaacactgctgaatgccaggttatacagtattcttacaaaaagggaagtcagccaaagactgatctgatggaccaaaatcggaattttgaaaagcaccagtactactttccaaatgatcagcaggttaaacatgttcagcaaggtatagtatgaatccattaacccttcgttgtccagggtccagaccagaactacttgttagttttgaaaacagtagcccaggatgtggttgtgtgctttaggaaagtcagcagtgctgcaggctgtgtagacaaccaaagtttacaaggctgggaagacacttctccaaatacatatacaccaggcatttctttaaaatcaaaaacaatccattagctttggggcggggggtggggggagggttaaatgtaggccttggaaacagttttaagtggcttttaagtatctgcatagaggcaatcctaaggtttgctttaagtctcttaaatctaacatttttaaaagcatttcttccctgtattttcatatacaagttggttttaattttgtttgggtggtgttattttttttaaatgactttttagtttagaaagttctgatgagcaaataaatacatctatctacatgttggaagtccatctgccagcacacctgcttaaagtgaaatgaaagcacataaccaggctctgaatgggttatattttatcatggtgctcccagaatcctttgacctcactctgctttctagtctgcttgtgacactggacagtcctttcttacagagctattatatgttctaggctacgaagggttaaataatcccaaaaatgaggtatgtcatacccacacgtctttatctctagaagctgtgatgtatgtgaaacagcactgttattcttaacactagtgtgtaaaataaggattagtacagtacgtctcattactttttaattcagggcaccctgagtgaaaacaaatacaaaaaaaaatccctaactctgagctctatctctgattcctcttcctccttcccctcttcctcctcttcctctcctcctgttttgctacattctcctcagtggcaaaaagtttcactctacctctgacagcatgtatattgcaccagtagctaacaaaaactggtctagtcaaaccaaatgggcacaaaagaaccaggataccaaaagttaagctcatacagctgcaaaccatatcacttcttggtaacaatgcagacctcataaacctaaagaagagaaagaaaagaaaacttttgttactttccttttttgcttgtcacttatatacaggctatgtgagaatataatttgtaggtataacacattaagaaaaagttatcttcattggatagaattgaatggtggtcgctgataggaatagggcgtcctctagctcttatctctgtctcttactcttttctctttctctttttctctgtcatgagactgtgtgtgacagggccacctgtcttttttttttcttaaattttttttttttttatgtgtaggtgcatgtcttggggatttaaaaatttcaaggctggtttacttatgcaaagcatgcctacgtctggaatacttagggaaagaaagcgactccatgttgtccgaattcctcaagggacagaaaaaaaattggagactgttgaaatgcagatttgaagtaatttttttaaaatattattttgggttctgcgacattgtgaaaaattaaagttgttgtgcaatacttaattcagacatgtaccacaagttaatggtagactaacactggggggtggggtctaggcatcatgcttttgtcagcatactcttgagcttttaagtctactatgtctgaactgtggtttcttgtttatccttttttccttagttggactgtaatgtatggtctgtcaacctgtgaatctttaaagtatgattcaggtattgttgtattctttactgtgtaataaaaaagttgaaaaaaatctggatcctctgtctccctcgtccccggtgtgccatggttgcccaccagtgaccccagcctgaggagtccatcctccatggtgctgaatcaaatctgtagagtttattcagctacaaagcgtggctctgtaacaggagttggcttatccatgcgtgttgagtagggaatgatgtcagaactttgcaaaagtcgagctcattcataaggggatgtttctcaggcaggaggagtaggaagagtgggaggagaattactaccttccataggaaaggagagcttggcttgcctagattagctgctgcatagatagcagaggcccttttggctgtgttttgataaaattagaaatgagtacctaaatctggatcactctgctcagagaggttcgtgccaacctcatgaggctctgactcttgtcaggttgcttggctgccttgtgcatacccgaatggcagatcagctgacatgacatggaactgctctatctgccttgtcccctctcctctaattaaaagtcgctaccattgtcactcttggttatgtagttaatatccactgtggctatctccaacttgctgggacatccagttatctcctctgacacatattttttcattctctagttacaaagtttgttagagtttgaaaaacaaacccttctcccctaccctgtgaatgctgttagtttttatgtgtagttttcaaaacacagattatcttatatactgtgttgtagcagaaattcctgtttcctctgaatgttctgactttatagaccaaaataatcgttgcaaaaaatcaaggatggcacagcaggtgcatgagcccgtgtctggagaaaggttatgaaggtgaatgctggttacatgggagggtgacttggagccctctagtttccttcttgtgccagctgggttcctgtttcaaggccaggcttctctaacttgtcttcctgggaaatgtagcttttccaagaatttggtagtgcacaccaggaaaaactaggtatcagaacagatttttttttaaatagtggaaacaccctcactcccacactttggacagttagggttggatatttaatttcatagttactctttttttccacagaagaaaggccagcctgacccaagttgcctatttttaatgtgttactgcatcttattttctcttcaaagtgaaaaaggccagaaactagcagatagaaatggaacccgttgacttagttcccttataagaagttcttgcaaacacctctgtgacgttttcattcaagtggatatgttggacaaataggaaacagttttagtttacgcgaacagtatgagacttccaggtggtggacgccatttttttagaagtgttgatgatgtatttgataacattataaaagtatgtgtctcccgtgaaagaacattgagctatttccctggaatggatggggaagaaatgagcaaaggagtgctgttctgtatgggtgtctatacccttattccaaggtgaataaataaagttgtgtttgcctaatcatg

SEQ ID NO: 178635 - DNA, 7627 bp, Homo sapiens
  Payload ID: 15200
  Gene Symbol: RUNX1T1
  Gene Name: runt-related transcription factor 1
  translocated to, 1 (cyclin D-related)
  Uniprot ID: Q06455
  ENST ID: ENST00000617740
  CDS Start-End: 538-2352
ccctcctgcctgtccctttctgtcttctctctctctctcccacttttcctccctctcccgctccgtctcacacgcaccctctgtttattttcctgcctccatctgggccctgctgatattgtaatcaccctgatgcacgttggcttctctcctctccctcctgcgctcacacactcactcacacacaatgtgccatcctgacaaggcttttacttctgataagctccaatgtgtgtttaatgaatacaaagccgcggtctgggtgccgcctcggccgcggccgctctcccgcgctcctttgccagaagctggcggagagaatttacatttaaagattagcagagtgagaaagagaaatctgccttttgttgtgtggggtgaggaggaggcatctacccctggccttgacgctatctcccatcacctctgctatccagacaggactcaccgagaaaagattgatctctgggctggtgaacataatctctgtcccagtcagaaaaggagagaggaaattagcagagcgattggtggagaatgatatctgtcaaaagaaacacttggagagcactgagtttagtaataggtgactgccggaaaaaagggaactttgaatattgtcaagatcgtactgagaagcactccacaatgccagactcacctgtggatgtgaagacgcaatctaggctgactcctccaacaatgccacctcccccaactactcaaggagctccaagaaccagttcatttacaccgacaacgttaactaatggcacgagccattctcctacagccttgaatggcgccccctcaccacccaatggcttcagcaatgggccttcctcttcttcctcctcctctctggctaatcaacagctgcccccagcctgtggtgccaggcaactcagcaagctgaaaaggttccttactaccctgcagcagtttggcaatgacatttcacccgagataggagaaagagttcgcaccctcgttctgggactagtgaactccactttgacaattgaagaatttcattccaaactgcaagaagctactaacttcccactgagaccttttgtcatcccatttttgaaggccaacttgcccctgctgcagcgtgagctcctccactgcgcaagactggccaaacagaaccctgcccagtacctcgcccagcatgaacagctgcttctggatgccagcaccacctcacctgttgactcctcagagctgcttctcgatgtgaacgaaaacgggaagaggcgaactccagacagaaccaaagaaaatggctttgacagagagcctttgcactcagaacatccaagcaagcgaccatgcactattagcccaggccagcggtacagtccaaataacggcttatcctaccagcccaatggcctgcctcaccctaccccacctccacctcagcattaccgtttggatgatatggccattgcccaccactacagggactcctatcgacaccccagccacagggacctcagggacagaaacagacctatggggttgcatggcacacgtcaagaagaaatgattgatcacagactaacagacagagaatgggcagaagagtggaaacatcttgaccatctgttaaactgcataatggacatggtagaaaaaacaaggcgatctctcaccgtactaaggcggtgtcaagaagcagaccgggaagaattgaattactggatccggcggtacagtgacgccgaggacttaaaaaaaggtggcggcagtagcagcagccactctaggcagcagagtcccgtcaacccagacccagttgcactagacgcgcatcgggaattccttcacaggcctgcgtctggatacgtgccagaggagatctggaagaaagctgaggaggccgtcaatgaggtgaagcgccaggcgatgacggagctgcagaaggccgtgtctgaggcggagcggaaagcccacgacatgatcacaacagagagggccaagatggagcgcacggtcgccgaggccaaacggcaggcggcggaggacgcactggcagttatcaatcagcaggaggattcaagcgagagttgctggaattgtggccgtaaagcgagtgaaacctgcagtggctgtaacacagcccgatactgtggctcattttgccagcacaaagactgggagaagcaccatcacatctgtggacagaccctgcaggcccagcagcagggagacacacctgcagtcagctcctctgtcacgcccaacagcggggctgggagcccgatggacacaccaccagcagccactccgaggtcaaccaccccgggaaccccttccaccatagagacaacccctcgctagacgtgaactcagaactgtcggaggaaagacaacacaaccaacgcgaaaccaattcctcatcctcagatgctcaaagttgttttttttgtttgtttgtttattagatgaattatcctatttcagtacttcagcaagagagaacctaactgtatcttgaggtggtagtaaaacacagagggccagtaacgggtcgtaatgacttattgtggataacaaagatatcttttctttagagaactgaaaagagagcagagaatataacatgaaatgatagatttgacctcctccctgttattttcaagtagctgggattttaaactagatgacctcattaaccgatgctttaccaaacagcaaaccaagagattgctaattgctgttgaaagcaaaaatgctaatattaaaagtcacaatgttctttatatacaataatggaaaaaaaaaaaagaggaaaaccctcaagggcatgagcattggatacagcagtagacattttaacaagaagatgaatggcgtccgtgggttgctaactgaactttgaagacccgctacaaaacgcgcagatgtgcagcagattggaaggagacacagatgttcggtttttttcctgtttctgaaaagaaataataatatccaggtcaacagaatgaaaaatgaaagatgatttgcaatgggatgtatgaatacagcagcaagaaaaaaaaatgccataatacaaaaggctccatatatatatatatatatatatatatacacacacacacacgcacatatacacacacacacacacacacacacacacacacacacacacacacacacacacacaagtaagagactcagcctgcagttaattagcattctggcagttttgacatcagccagctgccctaaataacccttcaacgtttcttcacttttgcaaggttccacagagtaagacattgggtctattccagctcattcattttatattgaaaaaaataattttaaaaatggtggcttcagctccagcccctttccaaaatttttcaaccccaccctgtttggatttttaattaaaaactagtagttctcttggtgttaaaacacttctgtcctgtgaggtttcccaatggtgtttttcttgtaaatgtgttggacaaatgtgaagatgcattgtagtttaaccatatgcccacatttagtctctttattcctagttggtgagaaacctgtatctttctatgctgcttttatatctgtatgtattagtgatatttctctagtagttaaaaaaaaaaaaaggaaaaaaagactctttttggttgtcctcaagaaaagaaaagaagaaaagctatctttcggagctgctatttcactctcttataggatttttttttttcctgaaaaccagcatgcttcacggaatgctaacatattggtgtttttgtaagagggatgtacataaatgtattttgcactgtcacaatgactccctaggcatgctttttgtttttttttttttttttttgagcaaattctttttaaatatgctagagccatttcatcaagtttagctgtagcatagagtagtcgtggaatttttcttttttttttttttaaatcattattagggacttttttaaaaaaataaaataacaagatatcctactttaaaaaaaaaggacagtgcatgcatattgctgtaaggtcgtttaagtatttctaattttacaaaagtaaaaatcattagagctccaaatgctgaggtgtagattgacagctttaacactgctgaatgccaggttatacagtattcttacaaaaagggaagtcagccaaagactgatctgatggaccaaaatcggaattttgaaaagcaccagtactactttccaaatgatcagcaggttaaacatgttcagcaaggtatagtatgaatccattaacccttcgttgtccagggtccagaccagaactacttgttagttttgaaaacagtagcccaggatgtggttgtgtgctttaggaaagtcagcagtgctgcaggctgtgtagacaaccaaagtttacaaggctgggaagacacttctccaaatacatatacaccaggcatttctttaaaatcaaaaacaatccattagctttggggcggggggtggggggagggttaaatgtaggccttggaaacagttttaagtggcttttaagtatctgcatagaggcaatcctaaggtttgctttaagtctcttaaatctaacatttttaaaagcatttcttccctgtattttcatatacaagttggttttaattttgtttgggtggtgttattttttttaaatgactttttagtttagaaagttctgatgagcaaataaatacatctatctacatgttggaagtccatctgccagcacacctgcttaaagtgaaatgaaagcacataaccaggctctgaatgggttatattttatcatggtgctcccagaatcctttgacctcactctgctttctagtctgcttgtgacactggacagtcctttcttacagagctattatatgttctaggctacgaagggttaaataatcccaaaaatgaggtatgtcatacccacacgtctttatctctagaagctgtgatgtatgtgaaacagcactgttattcttaacactagtgtgtaaaataaggattagtacagtacgtctcattactttttaattcagggcaccctgagtgaaaacaaatacaaaaaaaaatccctaactctgagctctatctctgattcctcttcctccttcccctcttcctcctcttcctctcctcctgttttgctacattctcctcagtggcaaaaagtttcactctacctctgacagcatgtatattgcaccagtagctaacaaaaactggtctagtcaaaccaaatgggcacaaaagaaccaggataccaaaagttaagctcatacagctgcaaaccatatcacttcttggtaacaatgcagacctcataaacctaaagaagagaaagaaaagaaaacttttgttactttccttttttgcttgtcacttatatacaggctatgtgagaatataatttgtaggtataacacattaagaaaaagttatcttcattggatagaattgaatggtggtcgctgataggaatagggcgtcctctagctcttatctctgtctcttactcttttctctttctctttttctctgtcatgagactgtgtgtgacagggccacctgtcttttttttttcttaaattttttttttttttatgtgtaggtgcatgtcttggggatttaaaaatttcaaggctggtttacttatgcaaagcatgcctacgtctggaatacttagggaaagaaagcgactccatgttgtccgaattcctcaagggacagaaaaaaaattggagactgttgaaatgcagatttgaagtaatttttttaaaatattattttgggttctgcgacattgtgaaaaattaaagttgttgtgcaatacttaattcagacatgtaccacaagttaatggtagactaacactggggggtggggtctaggcatcatgcttttgtcagcatactcttgagcttttaagtctactatgtctgaactgtggtttcttgtttatccttttttccttagttggactgtaatgtatggtctgtcaacctgtgaatctttaaagtatgattcaggtattgttgtattctttactgtgtaataaaaaagttgaaaaaaatctggatcctctgtctccctcgtccccggtgtgccatggttgcccaccagtgaccccagcctgaggagtccatcctccatggtgctgaatcaaatctgtagagtttattcagctacaaagcgtggctctgtaacaggagttggcttatccatgcgtgttgagtagggaatgatgtcagaactttgcaaaagtcgagctcattcataaggggatgtttctcaggcaggaggagtaggaagagtgggaggagaattactaccttccataggaaaggagagcttggcttgcctagattagctgctgcatagatagcagaggcccttttggctgtgttttgataaaattagaaatgagtacctaaatctggatcactctgctcagagaggttcgtgccaacctcatgaggctctgactcttgtcaggttgcttggctgccttgtgcatacccgaatggcagatcagctgacatgacatggaactgctctatctgccttgtcccctctcctctaattaaaagtcgctaccattgtcactcttggttatgtagttaatatccactgtggctatctccaacttgctgggacatccagttatctcctctgacacatattttttcattctctagttacaaagtttgttagagtttgaaaaacaaacccttctcccctaccctgtgaatgctgttagtttttatgtgtagttttcaaaacacagattatcttatatactgtgttgtagcagaaattcctgtttcctctgaatgttctgactttatagaccaaaataatcgttgcaaaaaatcaaggatggcacagcaggtgcatgagcccgtgtctggagaaaggttatgaaggtgaatgctggttacatgggagggtgacttggagccctctagtttccttcttgtgccagctgggttcctgtttcaaggccaggcttctctaacttgtcttcctgggaaatgtagcttttccaagaatttggtagtgcacaccaggaaaaactaggtatcagaacagatttttttttaaatagtggaaacaccctcactcccacactttggacagttagggttggatatttaatttcatagttactctttttttccacagaagaaaggccagcctgacccaagttgcctatttttaatgtgttactgcatcttattttctcttcaaagtgaaaaaggccagaaactagcagatagaaatggaacccgttgacttagttcccttataagaagttcttgcaaacacctctgtgacgttttcattcaagtggatatgttggacaaataggaaacagttttagtttacgcgaacagtatgagacttccaggtggtggacgccatttttttagaagtgttgatgatgtatttgataacattataaaagtatgtgtctcccgtgaaagaacattgagctatttccctggaatggatggggaagaaatgagcaaaggagtgctgttctgtatgggtgtctatacccttattccaaggtgaataaataaagttgtgtttgcctaatcatg

SEQ ID NO: 178636 - DNA, 7483 bp, Homo sapiens
  Payload ID: 15200
  Gene Symbol: RUNX1T1
  Gene Name: runt-related transcription factor 1
  translocated to, 1 (cyclin D-related)
  Uniprot ID: Q06455
  ENST ID: ENST00000614812
  CDS Start-End: 394-2208
ccctcctgcctgtccctttctgtcttctctctctctctcccacttttcctccctctcccgctccgtctcacacgcaccctctgtttattttcctgcctccatctgggccctgctgatattgtaatcaccctgatgcacgttggcttctctcctctccctcctgcgctcacacactcactcacacacaatgtgccatcctgacaaggcttttacttctgataagctccaatgtgtgtttaatgaatacaaagccgcggtctgggtgccgcctcggccgcggccgctctcccgcgctcctttgccagaagaaaagattgatctctgggctggtgaacataatctctgtcccagtcagaaaaggagagaggaaattagcagagcgattggtggagaatgatatctgtcaaaagaaacacttggagagcactgagtttagtaataggtgactgccggaaaaaagggaactttgaatattgtcaagatcgtactgagaagcactccacaatgccagactcacctgtggatgtgaagacgcaatctaggctgactcctccaacaatgccacctcccccaactactcaaggagctccaagaaccagttcatttacaccgacaacgttaactaatggcacgagccattctcctacagccttgaatggcgccccctcaccacccaatggcttcagcaatgggccttcctcttcttcctcctcctctctggctaatcaacagctgcccccagcctgtggtgccaggcaactcagcaagctgaaaaggttccttactaccctgcagcagtttggcaatgacatttcacccgagataggagaaagagttcgcaccctcgttctgggactagtgaactccactttgacaattgaagaatttcattccaaactgcaagaagctactaacttcccactgagaccttttgtcatcccatttttgaaggccaacttgcccctgctgcagcgtgagctcctccactgcgcaagactggccaaacagaaccctgcccagtacctcgcccagcatgaacagctgcttctggatgccagcaccacctcacctgttgactcctcagagctgcttctcgatgtgaacgaaaacgggaagaggcgaactccagacagaaccaaagaaaatggctttgacagagagcctttgcactcagaacatccaagcaagcgaccatgcactattagcccaggccagcggtacagtccaaataacggcttatcctaccagcccaatggcctgcctcaccctaccccacctccacctcagcattaccgtttggatgatatggccattgcccaccactacagggactcctatcgacaccccagccacagggacctcagggacagaaacagacctatggggttgcatggcacacgtcaagaagaaatgattgatcacagactaacagacagagaatgggcagaagagtggaaacatcttgaccatctgttaaactgcataatggacatggtagaaaaaacaaggcgatctctcaccgtactaaggcggtgtcaagaagcagaccgggaagaattgaattactggatccggcggtacagtgacgccgaggacttaaaaaaaggtggcggcagtagcagcagccactctaggcagcagagtcccgtcaacccagacccagttgcactagacgcgcatcgggaattccttcacaggcctgcgtctggatacgtgccagaggagatctggaagaaagctgaggaggccgtcaatgaggtgaagcgccaggcgatgacggagctgcagaaggccgtgtctgaggcggagcggaaagcccacgacatgatcacaacagagagggccaagatggagcgcacggtcgccgaggccaaacggcaggcggcggaggacgcactggcagttatcaatcagcaggaggattcaagcgagagttgctggaattgtggccgtaaagcgagtgaaacctgcagtggctgtaacacagcccgatactgtggctcattttgccagcacaaagactgggagaagcaccatcacatctgtggacagaccctgcaggcccagcagcagggagacacacctgcagtcagctcctctgtcacgcccaacagcggggctgggagcccgatggacacaccaccagcagccactccgaggtcaaccaccccgggaaccccttccaccatagagacaacccctcgctagacgtgaactcagaactgtcggaggaaagacaacacaaccaacgcgaaaccaattcctcatcctcagatgctcaaagttgttttttttgtttgtttgtttattagatgaattatcctatttcagtacttcagcaagagagaacctaactgtatcttgaggtggtagtaaaacacagagggccagtaacgggtcgtaatgacttattgtggataacaaagatatcttttctttagagaactgaaaagagagcagagaatataacatgaaatgatagatttgacctcctccctgttattttcaagtagctgggattttaaactagatgacctcattaaccgatgctttaccaaacagcaaaccaagagattgctaattgctgttgaaagcaaaaatgctaatattaaaagtcacaatgttctttatatacaataatggaaaaaaaaaaaagaggaaaaccctcaagggcatgagcattggatacagcagtagacattttaacaagaagatgaatggcgtccgtgggttgctaactgaactttgaagacccgctacaaaacgcgcagatgtgcagcagattggaaggagacacagatgttcggtttttttcctgtttctgaaaagaaataataatatccaggtcaacagaatgaaaaatgaaagatgatttgcaatgggatgtatgaatacagcagcaagaaaaaaaaatgccataatacaaaaggctccatatatatatatatatatatatatatacacacacacacacgcacatatacacacacacacacacacacacacacacacacacacacacacacacacacacacaagtaagagactcagcctgcagttaattagcattctggcagttttgacatcagccagctgccctaaataacccttcaacgtttcttcacttttgcaaggttccacagagtaagacattgggtctattccagctcattcattttatattgaaaaaaataattttaaaaatggtggcttcagctccagcccctttccaaaatttttcaaccccaccctgtttggatttttaattaaaaactagtagttctcttggtgttaaaacacttctgtcctgtgaggtttcccaatggtgtttttcttgtaaatgtgttggacaaatgtgaagatgcattgtagtttaaccatatgcccacatttagtctctttattcctagttggtgagaaacctgtatctttctatgctgcttttatatctgtatgtattagtgatatttctctagtagttaaaaaaaaaaaaaggaaaaaaagactctttttggttgtcctcaagaaaagaaaagaagaaaagctatctttcggagctgctatttcactctcttataggatttttttttttcctgaaaaccagcatgcttcacggaatgctaacatattggtgtttttgtaagagggatgtacataaatgtattttgcactgtcacaatgactccctaggcatgctttttgtttttttttttttttttttgagcaaattctttttaaatatgctagagccatttcatcaagtttagctgtagcatagagtagtcgtggaatttttcttttttttttttttaaatcattattagggacttttttaaaaaaataaaataacaagatatcctactttaaaaaaaaaggacagtgcatgcatattgctgtaaggtcgtttaagtatttctaattttacaaaagtaaaaatcattagagctccaaatgctgaggtgtagattgacagctttaacactgctgaatgccaggttatacagtattcttacaaaaagggaagtcagccaaagactgatctgatggaccaaaatcggaattttgaaaagcaccagtactactttccaaatgatcagcaggttaaacatgttcagcaaggtatagtatgaatccattaacccttcgttgtccagggtccagaccagaactacttgttagttttgaaaacagtagcccaggatgtggttgtgtgctttaggaaagtcagcagtgctgcaggctgtgtagacaaccaaagtttacaaggctgggaagacacttctccaaatacatatacaccaggcatttctttaaaatcaaaaacaatccattagctttggggcggggggtggggggagggttaaatgtaggccttggaaacagttttaagtggcttttaagtatctgcatagaggcaatcctaaggtttgctttaagtctcttaaatctaacatttttaaaagcatttcttccctgtattttcatatacaagttggttttaattttgtttgggtggtgttattttttttaaatgactttttagtttagaaagttctgatgagcaaataaatacatctatctacatgttggaagtccatctgccagcacacctgcttaaagtgaaatgaaagcacataaccaggctctgaatgggttatattttatcatggtgctcccagaatcctttgacctcactctgctttctagtctgcttgtgacactggacagtcctttcttacagagctattatatgttctaggctacgaagggttaaataatcccaaaaatgaggtatgtcatacccacacgtctttatctctagaagctgtgatgtatgtgaaacagcactgttattcttaacactagtgtgtaaaataaggattagtacagtacgtctcattactttttaattcagggcaccctgagtgaaaacaaatacaaaaaaaaatccctaactctgagctctatctctgattcctcttcctccttcccctcttcctcctcttcctctcctcctgttttgctacattctcctcagtggcaaaaagtttcactctacctctgacagcatgtatattgcaccagtagctaacaaaaactggtctagtcaaaccaaatgggcacaaaagaaccaggataccaaaagttaagctcatacagctgcaaaccatatcacttcttggtaacaatgcagacctcataaacctaaagaagagaaagaaaagaaaacttttgttactttccttttttgcttgtcacttatatacaggctatgtgagaatataatttgtaggtataacacattaagaaaaagttatcttcattggatagaattgaatggtggtcgctgataggaatagggcgtcctctagctcttatctctgtctcttactcttttctctttctctttttctctgtcatgagactgtgtgtgacagggccacctgtcttttttttttcttaaattttttttttttttatgtgtaggtgcatgtcttggggatttaaaaatttcaaggctggtttacttatgcaaagcatgcctacgtctggaatacttagggaaagaaagcgactccatgttgtccgaattcctcaagggacagaaaaaaaattggagactgttgaaatgcagatttgaagtaatttttttaaaatattattttgggttctgcgacattgtgaaaaattaaagttgttgtgcaatacttaattcagacatgtaccacaagttaatggtagactaacactggggggtggggtctaggcatcatgcttttgtcagcatactcttgagcttttaagtctactatgtctgaactgtggtttcttgtttatccttttttccttagttggactgtaatgtatggtctgtcaacctgtgaatctttaaagtatgattcaggtattgttgtattctttactgtgtaataaaaaagttgaaaaaaatctggatcctctgtctccctcgtccccggtgtgccatggttgcccaccagtgaccccagcctgaggagtccatcctccatggtgctgaatcaaatctgtagagtttattcagctacaaagcgtggctctgtaacaggagttggcttatccatgcgtgttgagtagggaatgatgtcagaactttgcaaaagtcgagctcattcataaggggatgtttctcaggcaggaggagtaggaagagtgggaggagaattactaccttccataggaaaggagagcttggcttgcctagattagctgctgcatagatagcagaggcccttttggctgtgttttgataaaattagaaatgagtacctaaatctggatcactctgctcagagaggttcgtgccaacctcatgaggctctgactcttgtcaggttgcttggctgccttgtgcatacccgaatggcagatcagctgacatgacatggaactgctctatctgccttgtcccctctcctctaattaaaagtcgctaccattgtcactcttggttatgtagttaatatccactgtggctatctccaacttgctgggacatccagttatctcctctgacacatattttttcattctctagttacaaagtttgttagagtttgaaaaacaaacccttctcccctaccctgtgaatgctgttagtttttatgtgtagttttcaaaacacagattatcttatatactgtgttgtagcagaaattcctgtttcctctgaatgttctgactttatagaccaaaataatcgttgcaaaaaatcaaggatggcacagcaggtgcatgagcccgtgtctggagaaaggttatgaaggtgaatgctggttacatgggagggtgacttggagccctctagtttccttcttgtgccagctgggttcctgtttcaaggccaggcttctctaacttgtcttcctgggaaatgtagcttttccaagaatttggtagtgcacaccaggaaaaactaggtatcagaacagatttttttttaaatagtggaaacaccctcactcccacactttggacagttagggttggatatttaatttcatagttactctttttttccacagaagaaaggccagcctgacccaagttgcctatttttaatgtgttactgcatcttattttctcttcaaagtgaaaaaggccagaaactagcagatagaaatggaacccgttgacttagttcccttataagaagttcttgcaaacacctctgtgacgttttcattcaagtggatatgttggacaaataggaaacagttttagtttacgcgaacagtatgagacttccaggtggtggacgccatttttttagaagtgttgatgatgtatttgataacattataaaagtatgtgtctcccgtgaaagaacattgagctatttccctggaatggatggggaagaaatgagcaaaggagtgctgttctgtatgggtgtctatacccttattccaaggtgaataaataaagttgtgtttgcctaatcatg

SEQ ID NO: 178637 - DNA, 7687 bp, Homo sapiens
  Payload ID: 15200
  Gene Symbol: RUNX1T1
  Gene Name: runt-related transcription factor 1
  translocated to, 1 (cyclin D-related)
  Uniprot ID: Q06455
  ENST ID: ENST00000613302
  CDS Start-End: 598-2412
ccctcctgcctgtccctttctgtcttctctctctctctcccacttttcctccctctcccgctccgtctcacacgcaccctctgtttattttcctgcctccatctgggccctgctgatattgtaatcaccctgatgcacgttggcttctctcctctccctcctgcgctcacacactcactcacacacaatgtgccatcctgacaaggcttttacttctgataagctccaatgtgtgtttaatgaatacaaagccgcggtctgggtgccgcctcggccgcggccgctctcccgcgctcctttgccagaagctggcggagagaatttacatttaaagattagcagagtgagaaagagaaatctgccttttgttgtgtggggtgaggaggaggcatctacccctggccttgacgctatctcccatcacctctgctatccagacaggactcaccgagtatcaaatgataagaactgagcacactggatgaaataatacttgcactgggagcactaagaaaagattgatctctgggctggtgaacataatctctgtcccagtcagaaaaggagagaggaaattagcagagcgattggtggagaatgatatctgtcaaaagaaacacttggagagcactgagtttagtaataggtgactgccggaaaaaagggaactttgaatattgtcaagatcgtactgagaagcactccacaatgccagactcacctgtggatgtgaagacgcaatctaggctgactcctccaacaatgccacctcccccaactactcaaggagctccaagaaccagttcatttacaccgacaacgttaactaatggcacgagccattctcctacagccttgaatggcgccccctcaccacccaatggcttcagcaatgggccttcctcttcttcctcctcctctctggctaatcaacagctgcccccagcctgtggtgccaggcaactcagcaagctgaaaaggttccttactaccctgcagcagtttggcaatgacatttcacccgagataggagaaagagttcgcaccctcgttctgggactagtgaactccactttgacaattgaagaatttcattccaaactgcaagaagctactaacttcccactgagaccttttgtcatcccatttttgaaggccaacttgcccctgctgcagcgtgagctcctccactgcgcaagactggccaaacagaaccctgcccagtacctcgcccagcatgaacagctgcttctggatgccagcaccacctcacctgttgactcctcagagctgcttctcgatgtgaacgaaaacgggaagaggcgaactccagacagaaccaaagaaaatggctttgacagagagcctttgcactcagaacatccaagcaagcgaccatgcactattagcccaggccagcggtacagtccaaataacggcttatcctaccagcccaatggcctgcctcaccctaccccacctccacctcagcattaccgtttggatgatatggccattgcccaccactacagggactcctatcgacaccccagccacagggacctcagggacagaaacagacctatggggttgcatggcacacgtcaagaagaaatgattgatcacagactaacagacagagaatgggcagaagagtggaaacatcttgaccatctgttaaactgcataatggacatggtagaaaaaacaaggcgatctctcaccgtactaaggcggtgtcaagaagcagaccgggaagaattgaattactggatccggcggtacagtgacgccgaggacttaaaaaaaggtggcggcagtagcagcagccactctaggcagcagagtcccgtcaacccagacccagttgcactagacgcgcatcgggaattccttcacaggcctgcgtctggatacgtgccagaggagatctggaagaaagctgaggaggccgtcaatgaggtgaagcgccaggcgatgacggagctgcagaaggccgtgtctgaggcggagcggaaagcccacgacatgatcacaacagagagggccaagatggagcgcacggtcgccgaggccaaacggcaggcggcggaggacgcactggcagttatcaatcagcaggaggattcaagcgagagttgctggaattgtggccgtaaagcgagtgaaacctgcagtggctgtaacacagcccgatactgtggctcattttgccagcacaaagactgggagaagcaccatcacatctgtggacagaccctgcaggcccagcagcagggagacacacctgcagtcagctcctctgtcacgcccaacagcggggctgggagcccgatggacacaccaccagcagccactccgaggtcaaccaccccgggaaccccttccaccatagagacaacccctcgctagacgtgaactcagaactgtcggaggaaagacaacacaaccaacgcgaaaccaattcctcatcctcagatgctcaaagttgttttttttgtttgtttgtttattagatgaattatcctatttcagtacttcagcaagagagaacctaactgtatcttgaggtggtagtaaaacacagagggccagtaacgggtcgtaatgacttattgtggataacaaagatatcttttctttagagaactgaaaagagagcagagaatataacatgaaatgatagatttgacctcctccctgttattttcaagtagctgggattttaaactagatgacctcattaaccgatgctttaccaaacagcaaaccaagagattgctaattgctgttgaaagcaaaaatgctaatattaaaagtcacaatgttctttatatacaataatggaaaaaaaaaaaagaggaaaaccctcaagggcatgagcattggatacagcagtagacattttaacaagaagatgaatggcgtccgtgggttgctaactgaactttgaagacccgctacaaaacgcgcagatgtgcagcagattggaaggagacacagatgttcggtttttttcctgtttctgaaaagaaataataatatccaggtcaacagaatgaaaaatgaaagatgatttgcaatgggatgtatgaatacagcagcaagaaaaaaaaatgccataatacaaaaggctccatatatatatatatatatatatatatacacacacacacacgcacatatacacacacacacacacacacacacacacacacacacacacacacacacacacacaagtaagagactcagcctgcagttaattagcattctggcagttttgacatcagccagctgccctaaataacccttcaacgtttcttcacttttgcaaggttccacagagtaagacattgggtctattccagctcattcattttatattgaaaaaaataattttaaaaatggtggcttcagctccagcccctttccaaaatttttcaaccccaccctgtttggatttttaattaaaaactagtagttctcttggtgttaaaacacttctgtcctgtgaggtttcccaatggtgtttttcttgtaaatgtgttggacaaatgtgaagatgcattgtagtttaaccatatgcccacatttagtctctttattcctagttggtgagaaacctgtatctttctatgctgcttttatatctgtatgtattagtgatatttctctagtagttaaaaaaaaaaaaaggaaaaaaagactctttttggttgtcctcaagaaaagaaaagaagaaaagctatctttcggagctgctatttcactctcttataggatttttttttttcctgaaaaccagcatgcttcacggaatgctaacatattggtgtttttgtaagagggatgtacataaatgtattttgcactgtcacaatgactccctaggcatgctttttgtttttttttttttttttttgagcaaattctttttaaatatgctagagccatttcatcaagtttagctgtagcatagagtagtcgtggaatttttcttttttttttttttaaatcattattagggacttttttaaaaaaataaaataacaagatatcctactttaaaaaaaaaggacagtgcatgcatattgctgtaaggtcgtttaagtatttctaattttacaaaagtaaaaatcattagagctccaaatgctgaggtgtagattgacagctttaacactgctgaatgccaggttatacagtattcttacaaaaagggaagtcagccaaagactgatctgatggaccaaaatcggaattttgaaaagcaccagtactactttccaaatgatcagcaggttaaacatgttcagcaaggtatagtatgaatccattaacccttcgttgtccagggtccagaccagaactacttgttagttttgaaaacagtagcccaggatgtggttgtgtgctttaggaaagtcagcagtgctgcaggctgtgtagacaaccaaagtttacaaggctgggaagacacttctccaaatacatatacaccaggcatttctttaaaatcaaaaacaatccattagctttggggcggggggtggggggagggttaaatgtaggccttggaaacagttttaagtggcttttaagtatctgcatagaggcaatcctaaggtttgctttaagtctcttaaatctaacatttttaaaagcatttcttccctgtattttcatatacaagttggttttaattttgtttgggtggtgttattttttttaaatgactttttagtttagaaagttctgatgagcaaataaatacatctatctacatgttggaagtccatctgccagcacacctgcttaaagtgaaatgaaagcacataaccaggctctgaatgggttatattttatcatggtgctcccagaatcctttgacctcactctgctttctagtctgcttgtgacactggacagtcctttcttacagagctattatatgttctaggctacgaagggttaaataatcccaaaaatgaggtatgtcatacccacacgtctttatctctagaagctgtgatgtatgtgaaacagcactgttattcttaacactagtgtgtaaaataaggattagtacagtacgtctcattactttttaattcagggcaccctgagtgaaaacaaatacaaaaaaaaatccctaactctgagctctatctctgattcctcttcctccttcccctcttcctcctcttcctctcctcctgttttgctacattctcctcagtggcaaaaagtttcactctacctctgacagcatgtatattgcaccagtagctaacaaaaactggtctagtcaaaccaaatgggcacaaaagaaccaggataccaaaagttaagctcatacagctgcaaaccatatcacttcttggtaacaatgcagacctcataaacctaaagaagagaaagaaaagaaaacttttgttactttccttttttgcttgtcacttatatacaggctatgtgagaatataatttgtaggtataacacattaagaaaaagttatcttcattggatagaattgaatggtggtcgctgataggaatagggcgtcctctagctcttatctctgtctcttactcttttctctttctctttttctctgtcatgagactgtgtgtgacagggccacctgtcttttttttttcttaaattttttttttttttatgtgtaggtgcatgtcttggggatttaaaaatttcaaggctggtttacttatgcaaagcatgcctacgtctggaatacttagggaaagaaagcgactccatgttgtccgaattcctcaagggacagaaaaaaaattggagactgttgaaatgcagatttgaagtaatttttttaaaatattattttgggttctgcgacattgtgaaaaattaaagttgttgtgcaatacttaattcagacatgtaccacaagttaatggtagactaacactggggggtggggtctaggcatcatgcttttgtcagcatactcttgagcttttaagtctactatgtctgaactgtggtttcttgtttatccttttttccttagttggactgtaatgtatggtctgtcaacctgtgaatctttaaagtatgattcaggtattgttgtattctttactgtgtaataaaaaagttgaaaaaaatctggatcctctgtctccctcgtccccggtgtgccatggttgcccaccagtgaccccagcctgaggagtccatcctccatggtgctgaatcaaatctgtagagtttattcagctacaaagcgtggctctgtaacaggagttggcttatccatgcgtgttgagtagggaatgatgtcagaactttgcaaaagtcgagctcattcataaggggatgtttctcaggcaggaggagtaggaagagtgggaggagaattactaccttccataggaaaggagagcttggcttgcctagattagctgctgcatagatagcagaggcccttttggctgtgttttgataaaattagaaatgagtacctaaatctggatcactctgctcagagaggttcgtgccaacctcatgaggctctgactcttgtcaggttgcttggctgccttgtgcatacccgaatggcagatcagctgacatgacatggaactgctctatctgccttgtcccctctcctctaattaaaagtcgctaccattgtcactcttggttatgtagttaatatccactgtggctatctccaacttgctgggacatccagttatctcctctgacacatattttttcattctctagttacaaagtttgttagagtttgaaaaacaaacccttctcccctaccctgtgaatgctgttagtttttatgtgtagttttcaaaacacagattatcttatatactgtgttgtagcagaaattcctgtttcctctgaatgttctgactttatagaccaaaataatcgttgcaaaaaatcaaggatggcacagcaggtgcatgagcccgtgtctggagaaaggttatgaaggtgaatgctggttacatgggagggtgacttggagccctctagtttccttcttgtgccagctgggttcctgtttcaaggccaggcttctctaacttgtcttcctgggaaatgtagcttttccaagaatttggtagtgcacaccaggaaaaactaggtatcagaacagatttttttttaaatagtggaaacaccctcactcccacactttggacagttagggttggatatttaatttcatagttactctttttttccacagaagaaaggccagcctgacccaagttgcctatttttaatgtgttactgcatcttattttctcttcaaagtgaaaaaggccagaaactagcagatagaaatggaacccgttgacttagttcccttataagaagttcttgcaaacacctctgtgacgttttcattcaagtggatatgttggacaaataggaaacagttttagtttacgcgaacagtatgagacttccaggtggtggacgccatttttttagaagtgttgatgatgtatttgataacattataaaagtatgtgtctcccgtgaaagaacattgagctatttccctggaatggatggggaagaaatgagcaaaggagtgctgttctgtatgggtgtctatacccttattccaaggtgaataaataaagttgtgtttgcctaatcatg

SEQ ID NO: 178638 - DNA, 5390 bp, Homo sapiens
  Payload ID: 15201
  Gene Symbol: RUNX2
  Gene Name: runt-related transcription factor 2
  Uniprot ID: Q13950
  ENST ID: ENST00000359524
  CDS Start-End: 93-1616
gtctcgccttcacccccccaatttcctccttgcccctcatttccaccctcctccccctcccccggccacttcgctaacttgtggctgttgtgatgcgtattcccgtagatccgagcaccagccggcgcttcagccccccctccagcagcctgcagcccggcaaaatgagcgacgtgagcccggtggtggctgcgcaacagcagcagcaacagcagcagcagcaacagcagcagcagcagcagcaacagcagcagcagcagcaggaggcggcggcggcggctgcggcggcggcggcggctgcggcggcggcagctgcagtgccccggttgcggccgccccacgacaaccgcaccatggtggagatcatcgccgaccacccggccgaactcgtccgcaccgacagccccaacttcctgtgctcggtgctgccctcgcactggcgctgcaacaagaccctgcccgtggccttcaaggtggtagccctcggagaggtaccagatgggactgtggttactgtcatggcgggtaacgatgaaaattattctgctgagctccggaatgcctctgctgttatgaaaaaccaagtagcaaggttcaacgatctgagatttgtgggccggagtggacgaggcaagagtttcaccttgaccataaccgtcttcacaaatcctccccaagtagctacctatcacagagcaattaaagttacagtagatggacctcgggaacccagaaggcacagacagaagcttgatgactctaaacctagtttgttctctgaccgcctcagtgatttagggcgcattcctcatcccagtatgagagtaggtgtcccgcctcagaacccacggccctccctgaactctgcaccaagtccttttaatccacaaggacagagtcagattacagaccccaggcaggcacagtcttccccgccgtggtcctatgaccagtcttacccctcctacctgagccagatgacgtccccgtccatccactctaccaccccgctgtcttccacacggggcactgggcttcctgccatcaccgatgtgcctaggcgcatttcagatgatgacactgccacctctgacttctgcctctggccttccactctcagtaagaagagccaggcaggtgcttcagaactgggccctttttcagaccccaggcagttcccaagcatttcatccctcactgagagccgcttctccaacccacgaatgcactatccagccacctttacttacaccccgccagtcacctcaggcatgtccctcggtatgtccgccaccactcactaccacacctacctgccaccaccctaccccggctcttcccaaagccagagtggacccttccagaccagcagcactccatatctctactatggcacttcgtcaggatcctatcagtttcccatggtgccggggggagaccggtctccttccagaatgcttccgccatgcaccaccacctcgaatggcagcacgctattaaatccaaatttgcctaaccagaatgatggtgttgacgctgatggaagccacagcagttccccaactgttttgaattctagtggcagaatggatgaatctgtttggcgaccatattgaaattcctcagcagtggcccagtggtatctgggggccacatcccacacgtatcaatatatacatatatagagagagtgcatatatatgtatatcgattagctatctacaaagtgcctattttttagaagatttttcattcactcactcagtcatgatcttgcagccataagagggtagatattgagaagcagaaggctcaagagagacaattgcaatcgagcttcagattgtttactatttaagatgtacttttacaaaggaacaaagaagggaaaaggtatttttgtttttgttgtttggtctgttatcatcaataacctgttcatatgccaattcagagaggtggactccaggttcaggagggagaagagcaaagccgcttcctctctgtgctttgaaacttcacaccctcacggtggcagctgtgtatggaccagtgccctccgcagacagctcacaaaaccagttgaggtgcactaaagggacatgaggtagaatggatgcttccatcacagtaccatcattcagaataactcttccaatttctgctttcagacatgctgcaggtcctcatctgaactgttgggttcgtttttttttttttttttcctgctccaagaaagtgacttcaaaaataactgatcaggatagattattttattttactttttaacactccttctccccttttcccactgaaccaaaaagaaatcccatccctaaaacctgccttctccttttatgcaaaactgaaaatggcaatacattattatagccataatggtatagatagtgattgcgtttggctatgtgttgttttctttttttttaaattatgaatatgtgtaaaatctgaggtaacttgctaacgtgaatggtcatataactttaaagatatatttataattatttaatgacatttggacccttgaaacatttcttagtgtattgatatgttgacttcggtctctaaaagtgctctttattaaataacaaatttcttcagtggtctagagccatatctgaaatattgctaagcaatttcagttcatccaggcacaatgtgattttaaaaaatacttccatctccaaatattttagatatagattgtttttgtgatgtatgaaggaaatgttatgtttagttctttcagatctttgaatgcctctaacacagctttgccttctaaagcggtaattagggatttaaaaaacaacctttagccctttatcagcatgaaatgctggagtgatgtggttttctaatttctttggggtaattatgactcttgtcatattaaaaagacaagcacaagtaaatcattgaactacagaaaaatgttctgtggtttcatagttaagcaaaactctaaatcgccaggcttcatagcaaagacatagtcagctaaaagccgcacatgtggatagagggttcaattatgagacacctagtacaggagagcaaaattgcaccagagattcttaaccaaccagccttaccaaacaacacaacaggggaaccccaatctgccttacccaaggccccactggcagctttccacagaatttgcatttagaggagcagaatgacatcactgtcctttgggagtaggtcctctgaaaaggcagcaggttccagcaggtagctgagctgagaggacatatggcccacggggacctacagacagcctttgacatttgtatttcttacaatggagggccaaggagggcaaggggctgtggagtttggtgtctactagtgtgtatgaatttgagctagagtccttctgtggcatgcactttgaccactcctggcagtcacatggcagatttccaagtgcaaatccttaatccaaacaaggatcatctaatgacaccaccaggccaatccctgctctcctccccgaaaagtcagggtcccttcattggaatcctccacccacccaagcagaatttagcagagatttgccttcaaaccctaacggcccccttgttctctggtccttctcaaacccacctttgtaggccacccagcattgcaggacagcgtgtggggcagctggacctgtgcttcctgcctgggagtctcccttggaattcatcctgactccttctaataaaaatggatgggaaagcaaaacactttgccttctaaaggccgtataccaagtatgcttagataaataagccacttttctattacttaagtaagaaggaagtagtaattgatactatttattgtttgtgtgtggtagcttgaagcacaccactgtccatttatttgtaagtgtaaaatatgtgtgtttgtttcagcagcacttaaaaaagccagtgtctggttacacatttcaattttaattaattgacataaaaatgctaccgccagtgccagctgcatcctatttaattaaaaaggtactatatttgtacattattttttaatgttaaaagggcttttttaagtttacagtacacataccgagtgactttagggatgcttttgtgttgaaatgttactatagtggctgcaggcagcaacccagaaacactttagaagctttttttccttgggaaaaattcaagcacttcttccctccaccctcactccaaccaccccaatgggggtaattcacatttcttagaacaaattctgcccttttttggtctagggattaaaattttgtttttctttctttctttttttttttttttcactgaacccttaatttgcactgggtcatgtgtttgatttgtgatttcaagaccaaagcaaagtcttactactactgtggaaccatgtactagttcctgggaattaaaatagcgtggttctctttgtagcacaaacattgctggaatttgcagtcttttcaatgcagccacatttttatccatttcagttgtctcacaaattttaacccatatcagagttccagaacaggtaccacagctttggttttagattagtggaataacattcagcccagaactgagaaactcaacagattaactatcgtttgctctttagacggtctcactgcctctcacttgccagagccctttcaaaatgagcagagaagtccacaccattagggaccatctgtgataaattcagaagggaggagatgtgtgtacagctttaaggattccctcaattccgaggaaagggactggcccagaatccaggttaatacatggaaacacgaagcattagcaaaagtaataattatacctatggtatttgaaagaacaataataaaagacacttcttccaaaccttgaatttgttgtttttagaaaacgaatgcatttaaaaatattttctatgtgagaattttttagatgtgtgtttacttcatgtttacaaataactgtttgctttttaatgcagtactttgaaatatatcagccaaaaccataacttacaataatttcttaggtattctgaataaaattccatttcttttggatatgctttaccattcttaggtttctgtggaacaaaaatatttgtagcattttgtgtaaatacaagctttcatttttattttttccaattgctattgcccaagaattgctttccatgcacatattgtaaaaattccgctttgtgccacaggtcatgattgtggatgagtttactcttaacttcaaagggactatttgtattgtatgttgcaactgtaaattgaattatttggcatttttctcatgattgtaatattaatttgaagtttgaatttaattttcaataaaatggcttttttggttttg

SEQ ID NO: 178639 - DNA, 5487 bp, Homo sapiens
  Payload ID: 15201
  Gene Symbol: RUNX2
  Gene Name: runt-related transcription factor 2
  Uniprot ID: Q13950
  ENST ID: ENST00000371432
  CDS Start-End: 211-1710
gtgtgaatgcttcattcgcctcacaaacaaccacagaaccacaagtgcggtgcaaactttctccaggaggacagcaagaagtctctggtttttaaatggttaatctccgcaggtcactaccagccaccgagaccaacagagtcatttaaggctgcaagcagtatttacaacagagggtacaagttctatctgaaaaaaaaaggagggactatggcatcaaacagcctcttcagcacagtgacaccatgtcagcaaaacttcttttgggatccgagcaccagccggcgcttcagccccccctccagcagcctgcagcccggcaaaatgagcgacgtgagcccggtggtggctgcgcaacagcagcagcaacagcagcagcagcaacagcagcagcagcagcagcaacagcagcagcagcagcaggaggcggcggcggcggctgcggcggcggcggcggctgcggcggcggcagctgcagtgccccggttgcggccgccccacgacaaccgcaccatggtggagatcatcgccgaccacccggccgaactcgtccgcaccgacagccccaacttcctgtgctcggtgctgccctcgcactggcgctgcaacaagaccctgcccgtggccttcaaggtggtagccctcggagaggtaccagatgggactgtggttactgtcatggcgggtaacgatgaaaattattctgctgagctccggaatgcctctgctgttatgaaaaaccaagtagcaaggttcaacgatctgagatttgtgggccggagtggacgaggcaagagtttcaccttgaccataaccgtcttcacaaatcctccccaagtagctacctatcacagagcaattaaagttacagtagatggacctcgggaacccagaaggcacagacagaagcttgatgactctaaacctagtttgttctctgaccgcctcagtgatttagggcgcattcctcatcccagtatgagagtaggtgtcccgcctcagaacccacggccctccctgaactctgcaccaagtccttttaatccacaaggacagagtcagattacagaccccaggcaggcacagtcttccccgccgtggtcctatgaccagtcttacccctcctacctgagccagatgacgtccccgtccatccactctaccaccccgctgtcttccacacggggcactgggcttcctgccatcaccgatgtgcctaggcgcatttcaggtgcttcagaactgggccctttttcagaccccaggcagttcccaagcatttcatccctcactgagagccgcttctccaacccacgaatgcactatccagccacctttacttacaccccgccagtcacctcaggcatgtccctcggtatgtccgccaccactcactaccacacctacctgccaccaccctaccccggctcttcccaaagccagagtggacccttccagaccagcagcactccatatctctactatggcacttcgtcaggatcctatcagtttcccatggtgccggggggagaccggtctccttccagaatgcttccgccatgcaccaccacctcgaatggcagcacgctattaaatccaaatttgcctaaccagaatgatggtgttgacgctgatggaagccacagcagttccccaactgttttgaattctagtggcagaatggatgaatctgtttggcgaccatattgaaattcctcagcagtggcccagtggtatctgggggccacatcccacacgtatcaatatatacatatatagagagagtgcatatatatgtatatcgattagctatctacaaagtgcctattttttagaagatttttcattcactcactcagtcatgatcttgcagccataagagggtagatattgagaagcagaaggctcaagagagacaattgcaatcgagcttcagattgtttactatttaagatgtacttttacaaaggaacaaagaagggaaaaggtatttttgtttttgttgtttggtctgttatcatcaataacctgttcatatgccaattcagagaggtggactccaggttcaggagggagaagagcaaagccgcttcctctctgtgctttgaaacttcacaccctcacggtggcagctgtgtatggaccagtgccctccgcagacagctcacaaaaccagttgaggtgcactaaagggacatgaggtagaatggatgcttccatcacagtaccatcattcagaataactcttccaatttctgctttcagacatgctgcaggtcctcatctgaactgttgggttcgtttttttttttttttttcctgctccaagaaagtgacttcaaaaataactgatcaggatagattattttattttactttttaacactccttctccccttttcccactgaaccaaaaagaaatcccatccctaaaacctgccttctccttttatgcaaaactgaaaatggcaatacattattatagccataatggtatagatagtgattgcgtttggctatgtgttgttttctttttttttaaattatgaatatgtgtaaaatctgaggtaacttgctaacgtgaatggtcatataactttaaagatatatttataattatttaatgacatttggacccttgaaacatttcttagtgtattgatatgttgacttcggtctctaaaagtgctctttattaaataacaaatttcttcagtggtctagagccatatctgaaatattgctaagcaatttcagttcatccaggcacaatgtgattttaaaaaatacttccatctccaaatattttagatatagattgtttttgtgatgtatgaaggaaatgttatgtttagttctttcagatctttgaatgcctctaacacagctttgccttctaaagcggtaattagggatttaaaaaacaacctttagccctttatcagcatgaaatgctggagtgatgtggttttctaatttctttggggtaattatgactcttgtcatattaaaaagacaagcacaagtaaatcattgaactacagaaaaatgttctgtggtttcatagttaagcaaaactctaaatcgccaggcttcatagcaaagacatagtcagctaaaagccgcacatgtggatagagggttcaattatgagacacctagtacaggagagcaaaattgcaccagagattcttaaccaaccagccttaccaaacaacacaacaggggaaccccaatctgccttacccaaggccccactggcagctttccacagaatttgcatttagaggagcagaatgacatcactgtcctttgggagtaggtcctctgaaaaggcagcaggttccagcaggtagctgagctgagaggacatatggcccacggggacctacagacagcctttgacatttgtatttcttacaatggagggccaaggagggcaaggggctgtggagtttggtgtctactagtgtgtatgaatttgagctagagtccttctgtggcatgcactttgaccactcctggcagtcacatggcagatttccaagtgcaaatccttaatccaaacaaggatcatctaatgacaccaccaggccaatccctgctctcctccccgaaaagtcagggtcccttcattggaatcctccacccacccaagcagaatttagcagagatttgccttcaaaccctaacggcccccttgttctctggtccttctcaaacccacctttgtaggccacccagcattgcaggacagcgtgtggggcagctggacctgtgcttcctgcctgggagtctcccttggaattcatcctgactccttctaataaaaatggatgggaaagcaaaacactttgccttctaaaggccgtataccaagtatgcttagataaataagccacttttctattacttaagtaagaaggaagtagtaattgatactatttattgtttgtgtgtggtagcttgaagcacaccactgtccatttatttgtaagtgtaaaatatgtgtgtttgtttcagcagcacttaaaaaagccagtgtctggttacacatttcaattttaattaattgacataaaaatgctaccgccagtgccagctgcatcctatttaattaaaaaggtactatatttgtacattattttttaatgttaaaagggcttttttaagtttacagtacacataccgagtgactttagggatgcttttgtgttgaaatgttactatagtggctgcaggcagcaacccagaaacactttagaagctttttttccttgggaaaaattcaagcacttcttccctccaccctcactccaaccaccccaatgggggtaattcacatttcttagaacaaattctgcccttttttggtctagggattaaaattttgtttttctttctttctttttttttttttttcactgaacccttaatttgcactgggtcatgtgtttgatttgtgatttcaagaccaaagcaaagtcttactactactgtggaaccatgtactagttcctgggaattaaaatagcgtggttctctttgtagcacaaacattgctggaatttgcagtcttttcaatgcagccacatttttatccatttcagttgtctcacaaattttaacccatatcagagttccagaacaggtaccacagctttggttttagattagtggaataacattcagcccagaactgagaaactcaacagattaactatcgtttgctctttagacggtctcactgcctctcacttgccagagccctttcaaaatgagcagagaagtccacaccattagggaccatctgtgataaattcagaagggaggagatgtgtgtacagctttaaggattccctcaattccgaggaaagggactggcccagaatccaggttaatacatggaaacacgaagcattagcaaaagtaataattatacctatggtatttgaaagaacaataataaaagacacttcttccaaaccttgaatttgttgtttttagaaaacgaatgcatttaaaaatattttctatgtgagaattttttagatgtgtgtttacttcatgtttacaaataactgtttgctttttaatgcagtactttgaaatatatcagccaaaaccataacttacaataatttcttaggtattctgaataaaattccatttcttttggatatgctttaccattcttaggtttctgtggaacaaaaatatttgtagcattttgtgtaaatacaagctttcatttttattttttccaattgctattgcccaagaattgctttccatgcacatattgtaaaaattccgctttgtgccacaggtcatgattgtggatgagtttactcttaacttcaaagggactatttgtattgtatgttgcaactgtaaattgaattatttggcatttttctcatgattgtaatattaatttgaagtttgaatttaattttcaataaaatggcttttttggttttgtta

SEQ ID NO: 178640 - DNA, 1588 bp, Homo sapiens
  Payload ID: 15201
  Gene Symbol: RUNX2
  Gene Name: runt-related transcription factor 2
  Uniprot ID: Q13950
  ENST ID: ENST00000371436
  CDS Start-End: 1-1500
atggcatcaaacagcctcttcagcacagtgacaccatgtcagcaaaacttcttttgggatccgagcaccagccggcgcttcagccccccctccagcagcctgcagcccggcaaaatgagcgacgtgagcccggtggtggctgcgcaacagcagcagcaacagcagcagcagcaacagcagcagcagcagcagcaacagcagcagcagcagcaggaggcggcggcggcggctgcggcggcggcggcggctgcggcggcggcagctgcagtgccccggttgcggccgccccacgacaaccgcaccatggtggagatcatcgccgaccacccggccgaactcgtccgcaccgacagccccaacttcctgtgctcggtgctgccctcgcactggcgctgcaacaagaccctgcccgtggccttcaaggtggtagccctcggagaggtaccagatgggactgtggttactgtcatggcgggtaacgatgaaaattattctgctgagctccggaatgcctctgctgttatgaaaaaccaagtagcaaggttcaacgatctgagatttgtgggccggagtggacgaggcaagagtttcaccttgaccataaccgtcttcacaaatcctccccaagtagctacctatcacagagcaattaaagttacagtagatggacctcgggaacccagaaggcacagacagaagcttgatgactctaaacctagtttgttctctgaccgcctcagtgatttagggcgcattcctcatcccagtatgagagtaggtgtcccgcctcagaacccacggccctccctgaactctgcaccaagtccttttaatccacaaggacagagtcagattacagaccccaggcaggcacagtcttccccgccgtggtcctatgaccagtcttacccctcctacctgagccagatgacgtccccgtccatccactctaccaccccgctgtcttccacacggggcactgggcttcctgccatcaccgatgtgcctaggcgcatttcaggtgcttcagaactgggccctttttcagaccccaggcagttcccaagcatttcatccctcactgagagccgcttctccaacccacgaatgcactatccagccacctttacttacaccccgccagtcacctcaggcatgtccctcggtatgtccgccaccactcactaccacacctacctgccaccaccctaccccggctcttcccaaagccagagtggacccttccagaccagcagcactccatatctctactatggcacttcgtcaggatcctatcagtttcccatggtgccggggggagaccggtctccttccagaatgcttccgccatgcaccaccacctcgaatggcagcacgctattaaatccaaatttgcctaaccagaatgatggtgttgacgctgatggaagccacagcagttccccaactgttttgaattctagtggcagaatggatgaatctgtttggcgaccatattgaaattcctcagcagtggcccagtggtatctgggggccacatcccacacgtatcaatatatacatatatagagagagtgcatatatatgt

SEQ ID NO: 178641 - DNA, 5698 bp, Homo sapiens
  Payload ID: 15201
  Gene Symbol: RUNX2
  Gene Name: runt-related transcription factor 2
  Uniprot ID: Q13950
  ENST ID: ENST00000371438
  CDS Start-End: 359-1924
caaactttctccaggaggacagcaagaagtctctggtttttaaatggttaatctccgcaggtcactaccagccaccgagaccaacagagtcagtgagtgctctctaaccacagtctatgcagtaatagtaggtccttcaaatatttgctcattctctttttgttttgtttctttgcttttcacatgttaccagctacataatttcttgacagaaaaaaataaatataaagtctatgtactccaggcatactgtaaaactaaaacaaggtttgggtatggtttgtattttcagtttaaggctgcaagcagtatttacaacagagggtacaagttctatctgaaaaaaaaaggagggactatggcatcaaacagcctcttcagcacagtgacaccatgtcagcaaaacttcttttgggatccgagcaccagccggcgcttcagccccccctccagcagcctgcagcccggcaaaatgagcgacgtgagcccggtggtggctgcgcaacagcagcagcaacagcagcagcagcaacagcagcagcagcagcagcaacagcagcagcagcagcaggaggcggcggcggcggctgcggcggcggcggcggctgcggcggcggcagctgcagtgccccggttgcggccgccccacgacaaccgcaccatggtggagatcatcgccgaccacccggccgaactcgtccgcaccgacagccccaacttcctgtgctcggtgctgccctcgcactggcgctgcaacaagaccctgcccgtggccttcaaggtggtagccctcggagaggtaccagatgggactgtggttactgtcatggcgggtaacgatgaaaattattctgctgagctccggaatgcctctgctgttatgaaaaaccaagtagcaaggttcaacgatctgagatttgtgggccggagtggacgaggcaagagtttcaccttgaccataaccgtcttcacaaatcctccccaagtagctacctatcacagagcaattaaagttacagtagatggacctcgggaacccagaaggcacagacagaagcttgatgactctaaacctagtttgttctctgaccgcctcagtgatttagggcgcattcctcatcccagtatgagagtaggtgtcccgcctcagaacccacggccctccctgaactctgcaccaagtccttttaatccacaaggacagagtcagattacagaccccaggcaggcacagtcttccccgccgtggtcctatgaccagtcttacccctcctacctgagccagatgacgtccccgtccatccactctaccaccccgctgtcttccacacggggcactgggcttcctgccatcaccgatgtgcctaggcgcatttcagatgatgacactgccacctctgacttctgcctctggccttccactctcagtaagaagagccaggcaggtgcttcagaactgggccctttttcagaccccaggcagttcccaagcatttcatccctcactgagagccgcttctccaacccacgaatgcactatccagccacctttacttacaccccgccagtcacctcaggcatgtccctcggtatgtccgccaccactcactaccacacctacctgccaccaccctaccccggctcttcccaaagccagagtggacccttccagaccagcagcactccatatctctactatggcacttcgtcaggatcctatcagtttcccatggtgccggggggagaccggtctccttccagaatgcttccgccatgcaccaccacctcgaatggcagcacgctattaaatccaaatttgcctaaccagaatgatggtgttgacgctgatggaagccacagcagttccccaactgttttgaattctagtggcagaatggatgaatctgtttggcgaccatattgaaattcctcagcagtggcccagtggtatctgggggccacatcccacacgtatcaatatatacatatatagagagagtgcatatatatgtatatcgattagctatctacaaagtgcctattttttagaagatttttcattcactcactcagtcatgatcttgcagccataagagggtagatattgagaagcagaaggctcaagagagacaattgcaatcgagcttcagattgtttactatttaagatgtacttttacaaaggaacaaagaagggaaaaggtatttttgtttttgttgtttggtctgttatcatcaataacctgttcatatgccaattcagagaggtggactccaggttcaggagggagaagagcaaagccgcttcctctctgtgctttgaaacttcacaccctcacggtggcagctgtgtatggaccagtgccctccgcagacagctcacaaaaccagttgaggtgcactaaagggacatgaggtagaatggatgcttccatcacagtaccatcattcagaataactcttccaatttctgctttcagacatgctgcaggtcctcatctgaactgttgggttcgtttttttttttttttttcctgctccaagaaagtgacttcaaaaataactgatcaggatagattattttattttactttttaacactccttctccccttttcccactgaaccaaaaagaaatcccatccctaaaacctgccttctccttttatgcaaaactgaaaatggcaatacattattatagccataatggtatagatagtgattgcgtttggctatgtgttgttttctttttttttaaattatgaatatgtgtaaaatctgaggtaacttgctaacgtgaatggtcatataactttaaagatatatttataattatttaatgacatttggacccttgaaacatttcttagtgtattgatatgttgacttcggtctctaaaagtgctctttattaaataacaaatttcttcagtggtctagagccatatctgaaatattgctaagcaatttcagttcatccaggcacaatgtgattttaaaaaatacttccatctccaaatattttagatatagattgtttttgtgatgtatgaaggaaatgttatgtttagttctttcagatctttgaatgcctctaacacagctttgccttctaaagcggtaattagggatttaaaaaacaacctttagccctttatcagcatgaaatgctggagtgatgtggttttctaatttctttggggtaattatgactcttgtcatattaaaaagacaagcacaagtaaatcattgaactacagaaaaatgttctgtggtttcatagttaagcaaaactctaaatcgccaggcttcatagcaaagacatagtcagctaaaagccgcacatgtggatagagggttcaattatgagacacctagtacaggagagcaaaattgcaccagagattcttaaccaaccagccttaccaaacaacacaacaggggaaccccaatctgccttacccaaggccccactggcagctttccacagaatttgcatttagaggagcagaatgacatcactgtcctttgggagtaggtcctctgaaaaggcagcaggttccagcaggtagctgagctgagaggacatatggcccacggggacctacagacagcctttgacatttgtatttcttacaatggagggccaaggagggcaaggggctgtggagtttggtgtctactagtgtgtatgaatttgagctagagtccttctgtggcatgcactttgaccactcctggcagtcacatggcagatttccaagtgcaaatccttaatccaaacaaggatcatctaatgacaccaccaggccaatccctgctctcctccccgaaaagtcagggtcccttcattggaatcctccacccacccaagcagaatttagcagagatttgccttcaaaccctaacggcccccttgttctctggtccttctcaaacccacctttgtaggccacccagcattgcaggacagcgtgtggggcagctggacctgtgcttcctgcctgggagtctcccttggaattcatcctgactccttctaataaaaatggatgggaaagcaaaacactttgccttctaaaggccgtataccaagtatgcttagataaataagccacttttctattacttaagtaagaaggaagtagtaattgatactatttattgtttgtgtgtggtagcttgaagcacaccactgtccatttatttgtaagtgtaaaatatgtgtgtttgtttcagcagcacttaaaaaagccagtgtctggttacacatttcaattttaattaattgacataaaaatgctaccgccagtgccagctgcatcctatttaattaaaaaggtactatatttgtacattattttttaatgttaaaagggcttttttaagtttacagtacacataccgagtgactttagggatgcttttgtgttgaaatgttactatagtggctgcaggcagcaacccagaaacactttagaagctttttttccttgggaaaaattcaagcacttcttccctccaccctcactccaaccaccccaatgggggtaattcacatttcttagaacaaattctgcccttttttggtctagggattaaaattttgtttttctttctttctttttttttttttttcactgaacccttaatttgcactgggtcatgtgtttgatttgtgatttcaagaccaaagcaaagtcttactactactgtggaaccatgtactagttcctgggaattaaaatagcgtggttctctttgtagcacaaacattgctggaatttgcagtcttttcaatgcagccacatttttatccatttcagttgtctcacaaattttaacccatatcagagttccagaacaggtaccacagctttggttttagattagtggaataacattcagcccagaactgagaaactcaacagattaactatcgtttgctctttagacggtctcactgcctctcacttgccagagccctttcaaaatgagcagagaagtccacaccattagggaccatctgtgataaattcagaagggaggagatgtgtgtacagctttaaggattccctcaattccgaggaaagggactggcccagaatccaggttaatacatggaaacacgaagcattagcaaaagtaataattatacctatggtatttgaaagaacaataataaaagacacttcttccaaaccttgaatttgttgtttttagaaaacgaatgcatttaaaaatattttctatgtgagaattttttagatgtgtgtttacttcatgtttacaaataactgtttgctttttaatgcagtactttgaaatatatcagccaaaaccataacttacaataatttcttaggtattctgaataaaattccatttcttttggatatgctttaccattcttaggtttctgtggaacaaaaatatttgtagcattttgtgtaaatacaagctttcatttttattttttccaattgctattgcccaagaattgctttccatgcacatattgtaaaaattccgctttgtgccacaggtcatgattgtggatgagtttactcttaacttcaaagggactatttgtattgtatgttgcaactgtaaattgaattatttggcatttttctcatgattgtaatattaatttgaagtttgaatttaattttcaataaaatggcttttttggttttg

SEQ ID NO: 178642 - DNA, 1770 bp, Homo sapiens
  Payload ID: 15201
  Gene Symbol: RUNX2
  Gene Name: runt-related transcription factor 2
  Uniprot ID: Q13950
  ENST ID: ENST00000465038
  CDS Start-End: 205-1770
atgcttcattcgcctcacaaacaaccacagaaccacaagtgcggtgcaaactttctccaggaggacagcaagaagtctctggtttttaaatggttaatctccgcaggtcactaccagccaccgagaccaacagagtcatttaaggctgcaagcagtatttacaacagagggtacaagttctatctgaaaaaaaaaggagggactatggcatcaaacagcctcttcagcacagtgacaccatgtcagcaaaacttcttttgggatccgagcaccagccggcgcttcagccccccctccagcagcctgcagcccggcaaaatgagcgacgtgagcccggtggtggctgcgcaacagcagcagcaacagcagcagcagcaacagcagcagcagcagcagcaacagcagcagcagcagcaggaggcggcggcggcggctgcggcggcggcggcggctgcggcggcggcagctgcagtgccccggttgcggccgccccacgacaaccgcaccatggtggagatcatcgccgaccacccggccgaactcgtccgcaccgacagccccaacttcctgtgctcggtgctgccctcgcactggcgctgcaacaagaccctgcccgtggccttcaaggtggtagccctcggagaggtaccagatgggactgtggttactgtcatggcgggtaacgatgaaaattattctgctgagctccggaatgcctctgctgttatgaaaaaccaagtagcaaggttcaacgatctgagatttgtgggccggagtggacgaggcaagagtttcaccttgaccataaccgtcttcacaaatcctccccaagtagctacctatcacagagcaattaaagttacagtagatggacctcgggaacccagaaggcacagacagaagcttgatgactctaaacctagtttgttctctgaccgcctcagtgatttagggcgcattcctcatcccagtatgagagtaggtgtcccgcctcagaacccacggccctccctgaactctgcaccaagtccttttaatccacaaggacagagtcagattacagaccccaggcaggcacagtcttccccgccgtggtcctatgaccagtcttacccctcctacctgagccagatgacgtccccgtccatccactctaccaccccgctgtcttccacacggggcactgggcttcctgccatcaccgatgtgcctaggcgcatttcagatgatgacactgccacctctgacttctgcctctggccttccactctcagtaagaagagccaggcaggtgcttcagaactgggccctttttcagaccccaggcagttcccaagcatttcatccctcactgagagccgcttctccaacccacgaatgcactatccagccacctttacttacaccccgccagtcacctcaggcatgtccctcggtatgtccgccaccactcactaccacacctacctgccaccaccctaccccggctcttcccaaagccagagtggacccttccagaccagcagcactccatatctctactatggcacttcgtcaggatcctatcagtttcccatggtgccggggggagaccggtctccttccagaatgcttccgccatgcaccaccacctcgaatggcagcacgctattaaatccaaatttgcctaaccagaatgatggtgttgacgctgatggaagccacagcagttccccaactgttttgaattctagtggcagaatggatgaatctgtttggcgaccatattga

SEQ ID NO: 178643 - DNA, 2256 bp, Homo sapiens
  Payload ID: 15201
  Gene Symbol: RUNX2
  Gene Name: runt-related transcription factor 2
  ENST ID: ENST00000576263
  CDS Start-End: 1-1629
atggcatcaaacagcctcttcagcacagtgacaccatgtcagcaaaacttcttttgggatccgagcaccagccggcgcttcagccccccctccagcagcctgcagcccggcaaaatgagcgacgtgagcccggtggtggctgcgcaacagcagcagcaacagcagcagcagcaacagcagcagcagcagcagcaacagcagcagcagcagcaggaggcggcggcggcggctgcggcggcggcggcggctgcggcggcggcagctgcagtgccccggttgcggccgccccacgacaaccgcaccatggtggagatcatcgccgaccacccggccgaactcgtccgcaccgacagccccaacttcctgtgctcggtgctgccctcgcactggcgctgcaacaagaccctgcccgtggccttcaaggtggtagccctcggagaggtaccagatgggactgtggttactgtcatggcgggtaacgatgaaaattattctgctgagctccggaatgcctctgctgttatgaaaaaccaagtagcaaggttcaacgatctgagatttgtgggccggagtggacgaggcaagagtttcaccttgaccataaccgtcttcacaaatcctccccaagtagctacctatcacagagcaattaaagttacagtagatggacctcgggaacccagaaggcacagacagaagcttgatgactctaaacctagtttgttctctgaccgcctcagtgatttagggcgcattcctcatcccagtatgagagtaggtgtcccgcctcagaacccacggccctccctgaactctgcaccaagtccttttaatccacaaggacagagtcagattacagaccccaggcaggcacagtcttccccgccgtggtcctatgaccagtcttacccctcctacctgagccagatgacgtccccgtccatccactctaccaccccgctgtcttccacacggggcactgggcttcctgccatcaccgatgtgcctaggcgcatttcagattcagagcccagtaccttggactcccagtcttcgaccaccttgttcctctcctcggaggagccaggcccctccaccgccgccctgccatctccctcctcctcttcctgcgagcctcaggccttttccccaggtccgccagcgctgcctccgctgttgcctccgctccccgcagcctcggcgcccccaggccccggcgcctcccggcgcacaggccgctactcagtcgtcgcctcctccccggaggccgccccgcgtctggtcgactggctccccggttgcccttcgaccatctctcccagcacacgcggggatgacaaggagcggccgccgcccgtcctggcaccggccgagggcccggaaaggagccgcgccccgcgccccagcactgcgggcagggaggagggcaccgtggacgcgggtacatccccgccgccccgagcccggcccgccgctgcggcgagcttggaggcccacgtcggggacatcctggtggagctgcggaccatgaacggccacctggacagcatagcgcgggccctcaccaaactggcttcgtccctggggccccagcctgagcccctgccagatgtttcggatgccaactaatggagctcggcgaggctgggccgccccggggccgagggatcgcttgcaccaggcatccctgcctgtccctccccagcagcgaagcgcgcccagcggaggagcggttgctctgcgcagctgcctagcggaaagcacggccctagcgtttcagcgtgaaacagacccggttgcgcctcacaccctcctcctccgctctctcacggcggcccctgccccggcttcctggcccttcacatgcccttctcttgtcttgagcgtctagcagaaaaagtgcctggaaacggcggtggcaccctgcgaaggatgcttagagaaacactctttcacatcccattcctgcgacttccgcgtggcgtggagggagaggagctcaaagcaagtcgccaaagcagcagcgaggccagctccagcgttggtggggcatccatctctggtgacgttcacaagtttgtttgtttttaaaatcgtttttggaaaaatatttttttttcctcataagcacatttcaagaagtttggaaaatagagaaatgaaacaaaatctggtgtatttgtggaaaaggggggtatttaagtctttcttatgagtaagaaagtattttgtgtaataaaaaaaatgtatatccac

SEQ ID NO: 178644 - DNA, 2308 bp, Homo sapiens
  Payload ID: 15201
  Gene Symbol: RUNX2
  Gene Name: runt-related transcription factor 2
  ENST ID: ENST00000478660
  CDS Start-End: 542-1372
gcggaggcggcggcgcgggagggcggaggcgcggccgcctgcagctgggtagcagcgcgcggcgcggcgcggcggtggcgggcagcgcgcggcaatgccggccccggggctggactgctgaacccacaccgcttcaccaccggactccaactgggagggggcgccagcgcacccaggacgcggtgccccaagggaccccattccaagctgcaaactcaagtcccccgcctccccaggccaaacacacccccgcgcccgttcgcagctgccaccccgggtgttccaaagactccggcaaagatctgcgcctcccgggtctccctacccgccagcccgactgcgccgcatcgccagactctgttggcccatcagactccgcccggcagtcggcctcatcaaacttgatttctcacctcctcagccccatcacctccatcctctttccccccgtctcgccttcacccccccaatttcctccttgcccctcatttccaccctcctccccctcccccggccacttcgctaacttgtggctgttgtgatgcgtattcccgtagatccgagcaccagccggcgcttcagccccccctccagcagcctgcagcccggcaaaatgagcgacgtgagcccggtggtggctgcgcaacagcagcagcaacagcagcagcagcaacagcagcagcagcagcagcaacagcagcagcagcagcaggaggcggcggcggcggctgcggcggcggcggcggctgcggcggcggcagctgcagtgccccggttgcggccgccccacgacaaccgcaccatggtggagatcatcgccgaccacccggccgaactcgtccgcaccgacagccccaacttcctgtgctcggtgctgccctcgcactggcgctgcaacaagaccctgcccgtggccttcaaggtggtagccctcggagaggtaccagatgggactgtggttactgtcatggcgggtaacgatgaaaattattctgctgagctccggaatgcctctgctgttatgaaaaaccaagtagcaaggttcaacgatctgagatttgtgggccggagtggacgaggcaagagtttcaccttgaccataaccgtcttcacaaatcctccccaagtagctacctatcacagagcaattaaagttacagtagatggacctcgggaacccagaaaccccaggcaggcacagtcttccccgccgtggtcctatgaccagtcttacccctcctacctgagccagatgacgtccccgtccatccactctaccaccccgctgtcttccacacggggcactgggcttcctgccatcaccgatgtgcctaggcgcatttcagctcgaagccgttactcactccgctgagttgcatcactgacaagctgaagctccaccagcaggcttgcgggttttgattagttcagactcctttatttctttcaacttgggaggagggaaggctttgtttctcaagcaaatagcaggaaagggctctctggtcctagtgcctcacattttctgcagcagatggactcccatggggattcagagcccagtaccttggactcccagtcttcgaccaccttgttcctctcctcggaggagccaggcccctccaccgccgccctgccatctccctcctcctcttcctgcgagcctcaggccttttccccaggtccgccagcgctgcctccgctgttgcctccgctccccgcagcctcggcgcccccaggccccggcgcctcccggcgcacaggccgctactcagtcgtcgcctcctccccggaggccgccccgcgtctggtcgactggctccccggttgcccttcgaccatctctcccagcacacgcggggatgacaaggagcggccgccgcccgtcctggcaccggccgagggcccggaaaggagccgcgccccgcgccccagcactgcgggcagggaggagggcaccgtggacgcgggtacatccccgccgccccgagcccggcccgccgctgcggcgagcttggaggcccacgtcggggacatcctggtggagctgcggaccatgaacggccacctggacagcatagcgcgggccctcaccaaactggcttcgtccctggggccccagcctgagcccctgccagatgtttcggatgccaactaatggagctcggcgaggctgggccgccccggggccgagggatcgcttgcaccaggcatccctgcctgtccctccccagcagcgaagcgcgcccagcggaggagcggttgctctgcgcagctgcctagcggaaagcacggccctagcgtttca

SEQ ID NO: 178645 - DNA, 1475 bp, Homo sapiens
  Payload ID: 15201
  Gene Symbol: RUNX2
  Gene Name: runt-related transcription factor 2
  ENST ID: ENST00000483377
  CDS Start-End: 371-484
gagaaagagagagagagaaagagcaagggggaaaagccacagtggtaggcagtcccactttacttaagagtactgtgaggtcacaaaccacatgattctgcctctccagtaatagtgcttgcaaaaaaaaggagttttaaagcttttgcttttttggattgtgtgaatgcttcattcgcctcacaaacaaccacagaaccacaagtgcggtgcaaactttctccaggaggacagcaagaagtctctggtttttaaatggttaatctccgcaggtcactaccagccaccgagaccaacagagtcatttaaggctgcaagcagtatttacaacagagggtacaagttctatctgaaaaaaaaaggagggactatggcatcaaacagcctcttcagcacagtgacaccatgtcagcaaaacttcttttggggtggtagccctcggagaggtaccagatgggactgtggttactgtcatggcgggtaacgatgaaaattattctgctgagctccggaatgcctctgctgttatgaaaaaccaagtagcaaggttcaacgatctgagatttgtgggccggagtggacgaggcaagagtttcaccttgaccataaccgtcttcacaaatcctccccaagtagctacctatcacagagcaattaaagttacagtagatggacctcgggaacccagaaggcacagacagaagcttgatgactctaaacctagtttgttctctgaccgcctcagtgatttagggcgcattcctcatcccagtatgagagtaggtgtcccgcctcagaacccacggccctccctgaactctgcaccaagtccttttaatccacaaggacagagtcagattacagaccccaggcaggcacagtcttccccgccgtggtcctatgaccagtcttacccctcctacctgagccagatgacgtccccgtccatccactctaccaccccgctgtcttccacacggggcactgggcttcctgccatcaccgatgtgcctaggcgcatttcagatgatgacactgccacctctgacttctgcctctggccttccactctcagtaagaagagccaggcaggtgcttcagaactgggccctttttcagaccccaggcagttcccaagcatttcatccctcactgagagccgcttctccaacccacgaatgcactatccagccacctttacttacaccccgccagtcacctcaggcatgtccctcggtatgtccgccaccactcactaccacacctacctgccaccaccctaccccggctcttcccaaagccagagtggacccttccagaccagcagcactccatatctctactatggcacttcgtcaggatcctatcagtttcccatggtgccggggggagaccggtctccttccagaatgcttccgccatgcaccaccacctcgaatggcagcacgctattaaatccaaatttgcctaaccag

SEQ ID NO: 178646 - DNA, 1458 bp, Homo sapiens
  Payload ID: 15201
  Gene Symbol: RUNX2
  Gene Name: runt-related transcription factor 2
  ENST ID: ENST00000625924
  CDS Start-End: 1-1458
atgcgtattcccgtagatccgagcaccagccggcgcttcagccccccctccagcagcctgcagcccggcaaaatgagcgacgtgagcccggtggtggctgcgcaacagcagcagcaacagcagcagcagcaacagcagcagcagcagcagcaacagcagcagcagcagcaggaggcggcggcggcggctgcggcggcggcggcggctgcggcggcggcagctgcagtgccccggttgcggccgccccacgacaaccgcaccatggtggagatcatcgccgaccacccggccgaactcgtccgcaccgacagccccaacttcctgtgctcggtgctgccctcgcactggcgctgcaacaagaccctgcccgtggccttcaaggtggtagccctcggagaggtaccagatgggactgtggttactgtcatggcgggtaacgatgaaaattattctgctgagctccggaatgcctctgctgttatgaaaaaccaagtagcaaggttcaacgatctgagatttgtgggccggagtggacgaggcaagagtttcaccttgaccataaccgtcttcacaaatcctccccaagtagctacctatcacagagcaattaaagttacagtagatggacctcgggaacccagaaggcacagacagaagcttgatgactctaaacctagtttgttctctgaccgcctcagtgatttagggcgcattcctcatcccagtatgagagtaggtgtcccgcctcagaacccacggccctccctgaactctgcaccaagtccttttaatccacaaggacagagtcagattacagaccccaggcaggcacagtcttccccgccgtggtcctatgaccagtcttacccctcctacctgagccagatgacgtccccgtccatccactctaccaccccgctgtcttccacacggggcactgggcttcctgccatcaccgatgtgcctaggcgcatttcaggtgcttcagaactgggccctttttcagaccccaggcagttcccaagcatttcatccctcactgagagccgcttctccaacccacgaatgcactatccagccacctttacttacaccccgccagtcacctcaggcatgtccctcggtatgtccgccaccactcactaccacacctacctgccaccaccctaccccggctcttcccaaagccagagtggacccttccagaccagcagcactccatatctctactatggcacttcgtcaggatcctatcagtttcccatggtgccggggggagaccggtctccttccagaatgcttccgccatgcaccaccacctcgaatggcagcacgctattaaatccaaatttgcctaaccagaatgatggtgttgacgctgatggaagccacagcagttccccaactgttttgaattctagtggcagaatggatgaatctgtttggcgaccatattga

SEQ ID NO: 178647 - DNA, 3861 bp, Homo sapiens
  Payload ID: 15202
  Gene Symbol: RUNX3
  Gene Name: runt-related transcription factor 3
  Uniprot ID: Q13761
  ENST ID: ENST00000308873
  CDS Start-End: 10-1257
gccgctgttatgcgtattcccgtagacccaagcaccagccgccgcttcacacctccctccccggccttcccctgcggcggcggcggcggcaagatgggcgagaacagcggcgcgctgagcgcgcaggcggccgtggggcccggagggcgcgcccggcccgaggtgcgctcgatggtggacgtgctggcggaccacgcaggcgagctcgtgcgcaccgacagccccaacttcctctgctccgtgctgccctcgcactggcgctgcaacaagacgctgcccgtcgccttcaaggtggtggcattgggggacgtgccggatggtacggtggtgactgtgatggcaggcaatgacgagaactactccgctgagctgcgcaatgcctcggccgtcatgaagaaccaggtggccaggttcaacgaccttcgcttcgtgggccgcagtgggcgagggaagagtttcaccctgaccatcactgtgttcaccaaccccacccaagtggcgacctaccaccgagccatcaaggtgaccgtggacggaccccgggagcccagacggcaccggcagaagctggaggaccagaccaagccgttccctgaccgctttggggacctggaacggctgcgcatgcgggtgacaccgagcacacccagcccccgaggctcactcagcaccacaagccacttcagcagccagccccagaccccaatccaaggcacctcggaactgaacccattctccgacccccgccagtttgaccgctccttccccacgctgccaaccctcacggagagccgcttcccagaccccaggatgcattatcccggggccatgtcagctgccttcccctacagcgccacgccctcgggcacgagcatcagcagcctcagcgtggcgggcatgccggccaccagccgcttccaccatacctacctcccgccaccctacccgggggccccgcagaaccagagcgggcccttccaggccaacccgtccccctaccacctctactacgggacatcctctggctcctaccagttctccatggtggccggcagcagcagtgggggcgaccgctcacctacccgcatgctggcctcttgcaccagcagcgctgcctctgtcgccgccggcaacctcatgaaccccagcctgggcggccagagtgatggcgtggaggccgacggcagccacagcaactcacccacggccctgagcacgccaggccgcatggatgaggccgtgtggcggccctactgaccgccctggtggactcctcccgctggaggcggggaccctaacaaccttcaagaccagtgatgggccggctccgaggctccgggcgggaatgggacctgcgctccagggtggtctcggtcccagggtggtcccagctggtgggagcctctggctgcatctgtgcagccacatccttgtacagaggcataggttaccacccccaccccggcccgggatactgcccccggcccagatcctggccgtctcatcccatacttctgtggggaatcagcctcctgccacccccccggaaggacctcactgtctccagctatgcccagtgctgcatgggacccatgtctcctgggacagaggccatctctcttccagagagaggcagcattggcccacaggataagcctcaggccctgggaaacctcccgacccctgcaccttcgttggagcccctgcatcccctgggtccagccccctctgcatttacacagatttgagtcagaactggaaagtgtcccccacccccaccaccctcgagcggggttcccctcattgtacagatggggcaggacccagcacgctgctggcagagatggtttgagaacacatccaagccagtccccccagcccagcttcccctccgttcctaactgttggctttcccccagccgcacgggtcccaggccccagagaagatgagtctatggcatcaggttcttaaacccaggaaagcacctacagaccggctcctccatgcactttaccagctcaacgcatccactctctgttctcttggcagggcgggggaggggggataggaggtcccctttcccctaggtggtctcataattccatttgtggagagaacaggagggccagatagataggtcctagcagaaggcattgaggtgagggatcattttgggtcagacatcaatgtccctgtcccccctgggtccagccaagctgtgccccatcccccaagcctcctgggaggatccagccaaatcttgcgactcctggcacacacctgtctgtaacctgttttgtgctctgaaagcaaatagtcctgagcaaaaaaaaaaaaaaaacaaaaaaacaaaaaaaaaacaaaacagtttttaaaactgattttagaaaaagaagcttaatctaacgttttcaaacacaaggtctcttacaggtatagttccgtgattatgatagctctgtgattataagcaacatccccgccccctctcccccccgcggacccccagctgcctcctgagggtgtggggttattagggtctcaatactttctcaaggggctacactccccatcaggcagcatcccaccagcctgcaccacaggctcccctgggaggacgagggaaacgctgatgagacgctgggcatctctcctctgtggctctaggacatctgtccaggaggctgggcggaggtgggcaggatgtgagaggtggggagtactggctgtgcgtggcaggacagaagcactgtaaagggctctccagccgcagctcagctgcactgcgttccgaggtgaagtcttgcccctgaattttgcaaaatgggaaagtgggcgcttgcccaagggccaggctgcatggattctcacatcagagttctctggccctagaaaggcttagaaaaggcgtaagggaactcataaaggctagcagcatgcggtattttaactttctgcctcggcctctgtggatgcagaaatctgccctacaaaatgctcttcattggttgtctctgtgagagcactgtccccacccaacctgtcacaacggccagaaccatacaccagagacacactggcaggttaggcagtccttctggtgatcctattccattccctcctgctgcggtttctcttggcctgtcctcactggaaaaacagtctccatctcctcaaaatagttgctgactccctgcacccaaggggcctctccatgccttcttaggaagcagctatgaatccattgtccttgtagtttcttccctcctgttctctggttatagctggtcccaggtcagcgtgggaggcacctttgggttcccagtgcccagcactttgtagtctcatcccagattactaacccttcctgatcctggagaggcagggatagtaaataaattgctcttcctaccccatcccccatcccctgacaaaaagtgacggcagccgtactgagtctgtaaggcccaaagtgggtacagacagcctgggctggtaaaagtaggtccttatttacaaggctgcgttaaagttgtactaggcaaacacactgatgtaggaagcacgaggaaaggaagacgttttgatatagtgttactgtgagcctgtcagtagtgggtaccaatcttttgtgacatattgtcatgctgaggtgtgacacctgctgcactcatctgatgtaaaaccatcccagagctggcgagaggatggagctgggtggaaactgctttgcactatcgtttgcttggtgtttgtttttaacgcacaacttgcttgtacagtaaactgtcttctgtactatttaactgtaaaatggaattttgactgatttgttacaataatataactctgagatgtgt

SEQ ID NO: 178648 - DNA, 2629 bp, Homo sapiens
  Payload ID: 15202
  Gene Symbol: RUNX3
  Gene Name: runt-related transcription factor 3
  Uniprot ID: Q13761
  ENST ID: ENST00000338888
  CDS Start-End: 247-1536
ggcggcccactctgctctgtcagcttcggagctcctccaccctggctgccgaaagccccttcccgccatctaatgatacactctgcatacgcttctgttgagaatttgtggctagacattcctgtgggaccgggaatccaaattcttggtagctagaggaaaaaaaaataaaacaacagccaaccaagtgaatcccaacccaaccccctgaagggctgaaaattctcgccttcttcagagcggggcatggcatcgaacagcatcttcgactccttcccgacctactcgccgaccttcatccgcgacccaagcaccagccgccgcttcacacctccctccccggccttcccctgcggcggcggcggcggcaagatgggcgagaacagcggcgcgctgagcgcgcaggcggccgtggggcccggagggcgcgcccggcccgaggtgcgctcgatggtggacgtgctggcggaccacgcaggcgagctcgtgcgcaccgacagccccaacttcctctgctccgtgctgccctcgcactggcgctgcaacaagacgctgcccgtcgccttcaaggtggtggcattgggggacgtgccggatggtacggtggtgactgtgatggcaggcaatgacgagaactactccgctgagctgcgcaatgcctcggccgtcatgaagaaccaggtggccaggttcaacgaccttcgcttcgtgggccgcagtgggcgagggaagagtttcaccctgaccatcactgtgttcaccaaccccacccaagtggcgacctaccaccgagccatcaaggtgaccgtggacggaccccgggagcccagacggcaccggcagaagctggaggaccagaccaagccgttccctgaccgctttggggacctggaacggctgcgcatgcgggtgacaccgagcacacccagcccccgaggctcactcagcaccacaagccacttcagcagccagccccagaccccaatccaaggcacctcggaactgaacccattctccgacccccgccagtttgaccgctccttccccacgctgccaaccctcacggagagccgcttcccagaccccaggatgcattatcccggggccatgtcagctgccttcccctacagcgccacgccctcgggcacgagcatcagcagcctcagcgtggcgggcatgccggccaccagccgcttccaccatacctacctcccgccaccctacccgggggccccgcagaaccagagcgggcccttccaggccaacccgtccccctaccacctctactacgggacatcctctggctcctaccagttctccatggtggccggcagcagcagtgggggcgaccgctcacctacccgcatgctggcctcttgcaccagcagcgctgcctctgtcgccgccggcaacctcatgaaccccagcctgggcggccagagtgatggcgtggaggccgacggcagccacagcaactcacccacggccctgagcacgccaggccgcatggatgaggccgtgtggcggccctactgaccgccctggtggactcctcccgctggaggcggggaccctaacaaccttcaagaccagtgatgggccggctccgaggctccgggcgggaatgggacctgcgctccagggtggtctcggtcccagggtggtcccagctggtgggagcctctggctgcatctgtgcagccacatccttgtacagaggcataggttaccacccccaccccggcccgggatactgcccccggcccagatcctggccgtctcatcccatacttctgtggggaatcagcctcctgccacccccccggaaggacctcactgtctccagctatgcccagtgctgcatgggacccatgtctcctgggacagaggccatctctcttccagagagaggcagcattggcccacaggataagcctcaggccctgggaaacctcccgacccctgcaccttcgttggagcccctgcatcccctgggtccagccccctctgcatttacacagatttgagtcagaactggaaagtgtcccccacccccaccaccctcgagcggggttcccctcattgtacagatggggcaggacccagcacgctgctggcagagatggtttgagaacacatccaagccagtccccccagcccagcttcccctccgttcctaactgttggctttcccccagccgcacgggtcccaggccccagagaagatgagtctatggcatcaggttcttaaacccaggaaagcacctacagaccggctcctccatgcactttaccagctcaacgcatccactctctgttctcttggcagggcgggggaggggggataggaggtcccctttcccctaggtggtctcataattccatttgtggagagaacaggagggccagatagataggtcctagcagaaggcattgaggtgagggatcattttgggtcagacatcaatgtccctgtcccccctgggtccagccaagctgtgccccatcccccaagcctcctgggaggatccagccaaatcttgcgactcctggcacacacctgtctgtaacctgttttgtgctctgaaagcaaatagtcctgagcaaaaaaaaaaaaaaaacaaaaaaa

SEQ ID NO: 178649 - DNA, 4340 bp, Homo sapiens
  Payload ID: 15202
  Gene Symbol: RUNX3
  Gene Name: runt-related transcription factor 3
  Uniprot ID: Q13761
  ENST ID: ENST00000399916
  CDS Start-End: 440-1729
attcattcattccccgtggcactggaggcggcccactctgctctgtcagcttcggagctcctccaccctggctgccgaaagccccttcccgccatctaatgatacactctgcatacgcttctgttgagaatttgtggctagacattcctgtgggaccgggaatccaaattcttgggtacaaacagaaacttactttccttggggatttttttctctctctcactcacacacactctcgcgttctttccttttttctttttcgtagcagcaggggggaaaaaagagacaaaaacaaaacaaaaaacaacaaaaagcaacaccccccccttttattttcaaaagtagctagaggaaaaaaaaataaaacaacagccaaccaagtgaatcccaacccaaccccctgaagggctgaaaattctcgccttcttcagagcggggcatggcatcgaacagcatcttcgactccttcccgacctactcgccgaccttcatccgcgacccaagcaccagccgccgcttcacacctccctccccggccttcccctgcggcggcggcggcggcaagatgggcgagaacagcggcgcgctgagcgcgcaggcggccgtggggcccggagggcgcgcccggcccgaggtgcgctcgatggtggacgtgctggcggaccacgcaggcgagctcgtgcgcaccgacagccccaacttcctctgctccgtgctgccctcgcactggcgctgcaacaagacgctgcccgtcgccttcaaggtggtggcattgggggacgtgccggatggtacggtggtgactgtgatggcaggcaatgacgagaactactccgctgagctgcgcaatgcctcggccgtcatgaagaaccaggtggccaggttcaacgaccttcgcttcgtgggccgcagtgggcgagggaagagtttcaccctgaccatcactgtgttcaccaaccccacccaagtggcgacctaccaccgagccatcaaggtgaccgtggacggaccccgggagcccagacggcaccggcagaagctggaggaccagaccaagccgttccctgaccgctttggggacctggaacggctgcgcatgcgggtgacaccgagcacacccagcccccgaggctcactcagcaccacaagccacttcagcagccagccccagaccccaatccaaggcacctcggaactgaacccattctccgacccccgccagtttgaccgctccttccccacgctgccaaccctcacggagagccgcttcccagaccccaggatgcattatcccggggccatgtcagctgccttcccctacagcgccacgccctcgggcacgagcatcagcagcctcagcgtggcgggcatgccggccaccagccgcttccaccatacctacctcccgccaccctacccgggggccccgcagaaccagagcgggcccttccaggccaacccgtccccctaccacctctactacgggacatcctctggctcctaccagttctccatggtggccggcagcagcagtgggggcgaccgctcacctacccgcatgctggcctcttgcaccagcagcgctgcctctgtcgccgccggcaacctcatgaaccccagcctgggcggccagagtgatggcgtggaggccgacggcagccacagcaactcacccacggccctgagcacgccaggccgcatggatgaggccgtgtggcggccctactgaccgccctggtggactcctcccgctggaggcggggaccctaacaaccttcaagaccagtgatgggccggctccgaggctccgggcgggaatgggacctgcgctccagggtggtctcggtcccagggtggtcccagctggtgggagcctctggctgcatctgtgcagccacatccttgtacagaggcataggttaccacccccaccccggcccgggatactgcccccggcccagatcctggccgtctcatcccatacttctgtggggaatcagcctcctgccacccccccggaaggacctcactgtctccagctatgcccagtgctgcatgggacccatgtctcctgggacagaggccatctctcttccagagagaggcagcattggcccacaggataagcctcaggccctgggaaacctcccgacccctgcaccttcgttggagcccctgcatcccctgggtccagccccctctgcatttacacagatttgagtcagaactggaaagtgtcccccacccccaccaccctcgagcggggttcccctcattgtacagatggggcaggacccagcacgctgctggcagagatggtttgagaacacatccaagccagtccccccagcccagcttcccctccgttcctaactgttggctttcccccagccgcacgggtcccaggccccagagaagatgagtctatggcatcaggttcttaaacccaggaaagcacctacagaccggctcctccatgcactttaccagctcaacgcatccactctctgttctcttggcagggcgggggaggggggataggaggtcccctttcccctaggtggtctcataattccatttgtggagagaacaggagggccagatagataggtcctagcagaaggcattgaggtgagggatcattttgggtcagacatcaatgtccctgtcccccctgggtccagccaagctgtgccccatcccccaagcctcctgggaggatccagccaaatcttgcgactcctggcacacacctgtctgtaacctgttttgtgctctgaaagcaaatagtcctgagcaaaaaaaaaaaaaaaacaaaaaaacaaaaaaaaaacaaaacagtttttaaaactgattttagaaaaagaagcttaatctaacgttttcaaacacaaggtctcttacaggtatagttccgtgattatgatagctctgtgattataagcaacatccccgccccctctcccccccgcggacccccagctgcctcctgagggtgtggggttattagggtctcaatactttctcaaggggctacactccccatcaggcagcatcccaccagcctgcaccacaggctcccctgggaggacgagggaaacgctgatgagacgctgggcatctctcctctgtggctctaggacatctgtccaggaggctgggcggaggtgggcaggatgtgagaggtggggagtactggctgtgcgtggcaggacagaagcactgtaaagggctctccagccgcagctcagctgcactgcgttccgaggtgaagtcttgcccctgaattttgcaaaatgggaaagtgggcgcttgcccaagggccaggctgcatggattctcacatcagagttctctggccctagaaaggcttagaaaaggcgtaagggaactcataaaggctagcagcatgcggtattttaactttctgcctcggcctctgtggatgcagaaatctgccctacaaaatgctcttcattggttgtctctgtgagagcactgtccccacccaacctgtcacaacggccagaaccatacaccagagacacactggcaggttaggcagtccttctggtgatcctattccattccctcctgctgcggtttctcttggcctgtcctcactggaaaaacagtctccatctcctcaaaatagttgctgactccctgcacccaaggggcctctccatgccttcttaggaagcagctatgaatccattgtccttgtagtttcttccctcctgttctctggttatagctggtcccaggtcagcgtgggaggcacctttgggttcccagtgcccagcactttgtagtctcatcccagattactaacccttcctgatcctggagaggcagggatagtaaataaattgctcttcctaccccatcccccatcccctgacaaaaagtgacggcagccgtactgagtctgtaaggcccaaagtgggtacagacagcctgggctggtaaaagtaggtccttatttacaaggctgcgttaaagttgtactaggcaaacacactgatgtaggaagcacgaggaaaggaagacgttttgatatagtgttactgtgagcctgtcagtagtgggtaccaatcttttgtgacatattgtcatgctgaggtgtgacacctgctgcactcatctgatgtaaaaccatcccagagctggcgagaggatggagctgggtggaaactgctttgcactatcgtttgcttggtgtttgtttttaacgcacaacttgcttgtacagtaaactgtcttctgtactatttaactgtaaaatggaattttgactgatttgttacaataatataactctgagatgtgtggaagga

SEQ ID NO: 178650 - DNA, 1761 bp, Homo sapiens
  Payload ID: 15203
  Gene Symbol: RUVBL1
  Gene Name: RuvB-like AAA ATPase 1
  Uniprot ID: Q9Y265
  ENST ID: ENST00000322623
  CDS Start-End: 101-1471
gcaaattgccctagtaacggccgcatggtaactcaggcgccgggcgcactgtcctagctgctggttttccacgctggttttagctcccggcgtctgcaaaatgaagattgaggaggtgaagagcactacgaagacgcagcgcatcgcctcccacagccacgtgaaagggctggggctggacgagagcggcttggccaagcaggcggcctcagggcttgtgggccaggagaacgcgcgagaggcatgtggcgtcatagtagaattaatcaaaagcaagaaaatggctggaagagctgtcttgttggcaggacctcctggaactggcaagacagctctggctctggctattgctcaggagctgggtagtaaggtccccttctgcccaatggtggggagtgaagtttactcaactgagatcaagaagacagaggtgctgatggagaacttccgcagggccattgggctgcgaataaaggagaccaaggaagtttatgaaggtgaagtcacagagctaactccgtgtgagacagagaatcccatgggaggatatggcaaaaccattagccatgtgatcataggactcaaaacagccaaaggaaccaaacagttgaaactggaccccagcatttttgaaagtttgcagaaagagcgagtagaagctggagatgtgatttacattgaagccaacagtggggccgtgaagaggcagggcaggtgtgatacctatgccacagaattcgaccttgaagctgaagagtatgtccccttgccaaaaggggatgtgcacaaaaagaaagaaatcatccaagatgtgaccttgcatgacttggatgtggctaatgcgcggccccaggggggacaagatatcctgtccatgatgggccagctaatgaagccaaagaagacagaaatcacagacaaacttcgaggggagattaataaggtggtgaacaagtacatcgaccagggcattgctgagctggtcccgggtgtgctgtttgttgatgaggtccacatgctggacattgagtgcttcacctacctgcaccgcgccctggagtcttctatcgctcccatcgtcatctttgcatccaaccgaggcaactgtgtcatcagaggcactgaggacatcacatcccctcacggcatccctcttgaccttctggaccgagtgatgataatccggaccatgctgtatactccacaggaaatgaaacagatcattaaaatccgtgcccagacggaaggaatcaacatcagtgaggaggcactgaaccacctgggggagattggcaccaagaccacactgaggtactcagtgcagctgctgaccccggccaacttgcttgctaaaatcaacgggaaggacagcattgagaaagagcatgtcgaagagatcagtgaacttttctatgatgccaagtcctccgccaaaatcctggctgaccagcaggataagtacatgaagtgagatggctgaggttttcagcagtaagagactccccaggtgtgcctggcctgggtccagcctgtgggcgcttgcccctgggcttggggctgccgtccccactcaggcgtggtctgcagcgctgtcagttcagtgtggaaagcatttctttttaagttatcgtaactgttcctgtggttgctttgaaagaacccttccttacctggtgtgttttctataaatcttcataggttattttgattctctctctctctctctctaagttttttaaaaataaacttttcagaacagtt

SEQ ID NO: 178651 - DNA, 872 bp, Homo sapiens
  Payload ID: 15203
  Gene Symbol: RUVBL1
  Gene Name: RuvB-like AAA ATPase 1
  ENST ID: ENST00000478892
  CDS Start-End: 1-804
aggcagggcaggtgtgatacctatgccacagaattcgaccttgaagctgaagagtatgtccccttgccaaaaggggatgtgcacaaaaagaaagaaatcatccaagatgtgaccttgcatgacttggatgtggctaatgcgcggccccaggggggacaagatatcctgtccatgatgggccagctaatgaagccaaagaagacagaaatcacagacaaacttcgaggggagattaataaggtggtgaacaagtacatcgaccagggcattgctgagctggtcccgggtgtgctgtttgttgatgaggtccacatgctggacattgagtgcttcacctacctgcaccgcgccctggagtcttctatcgctcccatcgtcatctttgcatccaaccgaggcaactgtgtcatcagaggcttaggtgatgggattaattttgccccttacagaggcactgaggacatcacatcccctcacggcatccctcttgaccttctggaccgagtgatgataatccggaccatgctgtatactccacaggaaatgaaacagatcattaaaatccgtgcccagacggaaggaatcaacatcagtgaggaggcactgaaccacctgggggagattggcaccaagaccacactgaggtactcagtgcagctgctgaccccggccaacttgcttgctaaaatcaacgggaaggacagcattgagaaagagcatgtcgaagagatcagtgaacttttctatgatgccaagtcctccgccaaaatcctggctgaccagcaggataagtacatgaagtgagatggctgaggttttcagcagtaagagactccccaggtgtgcctggcctgggtccagcctgtgggcgc

SEQ ID NO: 178652 - DNA, 913 bp, Homo sapiens
  Payload ID: 15203
  Gene Symbol: RUVBL1
  Gene Name: RuvB-like AAA ATPase 1
  ENST ID: ENST00000472125
  CDS Start-End: 1-667
gaaagagcgagtagaagctggagatgtgatttacattgaagccaacagtggggccgtgaagaggcagggcaggtgtgatacctatgccacagaattcgaccttgaagctgaagagtatgtccccttgccaaaaggggatgtgcacaaaaagaaagaaatcatccaagatgtgaccttgcatgacttggatgtggctaatgcgcggccccaggggggacaagatatcctgtccatgatgggccagctaatgaagccaaagaagacagaaatcacagacaaacttcgaggggagattaataaggtggtgaacaagtacatcgaccagggcattgctgagctggtcccgggtgtgctgtttgttgatgaggtccacatgctggacattgagtgcttcacctacctgcaccgcgccctggagtcttctatcgctcccatcgtcatctttgcatccaaccgaggcaactgtgtcatcaggtcccatgactcaatgaacatgcttgtccagctcatctggaaacctgctgccttcaaataccatctcatcgtttcaacacaatatgatgacagtgcaccccacagagtgggggactgcacacaaggcattctgaaacttaaatccagaccatggaaactccctggggttggatctggacacacctggaaatagatgaccactgcaaagacaaagatggtggcgatgagattcatgaggttgggaagattctggcggtagaacgcctcccgaagggctcggaccttgtctgtgcgtgtggccagcagatggaaaagtgcgatgatagcaccttcaaattccattcctgttggcagaggaggagacatatatgaaggaacgaacaggcaactcaatttgcttctagccttcttagcagacaaataaaaagaggaaaacaaa

SEQ ID NO: 178653 - DNA, 2126 bp, Homo sapiens
  Payload ID: 15203
  Gene Symbol: RUVBL1
  Gene Name: RuvB-like AAA ATPase 1
  ENST ID: ENST00000464873
  CDS Start-End: 752-1699
gtcccggcaaaggctcgagcgaattcggacacggggcccggtcgctccgcccgcgtccctgagcccggctcccgccccggcccgcgctcaccgccgatgatggtccggatgagggaggcgtgcccggggcagtcgaccagcgtgacctgaagcagtggctcgccgggctcgggctcggcctcgggcgctgcctggaactcgggcaaagacgaccgcaggcgcgcgggcagcggcaccgagaagcacgagaagcccagatcgagcgtgatgccgcgctcgcggctctgcggctgcttgtcaaaggcggcggtggaggctgtggtgcttagcgcccgcgccagcgccgtcttgccgctgtcgatgtggcccagcacgcccacgttcacgttcacccgccgccctgccatgccgccgccgccgcctcggacacccgcccggcccgcccctcacctccctcggtagtcgccgcggtccggcccgttaagttgcccccccgtaaccggcgcgctgtgcacacccgttccggcccggaagcttccgccctcctgaggctcacgggcacagccgagcgccgtgctccgagtgggtggtctaggaactggaggtcaccgtaggcagggtttctctctcacgtggctcctcctgcctgaagcctctaggagcccgagatggagggatccttctgagaagtgaagccatttggactttctgggcatgtggcgtcatagtagaattaatcaaaagcaagaaaatggctggaagagctgtcttgttggcaggacctcctggaactggcaagacagctctggctctggctattgctcaggagctgggtagtaaggtccccttctgcccaatggtggggagtgaagtttactcaactgagatcaagaagacagaggtgctgatggagaacttccgcagggccattgggctgcgaataaaggagaccaaggaagtttatgaaggtgaagtcacagagctaactccgtgtgagacagagaatcccatgggaggatatggcaaaaccattagccatgtgatcataggactcaaaacagccaaaggaaccaaacagttgaaactggaccccagcatttttgaaagtttgcagaaagagcgagtagaagctggagatgtgatttacattgaagccaacagtggggccgtgaagaggcagggcaggtgtgatacctatgccacagaattcgaccttgaagctgaagagtatgtccccttgccaaaaggggatgtgcacaaaaagaaagaaatcatccaagatgtgaccttgcatgacttggatgtggctaatgcgcggccccaggggggacaagatatcctgtccatgatgggccagctaatgaagccaaagaagacagaaatcacagacaaacttcgaggggagattaataaggtggtgaacaagtacatcgaccagggcattgctgagctggtcccgggtgtgctgtttgttgatgaggtccacatgctggacattgagtgcttcacctacctgcaccgcgccctggagtcttctatcgctcccatcgtcatctttgcatccaaccgaggcaactgtgtcatcagaggcactgaggacatcacatcccctcacggcatccctcttgaccttctggaccgagtgatgataatccggaccatgctgtatactccacaggaaatgaaacaggtcccatgactcaatgaacatgcttgtccagctcatctggaaacctgctgccttcaaataccatctcatcgtttcaacacaatatgatgacagtgcaccccacagagtgggggactgcacacaaggcattctgaaacttaaatccagaccatggaaactccctggggttggatctggacacacctggaaatagatgaccactgcaaagacaaagatggtggcgatgagattcatgaggttgggaagattctggcggtagaacgcctcccgaagggctcggaccttgtctgtgcgtgtggccagcagatggaaaagtgcgatgatagcaccttcaaattccattcctgttggcagaggaggagacatatatgaaggaacgaacaggcaactcaatttgcttctagccttcttagcagacaaataaaaagaggaaaac

SEQ ID NO: 178654 - DNA, 1113 bp, Homo sapiens
  Payload ID: 15203
  Gene Symbol: RUVBL1
  Gene Name: RuvB-like AAA ATPase 1
  ENST ID: ENST00000585057
  CDS Start-End: 1-396
aaacttcgaggggagattaataaggtggtgaacaagtacatcgaccagggcattgctgagctggtcccgggtgtgctgtttgttgatgaggtccacatgctggacattgagtgcttcacctacctgcaccgcgccctggagtcttctatcgctcccatcgtcatctttgcatccaaccgaggcaactgtgtcatcagaggcactgaggacatcacatcccctcacggcatccctcttgaccttctggaccgagtgatgataatccggaccatgctgtatactccacaggaaatgaaacagatcattaaaatccgtgcccagacggaaggaatcaacatcagtgaggaggcactgaaccacctgggggagattggcaccaagaccacactgaggtaaggcccataggacaacctggtctgcagctgactttgtagccagctttgtaggaacacggccatgctcatttgtctgttgtctgtctgtggctgcttctgagtgacgatggaagagatgagtagttgtactgaggactgtgcagactgaagagtgctgtggcagcatctaaggtcacctggactttgcccttccttacctaactgctccatctccaagggtacagctgtatctggcaccatcacctctggcccaaactctcaccacagcctggcaggtcccatgactcaatgaacatgcttgtccagctcatctggaaacctgctgccttcaaataccatctcatcgtttcaacacaatatgatgacagtgcaccccacagagtgggggactgcacacaaggcattctgaaacttaaatccagaccatggaaactccctggggttggatctggacacacctggaaatagatgaccactgcaaagacaaagatggtggcgatgagattcatgaggttgggaagattctggcggtagaacgcctcccgaagggctcggaccttgtctgtgcgtgtggccagcagatggaaaagtgcgatgatagcaccttcaaattccattcctgttggcagaggaggagacatatatgaaggaacgaacaggcaactcaatttgcttctagccttcttagcagacaaataaaaagaggaaaacaaactta

SEQ ID NO: 178655 - DNA, 1478 bp, Homo sapiens
  Payload ID: 15204
  Gene Symbol: RUVBL2
  Gene Name: RuvB-like AAA ATPase 2
  ENST ID: ENST00000221413
  CDS Start-End: 14-793
gttggtgagcatcatggcaaccgttacagccacaaccaaagtcccggagatccgtgatgtaacaaggattgagcgaatcggtgcccactcccacatccggggactggggctggacgatgccttggagcctcggcaggcttcgcaaggcatggtgggtcagctggcggcacggcgggcggctggcgtggtgctggagatgatccgggaagggaagattgccggtcgggcagtccttattgctggccagccgggcacggggaagacggccatcgccatgggcatggcgcaggccctgggccctgacacgccattcacagccatcgccggcagtgaaatcttctccctggagatgagcaagaccgaggcgctgacgcaggccttccggcggtccatcggcgttcgcatcaaggaggagacggagatcatcgaaggggaggtggtggagatccagattgatcgaccagcaacagggacgggctccaaggtgggcaaactgaccctcaagaccacagagatggagaccatctacgacctgggcaccaagatgattgagtccctgaccaaggacaagggacgtgatcaccatcgacaaggcgacgggcaagatctccaagctgggccgctccttcacacgcgcccgcgactacgacgctatgggctcccagaccaagttcgtgcagtgcccagatggggagctccagaaacgcaaggaggtggtgcacaccgtgtccctgcacgagatcgacgtcatcaactctcgcacccagggcttcctggcgctcttctcaggtgacacaggggagatcaagtcagaagtccgtgagcagatcaatgccaaggtggctgagtggcgcgaggagggcaaggcggagatcatccctggagtgctgttcatcgacgaggtccacatgctggacatcgagagcttctccttcctcaaccgggccctggagagtgacatggcgcctgtcctgatcatggccaccaaccgtggcatcacgcgaatccggggcaccagctaccagagccctcacggcatccccatagacctgctggaccggctgcttatcgtctccaccaccccctacagcgagaaagacacgaagcagatcctccgcatccggtgcgaggaagaagatgtggagatgagtgaggacgcctacacggtgctgacccgcatcgggctggagacgtcactgcgctacgccatccagctcatcacagctgccagcttggtgtgccggaaacgcaagggtacagaagtgcaggtggatgacatcaagcgggtctactcactcttcctggacgagtcccgctccacgcagtacatgaaggagtaccaggacgccttcctcttcaacgaactcaaaggcgagaccatggacacctcctgagttggatgtcatcccccgaccccaccctgttttccaccagagttctgacactgtgactctgtataaaatggttgggaagctgca

SEQ ID NO: 178656 - DNA, 682 bp, Homo sapiens
  Payload ID: 15204
  Gene Symbol: RUVBL2
  Gene Name: RuvB-like AAA ATPase 2
  ENST ID: ENST00000596837
  CDS Start-End: 356-682
actcaaagaacagctaagaattttgcaatcggcctgagcggggcggtggtggggctgagcaaaaggaggaggagccaggagacattgggaatggacccaggagttccggacgcccgtcttccagcgcagcctcggtgggagggcggggcataaagtcccgccacgcccccacaatatttacatatttatgaggaaccatcgagatctttgaagaaccagctagcctagaggagccagaacatctcgctcctcgcgcgtttccgtttccgctaggactctggcagttggtgcccactcccacatccggggactggggctggacgatgccttggagcctcggcaggcttcgcaaggcatggtgggtcagctggcggcacggcgggcggctggcgtggtgctggagatgatccgggaagggaagattgccggtcgggcagtccttattgctggccagccgggcacggggaagacggccatcgccatgggcatggcgcaggccctgggccctgacacgccattcacagccatcgccggcagtgaaatcttctccctggagatgagcaagaccgaggcgctgacgcaggccttccggcggtccatcggcgttcgcatcaaggaggagacggagatcatcgaaggggaggtggtggagatccagattgatcgaccagcaacagggacg

SEQ ID NO: 178657 - DNA, 813 bp, Homo sapiens
  Payload ID: 15204
  Gene Symbol: RUVBL2
  Gene Name: RuvB-like AAA ATPase 2
  ENST ID: ENST00000593570
  CDS Start-End: 3-122
tcatggcaaccgttacagccacaaccaaagtcccggagatccgtgatgtaacaaggattgagcgaatcgagatggagtttccccgtgttagccaggatggtctcgatctcctgacctcgtgatccgcccgcctcggcctcccaaagtgctggaattacaggcatgagccaccgcgcctggccaaaaaacaataaaaaattaaaaaaaaaaaaaaaggatgaagagccaagcaccgcttgtgagctgaggacccagtagagactagctgcacccaggagcctcccttggggtgctcacagtcaagcactggggtgcccactcccacatccggggactggggctggacgatgccttggagcctcggcaggcttcgcaaggcatggtgggtcagctggcggcacggcgggcggctggcgtggtgctggagatgatccgggaagggaagattgccggtcgggcagtccttattgctggccagccgggcacggggaagacggccatcgccatgggcatggcgcaggccctgggccctgacacgccattcacagccatcgccggcagtgaaatcttctccctggagatgagcaagaccgaggcgctgacgcaggccttccggcggtccatcggcgttcgcatcaaggaggagacggagatcatcgaaggggaggtggtggagatccagattgatcgaccagcaacagggacgggctccaaggtgggcaaactgaccctcaagaccacagagatggagaccatctacgacctgggcaccaagatgattgagtccctgaccaaggacaaggtccaggccgg

SEQ ID NO: 178658 - DNA, 572 bp, Homo sapiens
  Payload ID: 15204
  Gene Symbol: RUVBL2
  Gene Name: RuvB-like AAA ATPase 2
  ENST ID: ENST00000595811
  CDS Start-End: 24-158
gactctggcagttggtgagcatcatggcaaccgttgaactccaactttcaaaatcatcttggcgcaacggccggttccgcagtccttggcgccagtgtgtgatgaggagggttgtaggaccttgcgcttcgagccatttgggagccttggattgttagtggtgccaatggcacttgagttccaagctggaagcacaggcaggtgtggtggtgcaggcctgtaatcccagctactcagaaggctgaggcaggagaatcgcttgaacctgggaggcagaagttgcagtgagccaagatcgcgccactgcattccagcctgggcgacaaagcgagactctgtctccaaaaaaaaaaagacagccacaaccaaagtcccggagatccgtgatgtaacaaggattgagcgaatcggtgcccactcccacatccggggactggggctggacgatgccttggagcctcggcaggcttcgcaaggcatggtgggtcagctggcggcacggcgggcggctggcgtggtgctggagatgatccgggaagggaagattgccggtcgggcagtccttattgctg

SEQ ID NO: 178659 - DNA, 1641 bp, Homo sapiens
  Payload ID: 15204
  Gene Symbol: RUVBL2
  Gene Name: RuvB-like AAA ATPase 2
  ENST ID: ENST00000601968
  CDS Start-End: 465-1529
gggaggaggaggagggtgggataaagaggaaaggagcgtggaggacgtgtggttactcaaagaacagctaagaattttgcaatcggcctgagcggggcggtggtggggctgagcaaaaggaggaggagccaggagacattgggaatggacccaggagttccggacgcccgtcttccagcgcagcctcggtgggagggcggggcataaagtcccgccacgcccccacaatatttacatatttatgaggaaccatcgagatctttgaagaaccagctagcctagaggagccagaacatctcgctcctcgcgcgtttccgtttccgctaggactctggcagttgacagccacaaccaaagtcccggagatccgtgatgtaacaaggattgagcgaatcggtgcccactcccacatccggggactggggctggacgatgccttggagcctcggcaggcttcgcaaggcatggtgggtcagctggcggcacggcgggcggctggcgtggtgctggagatgatccgggaagggaagattgccggtcgggcagtccttattgctggccagccgggcacggggaagacggccatcgccatgggcatggcgcaggccctgggccctgacacgccattcacagccatcgccggcagtgaaatcttctccctggagatgagcaagaccgaggcgctgacgcaggccttccggcggtccatcggcgttcgcatcaaggaggagacggagatcatcgaaggggaggtggtggagatccagattgatcgaccagcaacagggacgggctccaaggtgggcaaactgaccctcaagaccacagagatggagaccatctacgacctgggcaccaagatgattgagtccctgaccaaggacaaggtccaggccggggacgtgatcaccatcgacaaggcgacgggcaagatctccaagctgggccgctccttcacacgcgcccgcgactacgacgctatgggctcccagaccaagttcgtgcagtgcccagatggggagctccagaaacgcaaggaggtggtgcacaccgtgtccctgcacgagatcgacgtcatcaactctcgcacccagggcttcctggcgctcttctcaggtgacacaggggagatcaagtcagaagtccgtgagcagatcaatgccaaggtggctgagtggcgcgaggagggcaaggcggagatcatccctggagtgctgttcatcgacgaggtccacatgctggacatcgagagcttctccttcctcaaccgggccctggagagtgacatggcgcctgtcctgatcatggccaccaaccgtggcatcacgcgaatccggggcaccagctaccagagccctcacggcatccccatagacctgctggaccggctgcttatcgtctccaccaccccctacagcgagaaagacacgaagcagatcctccgcatccgggtacagaagtgcaggtggatgacatcaagcgggtctactcactcttcctggacgagtcccgctccacgcagtacatgaaggagtaccaggacgccttcctcttcaacgaactcaaaggcgagaccatggacacctcctgagttggatgtcatcccccgaccccaccctgttttccaccagagttctgaca

SEQ ID NO: 178660 - DNA, 1563 bp, Homo sapiens
  Payload ID: 15204
  Gene Symbol: RUVBL2
  Gene Name: RuvB-like AAA ATPase 2
  ENST ID: ENST00000596247
  CDS Start-End: 15-167
agttggtgagcatcatggcaaccgttacagccacaaccaaagtcccggagatccgtgatgtaacaaggattgagcgaatcggtgcccactcccacatccggggactggggctggacgatgccttggagcctcggcagcttcctgatgtggtagaaatgccatggtagccccacaggaaatcacctcatgtgcgcctcccacccacaggcttcgcaaggcatggtgggtcagctggcggcacggcgggcggctggcgtggtgctggagatgatccgggaagggaagattgccggtcgggcagtccttattgctggccagccgggcacggggaagacggccatcgccatgggcatggcgcaggccctgggccctgacacgccattcacagccatcgccggcagtgaaatcttctccctggagatgagcaagaccgaggcgctgacgcaggccttccggcggtccatcggcgttcgcatcaaggaggagacggagatcatcgaaggggaggtggtggagatccagattgatcgaccagcaacagggacgggctccaaggtgggcaaactgaccctcaagaccacagagatggagaccatctacgacctgggcaccaagatgattgagtccctgaccaaggacaaggtccaggccggggacgtgatcaccatcgacaaggcgacgggcaagatctccaagctgggccgctccttcacacgcgcccgcgactacgacgctatgggctcccagaccaagttcgtgcagtgcccagatggggagctccagaaacgcaaggaggtggtgcacaccgtgtccctgcacgagatcgacgtcatcaactctcgcacccagggcttcctggcgctcttctcaggtgacacaggggagatcaagtcagaagtccgtgagcagatcaatgccaaggtggctgagtggcgcgaggagggcaaggcggagatcatccctggagtgctgttcatcgacgaggtccacatgctggacatcgagagcttctccttcctcaaccgggccctggagagtgacatggcgcctgtcctgatcatggccaccaaccgtggcatcacgcgaatccggggcaccagctaccagagccctcacggcatccccatagacctgctggaccggctgcttatcgtctccaccaccccctacagcgagaaagacacgaagcagatcctccgcatccggtgcgaggaagaagatgtggagatgagtgaggacgcctacacggtgctgacccgcatcgggctggagacgtcactgcgctacgccatccagctcatcacagctgccagcttggtgtgccggaaacgcaagggtacagaagtgcaggtggatgacatcaagcgggtctactcactcttcctggacgagtcccgctccacgcagtacatgaaggagtaccaggacgccttcctcttcaacgaactcaaaggcgagaccatggacacctcctgagttggatgtcatcccccgaccccaccctgttttccaccagagttctgacactgtgactctgtataaaatggttgggaagctgcaccc

SEQ ID NO: 178661 - DNA, 2009 bp, Homo sapiens
  Payload ID: 15204
  Gene Symbol: RUVBL2
  Gene Name: RuvB-like AAA ATPase 2
  Uniprot ID: Q9Y230
  ENST ID: ENST00000595090
  CDS Start-End: 465-1856
gtgtcccggccccgcctcggccgtgagacctccagggggcggagcttgccgctgcgctttacggaaacgagtggccttcagctctgtcaatctggagctggaggcctcaaagtggggaggaggaggagggtgggataaagaggaaaggagcgtggaggacgtgtggttactcaaagaacagctaagaattttgcaatcggcctgagcggggcggtggtggggctgagcaaaaggaggaggagccaggagacattgggaatggacccaggagttccggacgcccgtcttccagcgcagcctcggtgggagggcggggcataaagtcccgccacgcccccacaatatttacatatttatgaggaaccatcgagatctttgaagaaccagctagcctagaggagccagaacatctcgctcctcgcgcgtttccgtttccgctaggactctggcagttggtgagcatcatggcaaccgttacagccacaaccaaagtcccggagatccgtgatgtaacaaggattgagcgaatcggtgcccactcccacatccggggactggggctggacgatgccttggagcctcggcaggcttcgcaaggcatggtgggtcagctggcggcacggcgggcggctggcgtggtgctggagatgatccgggaagggaagattgccggtcgggcagtccttattgctggccagccgggcacggggaagacggccatcgccatgggcatggcgcaggccctgggccctgacacgccattcacagccatcgccggcagtgaaatcttctccctggagatgagcaagaccgaggcgctgacgcaggccttccggcggtccatcggcgttcgcatcaaggaggagacggagatcatcgaaggggaggtggtggagatccagattgatcgaccagcaacagggacgggctccaaggtgggcaaactgaccctcaagaccacagagatggagaccatctacgacctgggcaccaagatgattgagtccctgaccaaggacaaggtccaggccggggacgtgatcaccatcgacaaggcgacgggcaagatctccaagctgggccgctccttcacacgcgcccgcgactacgacgctatgggctcccagaccaagttcgtgcagtgcccagatggggagctccagaaacgcaaggaggtggtgcacaccgtgtccctgcacgagatcgacgtcatcaactctcgcacccagggcttcctggcgctcttctcaggtgacacaggggagatcaagtcagaagtccgtgagcagatcaatgccaaggtggctgagtggcgcgaggagggcaaggcggagatcatccctggagtgctgttcatcgacgaggtccacatgctggacatcgagagcttctccttcctcaaccgggccctggagagtgacatggcgcctgtcctgatcatggccaccaaccgtggcatcacgcgaatccggggcaccagctaccagagccctcacggcatccccatagacctgctggaccggctgcttatcgtctccaccaccccctacagcgagaaagacacgaagcagatcctccgcatccggtgcgaggaagaagatgtggagatgagtgaggacgcctacacggtgctgacccgcatcgggctggagacgtcactgcgctacgccatccagctcatcacagctgccagcttggtgtgccggaaacgcaagggtacagaagtgcaggtggatgacatcaagcgggtctactcactcttcctggacgagtcccgctccacgcagtacatgaaggagtaccaggacgccttcctcttcaacgaactcaaaggcgagaccatggacacctcctgagttggatgtcatcccccgaccccaccctgttttccaccagagttctgacactgtgactctgtataaaatggttgggaagctgcacccaccctgtgtatgtgtggttgccctgagcccacagaaagacacctccagagtgcggattgagaagcc

SEQ ID NO: 178662 - DNA, 1065 bp, Homo sapiens
  Payload ID: 15204
  Gene Symbol: RUVBL2
  Gene Name: RuvB-like AAA ATPase 2
  ENST ID: ENST00000627972
  CDS Start-End: 1-1065
atggtgggtcagctggcggcacggcgggcggctggcgtggtgctggagatgatccgggaagggaagattgccggtcgggcagtccttattgctggccagccgggcacggggaagacggccatcgccatgggcatggcgcaggccctgggccctgacacgccattcacagccatcgccggcagtgaaatcttctccctggagatgagcaagaccgaggcgctgacgcaggccttccggcggtccatcggcgttcgcatcaaggaggagacggagatcatcgaaggggaggtggtggagatccagattgatcgaccagcaacagggacgggctccaaggtgggcaaactgaccctcaagaccacagagatggagaccatctacgacctgggcaccaagatgattgagtccctgaccaaggacaaggtccaggccggggacgtgatcaccatcgacaaggcgacgggcaagatctccaagctgggccgctccttcacacgcgcccgcgactacgacgctatgggctcccagaccaagttcgtgcagtgcccagatggggagctccagaaacgcaaggaggtggtgcacaccgtgtccctgcacgagatcgacgtcatcaactctcgcacccagggcttcctggcgctcttctcaggtgacacaggggagatcaagtcagaagtccgtgagcagatcaatgccaaggtggctgagtggcgcgaggagggcaaggcggagatcatccctggagtgctgttcatcgacgaggtccacatgctggacatcgagagcttctccttcctcaaccgggccctggagagtgacatggcgcctgtcctgatcatggccaccaaccgtggcatcacgcgaatccggggcaccagctaccagagccctcacggcatccccatagacctgctggaccggctgcttatcgtctccaccaccccctacagcgagaaagacacgaagcagatcctccgcatccgggtacagaagtgcaggtggatgacatcaagcgggtctactcactcttcctggacgagtcccgctccacgcagtacatga

SEQ ID NO: 178663 - DNA, 5522 bp, Homo sapiens
  Payload ID: 15205
  Gene Symbol: RWDD1
  Gene Name: RWD domain containing 1
  Uniprot ID: Q9H446
  ENST ID: ENST00000466444
  CDS Start-End: 217-948
agaacgagtcgaacgtggaagtagggagcaggcggaggccggcgcggagctgcagttaagcaagccgggtctggctttgggccctgggccttccagccggggactctgcgcctgcgcccgcctggccgccgcccgctctcccggcgcggcagctgtctgggctgctgcgcgccgcctaggtgtctgggcgatctatgggcaagagcaagggccacgatgacagattacggcgaggagcagcgcaacgagctggaggccctggagtccatctaccctgactccttcacagtattatcagaaaatccacccagcttcaccattactgtgacgtctgaggctggagaaaatgatgaaactgtccagactaccctcaagtttacatacagtgaaaaatacccagatgaagctcccctttatgaaatattctcccaggaaaatctagaagataatgatgtctcagacattttaaaattactagcattacaggctgaagaaaatcttggtatggtgatgatttttactctagtgacagctgtgcaagaaaaattaaatgaaatagtagatcagataaaaactagaagagaagaagaaaagaaacaaaaagaaaaagaagcagaagaagctgaaaagcaattattccatggtactccagttacaattgagaatttcttaaattggaaagccaagtttgatgcagaactcttggaaattaaaaagaaaaggatgaaagaagaagaacaagcaggaaaaaataaattaagtgggaaacaactatttgaaacagatcataatcttgacacatctgatatccagttcttggaggatgctggaaacaacgtggaggtagatgagtctttgttccaagaaatggatgacttggagctggaggatgatgaagatgatccagactataatcctgctgacccagagagtgactcagctgactaatggactgtccccatctgcagagaggcttgactgccacagcatctgtggctatgctcagagggttatgattttcctttctttttttctaagaaaaaattattttcaggagaatattcttctgatagctttcatcattgaacttaataaactgaccttaaaatttcaaatataaaatgttcaaggcttcttactgttgagcacaaggttacgtatttaaaatcacctagtatttgagagagatcctgcctatagcaccaagactcgaaggtaggctgctgctgtgcacatgagtttatacacaggaaattggaataacttggaatttctatgctggagactttggctacttctggatttcaagcattgtatgaagtgtgagaaaactgaggtgactagcacattaaaccatccagattctagcctccaggcacactaaatttaagtcttgataaaaccaggaggccatattatgatcataagtaagatgaagtttagccttccttttagtccattttgtattgccgtaaaggaatatctgaggctgggtaatttataaaaggtttgccgggtgcggtggctcacgcctgtaatcccagcactttgggaggctgaggcaggtggatcacgaggtcaggagattgagaccatcctggctaacacggtgaaaccccgtctctattaaaaatacaaaaaattagccaggtgtggtggcgagcacctgtagtcccaactactcgggaggctgaggcaggacaatggcgtgaacccgggaggtggagcttgcagtgagccgagatcacgccactgcactccagcctgggcaacagagcaagactccgtctcaaaaaaaaaaaaaaggtttatttggctcataattctggatgaccagaaagttgaagattgggtatctgcatctggtgagagcctcacgctgcttccactcatggtagaaggggaagaggcactatgtgtgtagagatcacatggccagagagtgagggtggaagtgccaggctttttttttttttttaaactagctttggtgggaactccctcacccctgctccccacaggaaggcattaatctatttatgagggatctacctgctataacccaaacaccccaccagcccccatctcccaacaccaccacactggggattaaatttcaatgtgggatttggagaggacaaatatccaaaccatagcagtcttaaagtatttaaattagaatttaaattaaaatttaaattacagtatttaaattagaatcatttgtggagtttctaaaaggtatgcattcctaggcccctctcaagttagatttatgaacactgatccccagtctgaattttaaaacagcaaaatctcatactggttctacagattattctgatgcacaatctgggttaagaaccactgtcctgtagtcgtgaagtctatatattttggtattttctttacctcttctctaattaaccagtctgaaggagtttgaattttggggatcgtacattgtctgcaagagaaacacattaacatccgtgcacatagagtcctttgtaataatttgggatgattgacttggtggctccaggtaggagagccagtcttcatgcaagttattcagtcactacagttttggaggactgactcttaaccccaataggaaatcagttgtgctattttaaattcataaagctattataaagagctgcctccagtaaaaaatacatatgccacatacccacaaacagcaatattaagccttcatttattgttggagttagaccttataatcaaaaagcaaattatttaagataaaattaccattgaggagtttaatacttttcaaggaatcttcacgtcagccttgatcccagaccaatagaatggaataacaacaggaatgttcagcatttctttgcagagagaaatccaaaagtttgtcctatgtgagattttgcttttcccatctttttgaagctgatcagcagatacataagaacctggaagaagctgctcaattaaggttaaaaaaaataaaaagcaattgttagcaatgtggtgctgaaatcaagacttaactttgaagtgtcaagaatgataacctcccatccacttcatgtgatttttaagaataaattttatatatttctccaggtattaaagtggatgtccacctttgccatttcagaacctaaaggcagaatctaatggtaaaatgaagacaacctagttgtcttctaataacctagttagttctaataacattctcaaatattttcatctagagtaaatatttactgttggctttgtattctgggaattagcccaagactatgctgctcaaatgggtgcaaatatactctcaggttgcaatagcatgacgagtggtatttgaagcaataattgttccatcttggattatcggttttgctctttgatttggtaaagtttttgtttttctactcgtgccagttgtattaaaatgtcactaggttaaaaacaaacacagatatgtttattcattactgtatccctgtaataatgcctggcatgcagtaggtccctaatatttgttgaatgaatgaattatagaatagagtgcaaaattaattctaatgtattttaaagtaaagcatgagagttcaaagaaatgttgtatttgccatctacaacttggaataatgttccttgatcctgctttacttcatgcacttttgccagcagaggtggatgccttagggaaaaagttggataaatgctgatctaaggcaacacgtctaaatggttatgtgaacatttcccagttggggtaaaactaagaggagtgataataacatctcatcaatttaaaggacaagttcactgatcgtactgtcatactccagagatacatgtgccaagaagcaaagagatgcactcttgtattccagaaagaagatgatttgtaagtgttcagtatttgtgtggcagcccttttaggtgtaatgaagtgtaacagaaaagtaagtgaactacttcacatagctcttaatgtttgtctttcagaggacatacgagtcaggcagcaaaagttggagccattgtatgattgtgtgtcaaaatgagagtcacacacttcaagaactgtaggaactaattttagaaaaagactcttcagaacagatgacacatgaaatgtgagtttatgtaaacatgtaaatttgagtagcattagtttgttttctgtttaggaactgtatcagggtgacaaagatgaaagaatgctgccagaaaagtatattgttaaattttcaggcctccattggtgaagtttcaagtaacctttcacttaagttacttgtgtcagaggatggatgatggggtcatttaaattgttggacaaagccatgaaaggacttttaaaattttgtcataaaaatagccaatgatgtttttaattttacatctaaaactaatttgcattatcctgtgttagtgactgaatctcaactcagtcctcattttttagttcaacttttgacaaccttatattcattgacaccatggacagcacagtaaaaaaatacacaaatttcttttgcagttattgatttggaatgatcactttaaaagagccatcaaatacgcctacatattgagccactctttatcattaaggtgaaaagttcattcaattaaggtatttgagtgctactatgcgccagcctttctttgtgataatgttaattttttttttcctcccctccatgaagggaagaaaaaaaaattaattcggccatgaattttaatattctggccagcaccttatccatttgtagccacgccaacaaatttattctgtgatataccaaacttacaaagtcactctgcgatttcagtaaggcccattcccaacatgagtgctgctgtccacggtactgaaccatcaatgctaaatggtatttagttgtggatcttcatcctgtcatgcagctaaatattccaggaatactgaaccaagtgaggagaaagatagcagtgggttgctgcaaaggaggtgaggggaggggagagatagcaagtgagaaaaagagagactagtggtgatgtttttaagtaattgaagtaaaaaagagagagaaagagagagagaagaggttctactcagtccaccaaagctttttaatttccttacataattaacatgatgaatttttaaataattgttatatttagttttgttcttccaccttttggctatttctactacatatttacttatcataaaaaatacttcctagaccttcctcttatagctattgcctatctctgcctttgcagctgttctcctttaaagagtagtctccattagttttcttgacttcttcatctccctgcataaagatgaagggtatttagctctgaaaatcctttactgttgaatatttagattgttttcaatttttacataatgaacaatgcatcatgggattattggctgcaaataaattggaaacataaaaggtgttttaagtttaaatttttttaaaaaaacaggtaaaaataaaatatttgccaaagactaa

SEQ ID NO: 178664 - DNA, 505 bp, Homo sapiens
  Payload ID: 15205
  Gene Symbol: RWDD1
  Gene Name: RWD domain containing 1
  ENST ID: ENST00000468204
  CDS Start-End: 304-505
ctaggactgggtactgataatttgctaataaggaaaagcatctgccttagaaagcatttcaataacttctgtgtgtattttcttgcagtattatcagaaaatccacccagcttcaccattactgtgacgtctgaggctggagaaaatgatgaaactgtccagactaccctcaagtttacatacagtgaaaaatacccagatgaagctcccctttatgaaatattctcccaggaaaatctagaagataatgatgtctcagacattttaaaattactagcattacaggctgaagaaaatcttggtatggtgatgatttttactctagtgacagctgtgcaagaaaaattaaatgaaatagtagatcagataaaaactagaagagaagaagaaaagaaacaaaaagaaaaagaagcagaagaagctgaaaagcaattattccatggtactccagttacaattgagaatttcttaaattggaaagccaagtttgatgcagaactcttgg

SEQ ID NO: 178665 - DNA, 1427 bp, Homo sapiens
  Payload ID: 15205
  Gene Symbol: RWDD1
  Gene Name: RWD domain containing 1
  Uniprot ID: Q9H446
  ENST ID: ENST00000487832
  CDS Start-End: 497-940
tggccgccgcccgctctcccggcgcggcagctgtctgggctgctgcgcgccgcctaggtgtctgggcgatctatgggcaagagcaagggccacgatgacagattacggcgaggagcagcgcaacgagctggaggccctggagtccatctaccctgactccttcacagcttgattgcacattgatccaaccctcctaacaactagtcttccaaaatataaatggactctcctgataccacattctccttcagtagtgcttcacttgacaaggtcctgctaagtattatcagaaaatccacccagcttcaccattactgtgacgtctgaggctggagaaaatgatgaaactgtccagactaccctcaagtttacatacagtgaaaaatacccagatgaagctcccctttatgaaatattctcccaggaaaatctagaagataatgatgtctcagacattttaaaattactagcattacaggctgaagaaaatcttggtatggtgatgatttttactctagtgacagctgtgcaagaaaaattaaatgaaatagtagatcagataaaaactagaagagaagaagaaaagaaacaaaaagaaaaagaagcagaagaagctgaaaagcaattattccatggtactccagttacaattgagaatttcttaaattggaaagccaagtttgatgcagaactcttggaaattaaaaagaaaaggatgaaagaagaagaacaagcaggaaaaaataaattaagtgggaaacaactatttgaaacagatcataatcttgacacatctgatatccagttcttggaggatgctggaaacaacgtggaggtagatgagtctttgttccaagaaatggatgacttggagctggaggatgatgaagatgatccagactataatcctgctgacccagagagtgactcagctgactaatggactgtccccatctgcagagaggcttgactgccacagcatctgtggctatgctcagagggttatgattttcctttctttttttctaagaaaaaattattttcaggagaatattcttctgatagctttcatcattgaacttaataaactgaccttaaaatttcaaatataaaatgttcaaggcttcttactgttgagcacaaggttacgtatttaaaatcacctagtatttgagagagatcctgcctatagcaccaagactcgaaggtaggctgctgctgtgcacatgagtttatacacaggaaattggaataacttggaatttctatgctggagactttggctacttctggatttcaagcattgtatgaagtgtgagaaaactgaggtgactagcacattaaaccatccagattctagcctccaggcacactaaatttaagtcttgataaaaccaggaggccatattatgatcataagtaagatg

SEQ ID NO: 178666 - DNA, 857 bp, Homo sapiens
  Payload ID: 15205
  Gene Symbol: RWDD1
  Gene Name: RWD domain containing 1
  ENST ID: ENST00000368590
  CDS Start-End: 705-857
cgcggagctgcagttaagcaagccgggtctggctttgggccctgggccttccagccggggactctgcgcctgcgcccgcctggccgccgcccgctctcccggcgcggcagctgtctgggctgctgcgcgccgcctaggtgtctgggcgatctatgggcaagagcaagggccacgatgacagattacggcgaggagcagcgcaacgagctggaggccctggagtccatctaccctgactccttcacaggcagatgtctctcagctatccctgtatagctccagtcctgttcatgttctctctcaccagcagtacatctgtgctgtgaggatgttaaggggatgagtgaagaggggtttgagagtgtcattaactggcttgattgcacattgatccaaccctcctaacaactagtcttccaaaatataaatggactctcctgataccacattctccttcagtagtgcttcacttgacaaggtcctgctaagtattatcagaaaatccacccagcttcaccattactgtgacgtctgaggctggagaaaatgatgaaactgtccagactaccctcaagtttacatacagtgaaaaatacccagatgaagctcccctttatgaaatattctcccaggaaaatctagaagataatgatgtctcagacattttaaaattactagcattacaggctgaagaaaatcttggtatggtgatgatttttactctagtgacagctgtgcaagaaaaattaaatgaaatagtagatcagataaaaactagaagagaagaagaaaagaaacaaaaagaaaaagaagcagaagaagctgaaaagcaattattccatggtactccagttaca

SEQ ID NO: 178667 - DNA, 581 bp, Homo sapiens
  Payload ID: 15205
  Gene Symbol: RWDD1
  Gene Name: RWD domain containing 1
  ENST ID: ENST00000518117
  CDS Start-End: 366-581
gggcaagagcaagggccacgatgacagattacggcgaggagcagcgcaacgagctggaggccctggagtccatctaccctgactccttcacagacatatgggacttgggattcagctccagctgagattgagagagcagaagattacttgtattatcagaaaatccacccagcttcaccattactgtgacgtctgaggctggagaaaatgatgaaactgtccagactaccctcaagtttacatacagtgaaaaatacccagatgaagctcccctttatgaaatattctcccaggaaaatctagaagataatgatgtctcagacattttaaaattactagcattacaggctgaagaaaatcttggtatggtgatgatttttactctagtgacagctgtgcaagaaaaattaaatgaaatagtagatcagataaaaactagaagagaagaagaaaagaaacaaaaagaaaaagaagcagaagaagctgaaaagcaattattccatggtactccagttacaattgagaatttcttaaattggaaagccaagtttgatgcagaactcttggaaattaaaaagaaa

SEQ ID NO: 178668 - DNA, 3744 bp, Homo sapiens
  Payload ID: 15206
  Gene Symbol: RWDD2A
  Gene Name: RWD domain containing 2A
  Uniprot ID: Q9UIY3
  ENST ID: ENST00000369724
  CDS Start-End: 206-1084
ctgaggaactgcggctgcggttccgagcggggtctggggctgttaccattgagtgaccagaaaggctctcggtgcaaagcgttcctgcagaattgcttccacgtaaagggaccttcgggaaatttcgctggataccggctggcattgacaaacccagcgtccctgagccttgtgaggtttccaggcaggctgattgcgaggcaacatgtctgcttcggtgaaagaaagccttcagcttcagctactggagatggaaatgctgttttctatgtttcctaaccaaggagaagtaaaacttgaagatgtaaatgccctgacgaatataaagaggtatttggaaggcacaagggaggcgctgccaccaaaaatcgaatttgtaattacactccagattgaagagcccaaggtgaaaattgatttgcaagtgaccatgcctcacagctacccctatgtagcattgcagctgtttggacggtcatctgaacttgacagacatcagcagctacttctcaacaaaggtctcacttcttacatagggacttttgatccaggtgagctctgtgtatgtgcagcaatccagtggctacaggacaacagtgcatcttatttcctgaacagaaagcttgtatatgaaccatctacacaagcaaagccagtcaagaacacattcctccgaatgtggatctacagtcaccatatatatcagcaggacctaaggaaaaagattttggatgttgggaaaaggttagatgtgactggattttgcatgacaggaaagcctggtataatctgtgtggagggtttcaaagagcactgtgaggagttctggcacacaattaggtaccccaattggaagcacatttcctgtaagcatgctgaaagcgtggagacagaaggaaatggtgaggacctgcgccttttccattcttttgaagagttactccttgaggctcatggtgactatggattaaggaatgactatcacatgaatctgggccaattcttagaatttctcaagaagcacaaaagtgagcatgtttttcagatactatttggtattgaaagcaaaagttcagactcataaaaagcgattaagaggcctatgcctgtaatttcactaagtcagtatttctgttaataagaccaaattaaaaaggctagtggctgtgtagcatcctcagtgcaaaacccagctccagaattttcacctggtaacgaatttcaactgacagtgaaatgaataggcctttaaactttataacattgcaattgtgatgttatctctaggtttttgtgtgaagtcattcaaaaactatttcattgtaaattaataaaaacaatccatttaacttgtgaagctgatttgattgaagaggaatccaaagcccataactaacatcaaaaatcaaactgcaattatgaattgagaaatatgaatagcatttgtttcacattgctagcacacatgtgacacacccacttgtctttcattattggaaatctaaatcaagtttaaaatgagaacaggaaggacatgtttacttccttttttgagacggtgcgatctcggctcactgcatcctcagcttcccaggttcaagcgattctcctgcctcagcctcccaagtagctgggactacaggcgtgcgccaccacgcccagctaattgttatatttttagtagagacagggtttcatcatgttggctaggatggtctcaatctcttaacctcgtgatctgcctgcctcggccttccaaagtgctgggattacaggtgtgagccaccgcgcccagcccgtttacttcatttcttactttaaactcctatttcgagtgttttagtaaaactagatcctaatagcagtggcaaaggactcatagacatgaagtcccacgagttaaaagatgacacacaatgctatgtgttctggctgtttatatcagttcatgatactagcaatcctgataccagtattagtttaattcttatccagaaaagataaacacatggttccttgtctacaaagtattcgcctgtttcaatccaacctttgcctgtgtgccagtatgcattactataaagggcaagagactgttgaggggaccagtgtggatatctgcatcattaccttattgggaaaaaaaaaatctaattctacagtccgatgatgttactgccatctcctctgaaaattccaagctccacaggcttcaccaggcttttcaaaatgagagtttattttaatgattaaaaaccgctatttaagtagctcttgccaagccttttcattaccaggtctccatccctccccaagtatttctgcgagtctcatgtgctaagagatgtcttgagcagcctctgcagctttccgtgtttctgtggtcagctactgctgccctttcccgggaggcattccattctcctactgggtcctctcaagatgccaaagcttggtgctgggatttaggaacacatcctgttagatgtcagacagtgctgcttgtgctggggagcctacagaacttctgatgaaactaccatctggttttaccctctgtgccgtggatgcagacgtgtccttgggctacagagaggacatgatggagcaggaggccctatcccaaggaggtgttagaactgggtccactttgtactgcctctttcttcttaggtcacaatgagtgtcctctcagggcacaactcagatcttcaacccatggctcgctgtaggcctgccccgccaggtcctccagcttgccattcatgtttccatcctagccttggttgtgctggaactcaggctggagcctgacactttgcctatatgcaaagggaagaaataggacttacattgccaaggaatcacttcttaatgtttgccagcactaaaaacaacaaagtataggaatctttttcccccacagtctccacaaagctatcaataagtataattcgcatttacaagttttaggccttcaacagatgtaactccatccaaatgaatcaatatgtgccatcaacctaccttatagaggtgtttttcctgattacatgagcaaaagtagctacagaaagatgggtgtaaagaaaaggcaataaattctaggttatgaactctactgcttctggagctatttctgagatttttcagaacctacttttttataaataagtctaatttgagcattctgcaatactttttttcctatcaggaaaactaatgcagatagtattatggggacgtgtaggttttatagaaaaaaaaagtacatgtataattcaaaactcaactttgtatgtataggagtctgctggttgtttgcacagcctgatatgagcacataataaaagtccgtcattccccaaccccctccccctacacacacagcttattttgggaaactgccccttccctgtgtgatttgggaagagaaagtgataggaatcaagttgtcctctggcagcctcctggagagatggctgtgagctcttgctgcttaaacctctagtgccaccctcatttctgacctactgaatgctcagctgtttggcatttcctttgaatgacccagcatcttcccttttgttgtcggaaatcagaatcagtctctattgcttgtaacttaagaatctggatattctgtttattatattcttaaatggttatttggaaaatgtgctcatttataaaagttacagtgtctttttaaagtttgctgaagtaaatgaagcatatcgtcaa

SEQ ID NO: 178669 - DNA, 3094 bp, Homo sapiens
  Payload ID: 15207
  Gene Symbol: RWDD2B
  Gene Name: RWD domain containing 2B
  Uniprot ID: P57060
  ENST ID: ENST00000493196
  CDS Start-End: 102-1061
atgcgccgcatgctttttttttttttttccggtaggtcgccagctgaggcggtttgtaagttttgggtcgcagtatgctagaattttgaggctcccttctgatgaaaattgagctgtccatgcagccatggaacccgggttacagcagtgagggggccacggctcaagaaacttacacatgtccaaaaatgattgagatggagcaggcggaggcccagcttgctgagttagacctgctagccagtatgttccctggtgagaatgagctcatagtgaatgaccagctggctgtagcagaactgaaagattgtattgaaaagaagacaatggaggggcgatcttcaaaagtctactttactatcaatatgaacctggatgtatctgacgaaaaaatggcgatgttttctctggcctgtattcttccctttaaatacccggcagttctgcctgaaattactgtcagatcagtattattgagtagatcccagcagactcagctgaacacagatctgactgcattcctgcaaaaacattgtcatggagatgtttgtatactgaatgccacagagtgggttagagaacacgcctctggctatgtcagcagagatacttcatcttcacccaccacaggaagcacagtccagtcagttgacctcatcttcacgagactctggatctacagccatcatatctataacaaatgcaaaagaaagaatattctagagtgggcaaaggagctttccctgtctgggtttagcatgcctggaaaacctggtgttgtttgtgtggaaggcccacaaagtgcctgtgaagaattctggtcaagactcagaaaattaaactggaagagaattttaattcgccatcgagaagacattccttttgatggtacaaatgatgaaacggaaagacaaaggaaattttccatttttgaagaaaaagtgttcagtgttaatggagccaggggaaaccacatggactttggtcagctctatcagttcttaaacaccaaaggatgtggggatgttttccagatgttctttggtgtagaaggacaatgacatcaagagtagttgaaagtatcttgccactgttggccttttgatttttttttcccactttttcttgaaagattaagtaattttattttagttccattctagaatgttggggagtggggcacaagaaaaaatagtatagctgaaatgcatctgttaaaaatgtcatgattgaaagcagaactgagtttcaaattacaaccttaaaattgttgttagatatttcttcacatatcagctgcccattttgaaaaagaaattatccataaaggtaatgttggtgctccaatttgccagccattcccaacccccttctcccttacctgccttcactaaagaacccagaaaagctaattgctcccctttcagcctctgttgcaactaacaactctcagtggcctcaggacacagctttggccttgggaattctgggaaaacttttacttcctgattaaagatacatatgcagctaggccacctcctcccccccttactgccataaacaccaaagtgatgactggagctggaggagttatttgaaccacgacgaagggccaagagaaccacgaagatgccagttgccacattgttgagctgctgacccaacaccagccattgcctgtctctaaacatcttatgaaataaaaccagttttgtttaatttctaggctttttttttaaatagacggagtcttgctctgtcgcccgggctagagtgcaatggtgcaacctccgctcactgcaacctccgcctcccaagttcaagcgattctcctgcctcagcctcccaagtagctgagattacaggcgcccgccaccatgcctggctaatttttgtgttttttagtagagacagggtgtcaccattttggccaggctggtcttgaactcctgacctcaggtgatcctcccacctcggcttcccaatgtgcttggattacaggcataagccaccgtgcctggccaatatctaggctttttactagcagttgaaagctagtttgtcaaatagagtttttcagagctttagttttgcatttaccccagccttttgatacacaaataggtgaagtttttctgaagtggagtttgcagttccccactttttgtatactcacgctctgcccctgctcctgggcttgcctcagacaaggctgaggcattagtagggcttaaacttttttaacaagcctcaacaattcatcaaattagtaatttagaaaatttgtttggcaaattgtattctgacattttttgttctggaaatggctttctgtacatttatttttgccaaattgacctagcattaaataaacacaccacccagtttttgaggacctccataaaccagttagttccaaaagcatttattatttgctaatttgctagcatgcaggttgatgcaggttgataccaggtgttggatatttcttgaccagtcagacttggttaaggaatggagttggggtgagagacaatgcattaagttagtaaaaggttgtaggcaaactatgcttatcacaaaatgaatcagttagtaaaagacagcatatattatgtaatacaatgtagaaatctgaaggaataaaatggaagaaggcaatgtggatagatcttaaatataaaggtggttaaacataaatgagaatcagaatggtatttaaagcacagtgcttgtattggacctaaatcttatgtacgtccccagatttcctccctgctgccctgtcctatcgccccgtcagttgccctggaaatcccagttcctctgctgccaccagacagccaggtggaccagttgtgtgtctagtttctgattcctccagcgactaacagatttgtatgaaataccctacagagaatggaatctgacatccctaccaccaaagggggcagatgatgcatatattactttaagcagctaaagtggcagctaaactgctaaaactttttcagtctctctacattatattaaaaaccagattgctatgtataatatgcagatctcaaatgtcacataaacacatagaatgcaa

SEQ ID NO: 178670 - DNA, 1078 bp, Homo sapiens
  Payload ID: 15208
  Gene Symbol: RWDD3
  Gene Name: RWD domain containing 3
  Uniprot ID: Q9Y3V2
  ENST ID: ENST00000263893
  CDS Start-End: 21-608
aggcggtggggcccacagccatggcggagcctgtgcaggaggagctctcggtcctggccgcgattttctgcaggccccacgagtgggaggtgctgagccgctcagagacagatgggaccgtgttcagaattcacacaaaagctgaaggatttatggatgtggatatacctctggaattggtgttccatttgccagtcaattatccttcatgtctacctggtatctcgattaactctgaacagttgaccagggcccagtgtgtgactgtgaaagagaatttacttgagcaagcagagagccttttgtcggagcctatggttcatgagctggttctctggattcagcagaatctcaggcatatcctcagccaaccagaaactggcagtggcagtgaaaagtgtactttttcaacaagcacgaccatggatgatggattgtggataactcttttgcatttagatcacatgagagcaaagactaaatatgtcaaaattgtggagaagtgggcttcagatttaaggctgacaggaagactgatgttcatgggtaaaataatactgattttactacagggagacagaaacaacctcaaggtgccaaaaagttaaatgtttctggcatttgaagtcaaagagtattcagcgttggatgaattacaaaaggaatttgaaactgcaggacttaagaagcttttctccgaatttgtacttgctctggtaaaatgaaatggaagacaggaatcttttagtaaaatagcagtgttttttgttgtttttgcattggatttggggagtggttaattgaaatagtcaattttaaagtttctctgaagcaaaatgataggcatcattctaacttcaggaacaaaagccagttctgttttatgaaatattaaacatgaagaaaacttgtatattctaatgtttgccaggaaaggctaggttcagtagatgagacattatttaaaagataaatttaaaaagatggtaaatgaacacttgtttttatagacaatatttgtttgaaactatgtaattttctggctaattttcttgtaattaaatgattttttaaaaaa

SEQ ID NO: 178671 - DNA, 1235 bp, Homo sapiens
  Payload ID: 15208
  Gene Symbol: RWDD3
  Gene Name: RWD domain containing 3
  Uniprot ID: Q9Y3V2
  ENST ID: ENST00000370202
  CDS Start-End: 77-880
agtgctgctcctggccggtggaggcggcggctgcggcagcggaaggggaagcgctgaggcggtggggcccacagccatggcggagcctgtgcaggaggagctctcggtcctggccgcgattttctgcaggccccacgagtgggaggtgctgagccgctcagagacagatgggaccgtgttcagaattcacacaaaagctgaaggatttatggatgtggatatacctctggaattggtgttccatttgccagtcaattatccttcatgtctacctggtatctcgattaactctgaacagttgaccagggcccagtgtgtgactgtgaaagagaatttacttgagcaagcagagagccttttgtcggagcctatggttcatgagctggttctctggattcagcagaatctcaggcatatcctcagccaaccagaaactggcagtggcagtgaaaagtgtactttttcaacaagcacgaccatggatgatggattgtggataactcttttgcatttagatcacatgagagcaaagactaaatatgtcaaaattgtggagaagtgggcttcagatttaaggctgacaggaagactgatgttcatgggtaaaataatactgattttactacagggagacagaaacaacctcaaggagtacttgattcttcagaaaacctccaaagtagatgtggactcaagtggaaagaaatgcaaagagaaaatgattagtgtactgtttgaaacaaaagtacagacagaacacaaaaggtttctggcatttgaagtcaaagagtattcagcgttggatgaattacaaaaggaatttgaaactgcaggacttaagaagcttttctccgaatttgtacttgctctggtaaaatgaaatggaagacaggaatcttttagtaaaatagcagtgttttttgttgtttttgcattggatttggggagtggttaattgaaatagtcaattttaaagtttctctgaagcaaaatgataggcatcattctaacttcaggaacaaaagccagttctgttttatgaaatattaaacatgaagaaaacttgtatattctaatgtttgccaggaaaggctaggttcagtagatgagacattatttaaaagataaatttaaaaagatggtaaatgaacacttgtttttatagacaatatttgtttgaaactatgtaattttctggctaattttcttgtaattaaatgattttttaaaaaaga

SEQ ID NO: 178672 - DNA, 2590 bp, Homo sapiens
  Payload ID: 15209
  Gene Symbol: RWDD4
  Gene Name: RWD domain containing 4
  ENST ID: ENST00000327570
  CDS Start-End: 227-790
aggccccaccagccgcggctccggctcgtagcccacagcccactgccggcggctgggcgctgccgaggctcggggcgcgcgcagttggcgtctgccagtgccaagactgtgccgcccccacagccgaggcgcgaaagggggacgcccggcctctgggccgctgccttcgctttctcttcgttgttgcgaacgccgtccgctcaggaggcgccccgcgaccggcgcgatgagtgccaacgaggaccaggagatggaactagaagcattacgctctatttatgaaggagatgaaagtttccgggaattaagtccagtttcttttcaatataggataggtgaaaatggtgatcccaaagccttcttaatagagatttcctggacagaaacatatccccaaacacctccaattctatctatgaacgctttttttaacaacaccatatcatcagctgtaaagcagagtatattagccaagctacaggaagcagtagaagctaatcttggaaccgctatgacctatacattgtttgaatatgccaaagacaataaagagcagttcatggagaatcacaatcccatcaattccgcaacatcgataagcaatatcatctcaattgaaactcctaatacagccccatcaagtaagaaaaaagacaaaaaagaacaactttcaaaagcccagaagcgtaagctggcagacaaaacagatcacaaaggagaacttcctcgaggctggaactgggttgatgttgtgaagttaagcaaaactggctctaaggatgatgagtagcacttggaatttgagacaaggaaagagcattctttaaagagtaaaactgggttcaaaatctttcattactattttctggtattgaggcgactttttataaaacacaattttttgtatgtttcttacattaaaaaggttgtaagttgaaagttcatgaagagatcttgttgtattaaattattttcacaaacttgccttaataaaaggtgaaaatgttactgtttagtatactttatgaagccccttgagctttataaatggacaggcatggggaataagaatcagtgttaatttaaatgatcttatcctggtggatgtgctattttcttaaaggagtatgaagcccttttcaaactatcatcccagtggagcggagtactcagtgaacagttactccatagtgcaatccatattaataggcttcttctcttaagtcttcatctcttcttttgcttaattactgaaccgtaaattacttcagagaaatttaaatgctggtatttgaactttatacatgatactttttgtagtttcttttaatttttgaaagatgaactgcttccttttaataaattaatatctatttatacttttctcttgatttgggtcaagatgtttgatcatgagtgctttgagtggtatgtggaataggagaatataaaaacaaatctgccaaatacactagaaagcattttagtaagaaatgctggccctttcttaaaacatttctcttgcatataccaggatgggagtaaaagatgccttaatatttagtttttgtattgttggagacattgattttaataaaatcctatttatctgctgttgtgtgcttttagttgttggataactgaggtctcctaaatggttcaacataaaaccacatttcaagtcttgtttctttttggagtgtcttttcaagtattcaaatgtatttctcaacctgagcatctttttaatcatatacatgggagtcttttaaatgctgaactgttacacatgcttgatttaaaaataataataatagaggaaactattggtctagttgtgccaagaaaagtttctgatgtttatgtgtgatgtacagtgattttgtatatgcgcccagctttaagaacacataaaactattacgtctggtaggaagattgttagtgcctcaagttacacctgtgcagcttgggtctgagttttgatagaacagtaaacatttaaagaagttaagagcagtttgagctgtatccgcggtttttactcgttaactgacttcagctaaatagtttgaattatagagtaagtataattacagcaaaggagttaatctcattttcaaagctgtttctcattttatttcttgaattaatgtagagcaaaacatgttaaaattcaggaccactggaatatggcaacttatgtttcagggttgtgtgtgggtagtatttgtggttgtattggtttgttttttgtttttggagaaacatctgctagtggaataaaatactttgttttgctctgaagagactgaaattgttcaggcttattatggctcatagattacagagaatgatgctagttacatgccaatgaactatttttactctttttatatgaaatgtaaaaatttgtaggggttctggtgatggtggtacctcttattaccttatgtaaaacacttgaacagcctcatcaatattgccgtcatctgtttaacactcccagtatattttctcaatgtctgtttacttaaaattttgtggagtgacataattaataagcaataaagtctgaattatacacagcg

SEQ ID NO: 178673 - DNA, 2641 bp, Homo sapiens
  Payload ID: 15209
  Gene Symbol: RWDD4
  Gene Name: RWD domain containing 4
  Uniprot ID: Q6NW29
  ENST ID: ENST00000326397
  CDS Start-End: 274-840
gaactttacgccgctcctccaagcgtcagggagacgctgcacttcccaggccccaccagccgcggctccggctcgtagcccacagcccactgccggcggctgggcgctgccgaggctcggggcgcgcgcagttggcgtctgccagtgccaagactgtgccgcccccacagccgaggcgcgaaagggggacgcccggcctctgggccgctgccttcgctttctcttcgttgttgcgaacgccgtccgctcaggaggcgccccgcgaccggcgcgatgagtgccaacgaggaccaggagatggaactagaagcattacgctctatttatgaaggagatgaaagtttccgggaattaagtccagtttcttttcaatataggataggtgaaaatggtgatcccaaagccttcttaatagagatttcctggacagaaacatatccccaaacacctccaattctatctatgaacgctttttttaacaacaccatatcatcagctgtaaagcagagtatattagccaagctacaggaagcagtagaagctaatcttggaaccgctatgacctatacattgtttgaatatgccaaagacaataaagagcagttcatggagaatcacaatcccatcaattccgcaacatcgataagcaatatcatctcaattgaaactcctaatacagccccatcaagtaagaaaaaagacaaaaaagaacaactttcaaaagcccagaagcgtaagctggcagacaaaacagatcacaaaggagaacttcctcgaggctggaactgggttgatgttgtgaagcatttaagcaaaactggctctaaggatgatgagtagcacttggaatttgagacaaggaaagagcattctttaaagagtaaaactgggttcaaaatctttcattactattttctggtattgaggcgactttttataaaacacaattttttgtatgtttcttacattaaaaaggttgtaagttgaaagttcatgaagagatcttgttgtattaaattattttcacaaacttgccttaataaaaggtgaaaatgttactgtttagtatactttatgaagccccttgagctttataaatggacaggcatggggaataagaatcagtgttaatttaaatgatcttatcctggtggatgtgctattttcttaaaggagtatgaagcccttttcaaactatcatcccagtggagcggagtactcagtgaacagttactccatagtgcaatccatattaataggcttcttctcttaagtcttcatctcttcttttgcttaattactgaaccgtaaattacttcagagaaatttaaatgctggtatttgaactttatacatgatactttttgtagtttcttttaatttttgaaagatgaactgcttccttttaataaattaatatctatttatacttttctcttgatttgggtcaagatgtttgatcatgagtgctttgagtggtatgtggaataggagaatataaaaacaaatctgccaaatacactagaaagcattttagtaagaaatgctggccctttcttaaaacatttctcttgcatataccaggatgggagtaaaagatgccttaatatttagtttttgtattgttggagacattgattttaataaaatcctatttatctgctgttgtgtgcttttagttgttggataactgaggtctcctaaatggttcaacataaaaccacatttcaagtcttgtttctttttggagtgtcttttcaagtattcaaatgtatttctcaacctgagcatctttttaatcatatacatgggagtcttttaaatgctgaactgttacacatgcttgatttaaaaataataataatagaggaaactattggtctagttgtgccaagaaaagtttctgatgtttatgtgtgatgtacagtgattttgtatatgcgcccagctttaagaacacataaaactattacgtctggtaggaagattgttagtgcctcaagttacacctgtgcagcttgggtctgagttttgatagaacagtaaacatttaaagaagttaagagcagtttgagctgtatccgcggtttttactcgttaactgacttcagctaaatagtttgaattatagagtaagtataattacagcaaaggagttaatctcattttcaaagctgtttctcattttatttcttgaattaatgtagagcaaaacatgttaaaattcaggaccactggaatatggcaacttatgtttcagggttgtgtgtgggtagtatttgtggttgtattggtttgttttttgtttttggagaaacatctgctagtggaataaaatactttgttttgctctgaagagactgaaattgttcaggcttattatggctcatagattacagagaatgatgctagttacatgccaatgaactatttttactctttttatatgaaatgtaaaaatttgtaggggttctggtgatggtggtacctcttattaccttatgtaaaacacttgaacagcctcatcaatattgccgtcatctgtttaacactcccagtatattttctcaatgtctgtttacttaaaattttgtggagtgacataattaataagcaataaagtctgaattatacacagcga

SEQ ID NO: 178674 - DNA, 805 bp, Homo sapiens
  Payload ID: 15209
  Gene Symbol: RWDD4
  Gene Name: RWD domain containing 4
  ENST ID: ENST00000514322
  CDS Start-End: 252-413
gcgtcagggagacgctgcacttcccaggccccaccagccgcggctccggctcgtagcccacagcccactgccggcggctgggcgctgccgaggctcggggcgcgcgcagttggcgtctgccagtgccaagactgtgccgcccccacagccgaggcgcgaaagggggacgcccggcctctgggccgctgccttcgctttctcttcgttgttgcgaacgccgtccgctcaggaggcgccccgcgaccggcgcgatgagtgccaacgaggaccaggagatggaactagaagcattacgctctatttatgaaggagatgaaagtttccgggaattaagtccagtttcttttcaatataggatcatcagctgtaaagcagagtatattagccaagctacaggaagcagtagaagctaatcttggaaccgctatgacctatacattgtttgaatatgccaaagacaataaagagcagttcatggagaatcacaatcccatcaattccgcaacatcgataagcaatatcatctcaattgaaactcctaatacagccccatcaagtaagaaaaaagacaaaaaagaacaactttcaaaagcccagaagcgtaagctggcagacaaaacagatcacaaaggagaacttcctcgaggctggaactgggttgatgttgtgaagcatttaagcaaaactggctctaaggatgatgagtagcacttggaatttgagacaaggaaagagcattctttaaagagtaaaactgggttcaaaatctttcattactattttctggtattgaggcgacttttta

SEQ ID NO: 178675 - DNA, 264 bp, Homo sapiens
  Payload ID: 15209
  Gene Symbol: RWDD4
  Gene Name: RWD domain containing 4
  ENST ID: ENST00000506467
  CDS Start-End: 136-264
tgtggtaagtatctaaggttatataagttagtcaagcttttacatagttgagtgggcttgaatgagaaagtaaagaccctctatttctaattcatttataccactaaacaaaactcattcagttctttatttcagatggaactagaagcattacgctctatttatgaaggagatgaaagtttccgggaattaagtccagtttcttttcaatataggataggtgaaaatggtgatcccaaagccttcttaatagagatttcctgg

SEQ ID NO: 178676 - DNA, 1393 bp, Homo sapiens
  Payload ID: 15209
  Gene Symbol: RWDD4
  Gene Name: RWD domain containing 4
  ENST ID: ENST00000512740
  CDS Start-End: 309-686
ggctcgtagcccacagcccactgccggcggctgggcgctgccgaggctcggggcgcgcgcagttggcgtctgccagtgccaagactgtgccgcccccacagccgaggcgcgaaagggggacgcccggcctctgggccgctgccttcgctttctcttcgttgttgcgaacgccgtccgctcaggaggcgccccgcgaccggcgcgatgagtgccaacgaggaccaggaggtgaaaatggtgatcccaaagccttcttaatagagatttcctggacagaaacatatccccaaacacctccaattctatctatgaacgctttttttaacaacaccatatcatcagctgtaaagcagagtatattagccaagctacaggaagcagtagaagctaatcttggaaccgctatgacctatacattgtttgaatatgccaaagacaataaagagcagttcatggagaatcacaatcccatcaattccgcaacatcgataagcaatatcatctcaattgaaactcctaatacagccccatcaagtaagaaaaaagacaaaaaagaacaactttcaaaagcccagaagcgtaagctggcagacaaaacagatcacaaaggagaacttcctcgaggctggaactgggttgatgttgtgaagcatttaagcaaaactggctctaaggatgatgagtagcacttggaatttgagacaaggaaagagcattctttaaagagtaaaactgggttcaaaatctttcattactattttctggtattgaggcgactttttataaaacacaattttttgtatgtttcttacattaaaaaggttgtaagttgaaagttcatgaagagatcttgttgtattaaattattttcacaaacttgccttaataaaaggtgaaaatgttactgtttagtatactttatgaagccccttgagctttataaatggacaggcatggggaataagaatcagtgttaatttaaatgatcttatcctggtggatgtgctattttcttaaaggagtatgaagcccttttcaaactatcatcccagtggagcggagtactcagtgaacagttactccatagtgcaatccatattaataggcttcttctcttaagtcttcatctcttcttttgcttaattactgaaccgtaaattacttcagagaaatttaaatgctggtatttgaactttatacatgatactttttgtagtttcttttaatttttgaaagatgaactgcttccttttaataaattaatatctatttatacttttctcttgatttgggtcaagatgtttgatcatgagtgctttgagtggtatgtggaataggagaatataaaaacaaatctgccaaatacactagaaagcattttagtaagaaatgc

SEQ ID NO: 178677 - DNA, 1551 bp, Homo sapiens
  Payload ID: 15209
  Gene Symbol: RWDD4
  Gene Name: RWD domain containing 4
  Uniprot ID: Q6NW29
  ENST ID: ENST00000510968
  CDS Start-End: 294-575
gtagcccacagcccactgccggcggctgggcgctgccgaggctcggggcgcgcgcagttggcgtctgccagtgccaagactgtgccgcccccacagccgaggcgcgaaagggggacgcccggcctctgggccgctgccttcgctttctcttcgttgttgcgaacgccgtccgctcaggaggcgccccgcgaccggcgcgatgagtgccaacgaggaccaggagatcatcagctgtaaagcagagtatattagccaagctacaggaagcagtagaagctaatcttggaaccgctatgacctatacattgtttgaatatgccaaagacaataaagagcagttcatggagaatcacaatcccatcaattccgcaacatcgataagcaatatcatctcaattgaaactcctaatacagccccatcaagtaagaaaaaagacaaaaaagaacaactttcaaaagcccagaagcgtaagctggcagacaaaacagatcacaaaggagaacttcctcgaggctggaactgggttgatgttgtgaagcatttaagcaaaactggctctaaggatgatgagtagcacttggaatttgagacaaggaaagagcattctttaaagagtaaaactgggttcaaaatctttcattactattttctggtattgaggcgactttttataaaacacaattttttgtatgtttcttacattaaaaaggttgtaagttgaaagttcatgaagagatcttgttgtattaaattattttcacaaacttgccttaataaaaggtgaaaatgttactgtttagtatactttatgaagccccttgagctttataaatggacaggcatggggaataagaatcagtgttaatttaaatgatcttatcctggtggatgtgctattttcttaaaggagtatgaagcccttttcaaactatcatcccagtggagcggagtactcagtgaacagttactccatagtgcaatccatattaataggcttcttctcttaagtcttcatctcttcttttgcttaattactgaaccgtaaattacttcagagaaatttaaatgctggtatttgaactttatacatgatactttttgtagtttcttttaatttttgaaagatgaactgcttccttttaataaattaatatctatttatacttttctcttgatttgggtcaagatgtttgatcatgagtgctttgagtggtatgtggaataggagaatataaaaacaaatctgccaaatacactagaaagcattttagtaagaaatgctggccctttcttaaaacatttctcttgcatataccaggatgggagtaaaagatgccttaatatttagtttttgtattgttggagacattgattttaataaaatcctatttatctgctgttgtgtgcttttagttgttggataactgaggtctcctaaatggttcaacataaaaccacatttcaagtcttgtttctttttggagtgtcttttcaagtattcaaatgtatttctcaacctgagcatctttttaatcatatacatgggagtc

SEQ ID NO: 178678 - DNA, 1620 bp, Homo sapiens
  Payload ID: 15209
  Gene Symbol: RWDD4
  Gene Name: RWD domain containing 4
  ENST ID: ENST00000510702
  CDS Start-End: 250-384
gtcagggagacgctgcacttcccaggccccaccagccgcggctccggctcgtagcccacagcccactgccggcggctgggcgctgccgaggctcggggcgcgcgcagttggcgtctgccagtgccaagactgtgccgcccccacagccgaggcgcgaaagggggacgcccggcctctgggccgctgccttcgctttctcttcgttgttgcgaacgccgtccgctcaggaggcgccccgcgaccggcgcgatgagtgccaacgaggaccaggagatggaactagaagcattacgctctatttatgaaggagatgaaagtttccgggaattaagtccagtttcttttcaatatagggtgaaaatggtgatcccaaagccttcttaatagagatttcctggacagaaacatatccccaaacacctccaattctatctatgaacgctttttttaacaacaccatatcatcagctgtaaagcagagtatattagccaagctacaggaagcagtagaagctaatcttggaaccgctatgacctatacattgtttgaatatgccaaagacaataaagagcagttcatggagaatcacaatcccatcaattccgcaacatcgataagcaatatcatctcaattgaaactcctaatacagccccatcaagtaagaaaaaagacaaaaaagaacaactttcaaaagcccagaagcgtaagctggcagacaaaacagatcacaaaggagaacttcctcgaggctggaactgggttgatgttgtgaagcatttaagcaaaactggctctaaggatgatgagtagcacttggaatttgagacaaggaaagagcattctttaaagagtaaaactgggttcaaaatctttcattactattttctggtattgaggcgactttttataaaacacaattttttgtatgtttcttacattaaaaaggttgtaagttgaaagttcatgaagagatcttgttgtattaaattattttcacaaacttgccttaataaaaggtgaaaatgttactgtttagtatactttatgaagccccttgagctttataaatggacaggcatggggaataagaatcagtgttaatttaaatgatcttatcctggtggatgtgctattttcttaaaggagtatgaagcccttttcaaactatcatcccagtggagcggagtactcagtgaacagttactccatagtgcaatccatattaataggcttcttctcttaagtcttcatctcttcttttgcttaattactgaaccgtaaattacttcagagaaatttaaatgctggtatttgaactttatacatgatactttttgtagtttcttttaatttttgaaagatgaactgcttccttttaataaattaatatctatttatacttttctcttgatttgggtcaagatgtttgatcatgagtgctttgagtggtatgtggaataggagaatataaaaacaaatctgccaaatacactagaaagcattttagtaagaaatgctggccctttcttaaaacatttctcttgcatataccaggatgggagtaaaagatgccttaatatttagtttttgtattgttggagacattgattttaataaa

SEQ ID NO: 178679 - DNA, 15377 bp, Homo sapiens
  Payload ID: 15210
  Gene Symbol: RYR1
  Gene Name: ryanodine receptor 1 (skeletal)
  Uniprot ID: P21817
  ENST ID: ENST00000355481
  CDS Start-End: 132-15233
atctacctcgcgggtgcctctggtgtctccagaggtctccgaccccagcccgcccccagccctcccgcccagcccgcagccccctccctctgttccccgacctcagaccctgggcttccgacctcgacatcatgggtgacgcagaaggcgaagacgaggtccagttcctgcggacggacgatgaggtggtcctgcagtgcagcgctaccgtgctcaaggagcagctcaagctctgcctggccgccgagggcttcggcaaccgcctgtgcttcctggagcccactagcaacgcgcagaatgtgccccccgatctggccatctgttgcttcgtcctggagcagtccctgtctgtgcgagccctgcaggagatgctggctaacacggtggaggctggcgtggagtcatcccagggcgggggacacaggacgctcctgtatggccatgccatcctgctccggcatgcacacagccgcatgtatctgagctgcctcaccacctcccgctccatgactgacaagctggccttcgatgtgggactgcaggaggacgcaacaggagaggcttgctggtggaccatgcacccagcctccaagcagaggtctgaaggagaaaaggtccgcgttggggatgacatcatccttgtcagtgtctcctccgagcgctacctgcacctgtcgaccgccagtggggagctccaggttgacgcttccttcatgcagacactatggaacatgaaccccatctgctcccgctgcgaagagggcttcgtgacgggaggtcacgtcctccgcctctttcatggacatatggatgagtgtctgaccatttcccctgctgacagtgatgaccagcgcagacttgtctactatgaggggggagctgtgtgcactcatgcccgctccctctggaggctggagccactgagaatcagctggagtgggagccacctgcgctggggccagccactccgagtccggcatgtcactaccgggcagtacctagcgctcaccgaggaccagggcctggtggtggttgacgccagcaaggctcacaccaaggctacctccttctgcttccgcatctccaaggagaagctggatgtggcccccaagcgggatgtggagggcatgggcccccctgagatcaagtacggggagtcactgtgcttcgtgcagcatgtggcctcaggactgtggctcacctatgctgctccagaccccaaggccctgcggctcggcgtgctcaagaagaaggccatgctgcaccaggagggccacatggacgacgcactgtcgctgacccgctgccagcaggaggagtcccaggccgcccgcatgatccacagcaccaatggcctatacaaccagttcatcaagagcctggacagcttcagcgggaagccacggggctcggggccacccgctggcacggcgctgcccatcgagggcgttatcctgagcctgcaggacctcatcatctacttcgagcctccctccgaggacttgcagcacgaggagaagcagagcaagctgcgaagcctgcgcaaccgccagagcctcttccaggaggaggggatgctctccatggtcctgaattgcatagaccgcctaaatgtctacaccactgctgcccactttgctgagtttgcaggggaggaggcagccgagtcctggaaagagattgtgaatcttctctatgaactcctagcttctctaatccgtggcaatcgtagcaactgtgccctcttctccacaaacttggactggctggtcagcaagctggatcggctggaggcctcgtctggcatcctggaggtcctgtactgtgtcctcattgagagtccagaggttctgaacatcatccaggagaatcacatcaagtccatcatctccctcctggacaagcatgggaggaaccacaaggtcctggacgtgctatgctccctgtgtgtgtgtaatggtgtggctgtacgctccaaccaagatcttattactgagaacttgctgcctggccgtgagcttctgctgcagacaaacctcatcaactatgtcaccagcatccgccccaacatctttgtgggccgagcggaaggcaccacgcagtacagcaaatggtactttgaggtgatggtggacgaggtgactccatttctgacagctcaggccacccacttgcgggtgggctgggccctcaccgagggctacaccccctaccctggggccggcgagggctggggcggcaacggggtcggcgatgacctctattcctacggctttgatggactgcatctctggacaggacacgtggcacgcccagtgacttccccagggcagcacctcctggcccctgaagacgtgatcagctgctgcctggacctcagcgtgccgtccatctccttccgcatcaacggctgccccgtgcagggtgtctttgagtccttcaacctggacgggctcttcttccctgttgtcagcttctcggctggtgtcaaggtgcggttcctccttggtggccgccatggtgaattcaagttcctgcccccacctggctatgctccatgccatgaggctgtgctccctcgagagcgactccatcttgaacccatcaaggagtatcgacgggaggggccccgggggcctcacctggtgggccccagtcgctgcctctcacacaccgacttcgtgccctgccctgtggacactgtccagattgtcctgccgccccatctggagcgcattcgggagaagctggcggagaacatccacgagctctgggcgctaacccgcatcgagcagggctggacctacggcccggttcgggatgacaacaagaggctgcacccgtgtcttgtggacttccacagccttccagagcctgagaggaactacaacctgcagatgtctggggagacgctcaagactctgctggctctgggctgccacgtgggcatggcggatgagaaggcggaggacaacctgaagaagacaaaactccccaagacgtatatgatgagcaatgggtacaagccggctccgctggacctgagccacgtgcggctgacgccggcgcagacgacactggtggaccgtctggcagaaaatgggcacaacgtgtgggcccgagaccgcgtgggccagggctggagctacagcgcagtgcaggacatcccagcgcgccgaaaccctcggctggtgccctaccgcctgctggatgaagccaccaagcgcagcaaccgggacagcctctgccaggccgtgcgcaccctcctgggctacggctacaacatcgagcctcctgaccaggagcccagtcaggtggagaaccagtctcgttgtgaccgggtgcgcatcttccgggcagagaaatcctatacagtgcagagcggccgctggtacttcgagtttgaagcagtcaccacaggcgagatgcgcgtgggctgggcgaggcccgagctgaggcctgatgtagagctgggagctgacgagctggcctatgtcttcaatgggcaccgcggccagcgctggcacttgggcagtgaaccatttgggcgcccctggcagccgggcgatgtcgttggctgtatgatcgacctcacagagaacaccattatcttcaccctcaatggcgaggtcctcatgtctgactcaggctccgaaacagccttccgggagattgagattggggacggcttcctgcccgtctgcagcttgggacctggccaggtgggtcatctgaacctgggccaggacgtgagctctctgaggttctttgccatctgtggcctccaggaaggcttcgagccatttgccatcaacatgcagcgcccagtcaccacctggttcagcaaaggcctgccccagtttgagccagtgccccttgaacaccctcactatgaggtatcccgagtggacggcactgtggacacgcccccctgcctgcgcctgacccaccgcacctggggctcccagaacagcctggtggagatgcttttcctgcggctgagcctcccagtccagttccaccagcacttccgctgcactgcaggggccaccccgctggcacctcctggcctgcagccccccgccgaggacgaggcccgggcggcggaacccgaccctgactacgaaaacctgcgccgctcagctgggggctggagcgaggcagagaacggcaaagaagggactgcgaaggagggcgcccccgggggcaccccgcaggcggggggagaggcgcagcccgccagggcggagaatgagaaggatgccaccaccgagaagaacaagaagagaggcttcttattcaaggccaagaaggtcgccatgatgacccagccaccggccacccccacgctgccccgactccctcacgacgtggtgcctgcagacaaccgcgatgaccccgagatcatcctcaacaccaccacgtactattactccgtgagggtctttgctggacaggagcccagctgcgtgtgggcgggctgggtcacccctgactaccatcagcacgacatgagcttcgacctcagcaaggtccgggtcgtgacggtgaccatgggggatgaacaaggcaacgtccacagcagcctcaagtgtagcaactgctacatggtgtggggcggagactttgtgagtcccgggcagcagggccggatcagccacacggaccttgtcattgggtgcctggtggacttggccactggcttaatgacctttacagccaatggcaaagagagcaacacctttttccaggtggaacccaacactaagctatttcctgccgtcttcgtcctgcccacccaccagaacgtcatccagtttgagctggggaagcagaagaacatcatgccgttgtcagccgccatgttccaaagcgagcgcaagaacccggccccgcagtgcccaccgcggctggagatgcagatgctgatgccagtgtcctggagccgcatgcccaaccacttcctgcaggtggagacgaggcgtgccggcgagcggctgggctgggccgtgcagtgccaggagccgctgaccatgatggcgctgcacatccccgaggagaaccggtgcatggacatcctggagctgtcggagcgcctggacctgcagcgcttccactcgcacaccctgcgcctctaccgcgctgtgtgcgccctgggcaacaatcgcgtggcgcacgctctgtgcagccacgtagaccaagctcagctgctgcacgccctggaggacgcgcacctgccaggcccactgcgcgcaggctactatgacctcctcatcagcatccacctcgaaagtgcctgccgcagccgccgctccatgctctctgaatacatcgtgcccctcacgcctgagacccgcgccatcacgctcttccctcctggaaggagcacagaaaatggtcacccccggcatggcctgccgggagttggagtcaccacttcgctgaggcccccgcatcatttctcgcccccctgtttcgtggccgctctgccagctgctggggcagcagaggccccggcccgcctcagccctgccatcccgctggaggccctgcgggacaaggcactgaggatgctgggggaggcggtgcgcgacggtgggcagcacgctcgcgaccccgtcgggggctccgtggagttccagtttgtgcctgtgctcaagctcgtgtccaccctgctggtgatgggcatctttggcgatgaggatgtgaaacagatcttgaagatgattgagcctgaggtcttcactgaggaagaagaggaggaggacgaggaggaagagggtgaagaggaagatgaggaggagaaggaggaggatgaggaggaaacagcacaggaaaaggaagatgaggaaaaagaggaagaggaggcagcagaaggggagaaagaagaaggcttggaggaagggctgctccagatgaagttgccagagtctgtgaagttacagatgtgccacctgctggagtatttctgtgaccaagagctgcagcaccgtgtggagtccctggcagcctttgcggagcgctatgtggacaagctccaggccaaccagcggagccgctatggcctcctcataaaagccttcagcatgaccgcagcagagactgcaagacgtacccgcgagttccgctccccaccccaggaacagatcaatatgctattgcaattcaaagatggtacagatgaggaagactgtcctctccctgaagagattcgacaggatttgcttgactttcatcaagacctgctggcacactgtggaattcagctagatggagaggaggaggaaccagaggaagagaccaccctgggcagccgcctcatgagcctgttggagaaagtgcggctggtgaagaagaaggaagagaaacctgaggaggagcggtcagcagaggagagcaaaccccggtccctgcaggagctggtgtcccacatggtggtgcgctgggcccaagaggacttcgtgcagagccccgagctggtgcgggccatgttcagcctcctgcaccggcagtacgacgggctgggtgagctgctgcgtgccctgccgcgggcgtacaccatctcaccgtcctccgtggaagacaccatgagcctgctcgagtgcctcggccagatccgctcgctgctcatcgtgcagatgggcccccaggaggagaacctcatgatccagagcatcgggaacatcatgaacaacaaagtcttctaccaacacccgaacctgatgagggcgctgggcatgcacgagacggtcatggaggtcatggtcaacgtcctcgggggcggcgagtccaaggagatccgcttccccaagatggtgacaagctgctgccgcttcctctgctatttctgccgaatcagccggcagaaccagcgctccatgtttgaccacctgagctacctgctggagaacagtggcatcggcctgggcatgcagggctccacgcccctggacgtggctgctgcctccgtcattgacaacaatgagctggccttggcattgcaggagcaggacctggaaaaggttgtgtcctacctggcaggctgtggcctccagagctgccccatgcttgtggccaaagggtacccagacattggctggaacccctgtggtggagagcgctacctggacttcctgcgctttgctgtcttcgtcaacggcgagagcgtggaggagaacgccaatgtggtggtgcggctgctcatccggaagcctgagtgcttcggacccgccctgcggggtgagggtggctcagggctgctggctgccatcgaagaggccatccgcatctccgaggaccctgcgagggatggcccaggcatccgcagggaccggcggcgcgagcactttggtgaggaaccgcctgaagaaaaccgggtgcacctgggacacgccatcatgtccttctatgccgccttgatcgacctgctcggacgctgtgcaccagagatgcatctaatccaagccggcaagggtgaggccctgcggatccgcgccatcctccgctcccttgtgcccttggaggaccttgtgggcatcatcagcctcccactgcagattcccaccctgggcaaagatggggctctggtgcagccaaagatgtcagcatccttcgtgccggaccacaaggcgtccatggtgctcttcctggaccgtgtgtatggcatcgagaaccaggacttcttgctgcacgtgctggacgtggggttcctgcccgacatgagggcagccgcctcgctggacacggccactttcagcaccaccgagatggcgctggcgctgaaccgctacctgtgcctggccgtgctgccgctcatcaccaagtgtgcgccgctctttgcgggcacagaacaccgcgccatcatggtggactctatgctgcataccgtgtaccgcctgtctcggggtcgttcgctcaccaaggcgcagcgtgacgtcatcgaggactgcctcatgtcgctctgcaggtacatccgcccgtcgatgctgcagcacctgttgcgccgcctggtgttcgacgtgcccatcctcaacgagttcgccaagatgccactcaagctcctcaccaaccactatgagcgctgttggaagtactactgcctacccacgggctgggccaacttcggggtcacctcagaggaggagctgcacctcacacggaaactcttctggggcatctttgactctctggcccataagaaatacgacccggagctgtaccgcatggccatgccttgtctgtgcgccattgccggggctctgccccccgactatgtggatgcctcatactcatctaaggcagagaaaaaggccacagtggatgctgaaggcaactttgatccccggcctgtggagaccctcaatgtgatcatcccggagaagctggactccttcattaacaagtttgcggagtacacacacgagaagtgggccttcgacaagatccagaacaactggtcctatggagagaacatagacgaggagctgaagacccaccccatgctgaggccctacaagaccttttcagagaaggacaaagagatttaccgctggcccatcaaggagtccctgaaggccatgattgcctgggaatggacgatagagaaggccagggagggtgaggaggagaagacggaaaagaaaaaaacgcggaagatatcacaaagtgcccagacctatgatcctcgagaaggctacaaccctcagccccccgaccttagtgctgttaccctgtcccgggagctgcaggccatggcagaacaactggcagaaaattaccacaacacgtggggacggaagaagaagcaggagctggaagccaaaggcggtgggacccaccccctgctggtcccctacgacacgctcacggccaaggagaaggcacgagatcgagagaaggcccaggagctactgaaattcctgcagatgaatggctacgcggttacaagaggccttaaggacatggaactggactcgtcttccattgaaaagcggtttgcctttggcttcctgcagcagctgctgcgctggatggacatttctcaggagttcattgcccacctggaggctgtggtcagcagtgggcgagtggaaaagtccccacatgaacaggagattaaattctttgccaagatcctgctccctttgatcaaccagtacttcaccaaccactgcctctatttcttgtccactccggctaaagtgctgggcagcggtggccacgcctctaacaaggagaaggaaatgatcaccagcctcttctgcaaacttgctgctctcgtccgccaccgagtctctctctttgggacagacgccccagctgtggtcaactgtcttcacatcctggcccgctccctggatgccaggacagtgatgaagtcaggccctgagatcgtgaaggctggcctccgctccttcttcgagagtgcctcggaggacatcgagaagatggtggagaacctgcggctgggcaaggtgtcgcaggcgcgcacccaggtgaaaggcgtgggccagaacctcacctacaccactgtggcactgctgccggtcctcaccaccctcttccagcacatcgcccagcaccagttcggagatgacgtcatcctggacgacgtccaggtctcttgctaccgaacgctgtgcagtatctactccctgggaaccaccaagaacacttatgtggaaaagcttcggccagccctcggggagtgcctggcccgtctggcagcagccatgccggtggcgttcctggagccgcagctgaacgagtacaacgcctgctccgtgtacaccaccaagtctccgcgggagcgggccatcctggggctccccaacagtgtggaggagatgtgtcccgacatcccggtgctggagcggctcatggcagacattggggggctggccgagtcaggtgcccgctacacagagatgccgcatgtcatcgagatcacgctgcccatgctatgcagctacctgccccgatggtgggagcgcgggcccgaggcacccccttccgccctgcccgccggcgcccccccaccctgcacagctgtcacctctgaccacctcaactccctgctggggaatatcctgagaatcatcgtcaacaacctgggcattgacgaggcctcctggatgaagcggctggctgtgttcgcacagcccattgtgagccgtgcacggccggagctcctgcagtcccacttcatcccaactatcgggcggctgcgcaagagggcagggaaggtggtgtccgaggaggagcagctgcgcctggaggccaaggcggaggcccaggagggcgagctgctggtgcgggacgagttctctgtgctctgccgggacctctacgccctgtatccgctgctcatccgctacgtggacaacaacagggcgcagtggctgacggagccgaatcccagcgcggaggagctgttcaggatggtgggcgagatcttcatctactggtccaagtcccacaacttcaagcgcgaggagcagaactttgtggtccagaatgagatcaacaacatgtccttcctgactgctgacaacaaaagcaaaatggctaagtccggtggctcggaccaggaacgcaccaagaagaagcgccggggggaccggtactctgtgcagacgtcactgatcgtggccacactgaagaagatgctgcccatcggcctgaatatgtgtgcgcccaccgaccaagacctcatcacgctggccaagacccgttacgccctgaaagacacagatgaggaggtccgggaatttctgcacaacaaccttcaccttcagggaaaggtcgaaggctccccgtctctgcgctggcagatggctctgtaccggggcgtcccgggtcgcgaggaggacgccgatgaccccgagaaaatcgtgcgcagagtccaggaagtgtcagccgtgctctactacctggaccagaccgagcacccttacaagtctaagaaggccgtgtggcacaagcttttgtccaaacagcgccggcgggcagtcgtggcctgtttccgtatgacgcccctgtacaacctgcccacgcaccgggcatgtaacatgttcctggagagctacaaggctgcatggatcctgactgaagaccacagttttgaggaccgcatgatagatgacctttcaaaagctggggagcaggaggaggaggaggaagaggtggaagagaagaagccagaccccctgcaccagttggtcctgcacttcagccgcactgccctgacggaaaagagcaaactggatgaggattacctgtacatggcctatgctgatatcatggcaaagagctgccacctggaggagggaggggagaacggtgaagctgaagaggaggttgaggtctcctttgaggagaaacagatggagaagcagaggctcttgtaccagcaagcacggctgcacacccggggggcggccgagatggtgctgcagatgatcagtgcctgcaaaggagagacaggtgccatggtgtcctccaccctgaagctgggcatctccatcctcaatggaggcaatgctgaggtccagcagaaaatgctggattatcttaaggacaagaaggaagttggcttcttccagagtatccaggcactgatgcaaacatgcagcgtcctggatctcaatgcctttgagagacagaacaaggccgaggggctgggcatggtgaatgaggatggcactgtcatcaatcgccagaacggagagaaggtcatggcggatgatgaattcacacaagacctgttccgattcctacaattgctctgtgaggggcacaataatgatttccagaactacctacggacacagacagggaacacgaccactattaacatcatcatttgcactgtggactacctcctgcggctgcaggaatccatcagcgacttctactggtactactcgggcaaggatgtcattgaagagcagggcaagaggaacttctccaaagccatgtcggtggctaagcaggtgttcaacagcctcactgagtacatccagggtccctgcaccgggaaccagcagagcctggcgcacagtcgcctatgggacgcagtggtgggattcctgcacgtgttcgcccacatgatgatgaagctcgctcaggactcaagccagatcgagctgctgaaggagctgctggatctgcagaaggacatggtggtgatgttgctgtcgctactagaagggaacgtggtgaacggcatgatcgcccggcagatggtggacatgctcgtggaatcctcatccaatgtggagatgatcctcaagttcttcgacatgttcctgaaactcaaggacattgtgggctctgaagccttccaggactacgtaacggatccccgtggcctcatctccaagaaggacttccagaaggccatggacagccagaagcagttcagcggtccagaaatccagttcctgctttcgtgctccgaagcggatgagaacgaaatgatcaactgcgaagagttcgccaaccgcttccaggagccagcacgcgacatcggcttcaacgtggcggtgctgctgaccaacctgtcggagcatgtgccgcatgaccctcgcctgcacaacttcctggagctggccgagagcatccttgagtacttccgcccctacctgggccgcatcgagatcatgggcgcgtcacgccgcatcgagcgcatctacttcgagatctcagagaccaaccgcgcccagtgggagatgccccaggtgaaggagtccaagcgccagttcatcttcgacgtggtgaacgagggcggcgaggctgagaagatggagctcttcgtgagtttctgcgaggacaccatcttcgagatgcagatcgccgcgcagatctcggagcccgagggcgagccggagaccgacgaggacgagggcgcgggcgcggcggaggcgggcgcggaaggcgcggaggagggcgcggcggggctcgagggcacggcggccacggcggcggcgggggcgacggcgcgggttgtggcggccgcaggccgggccctgcgaggcctcagctaccgcagcctgcggcggcgcgtgcggcggctgcggcggcttacggcccgcgaggcggccaccgcagtggcggcgctgctctgggcagcagtgacgcgcgctggggccgctggcgcgggggcggcggcgggcgcgctgggcctgctctggggctcgctgttcggcggcggcctggtggagggcgccaagaaggtgacggtgaccgagctcctggcaggcatgcccgaccccaccagcgacgaggtgcacggcgagcagccggccgggccgggcggagacgcagacggcgagggtgccagcgagggcgctggagacgccgcggagggcgctggagacgaggaggaggcggtgcacgaggccgggccgggcggtgccgacggggcggtggccgtgaccgatgggggccccttccggcccgaaggggctggcggtctcggggacatgggggacacgacgcctgcggaaccgcccacacccgagggctctcccatcctcaagaggaaattgggggtggatggagtggaggaggagctcccgccagagccagagcccgagccggaaccagagctggagccggagaaagccgatgccgagaatggggagaaggaagaagttcccgagcccacaccagagccccccaagaagcaagcacctccctcaccccctccaaagaaggaggaagctggaggcgaattctggggagaactggaggtgcagagggtgaagttcctgaactacctgtcccggaacttttacaccctgcggttccttgccctcttcttggcatttgccatcaacttcatcttgctgttttataaggtctcagactctccaccaggggaggacgacatggaaggctcagctgctggggatgtgtcaggtgcaggctctggtggcagctctggctggggcttgggggccggagaggaggcagagggcgatgaggatgagaacatggtgtactacttcctggaggaaagcacaggctacatggaacccgccctgcggtgtctgagcctcctgcatacactggtggcctttctctgcatcattggctataattgtctcaaggtgcccctggtaatctttaagcgggagaaggagctggcccggaagctggagtttgatggcctgtacatcacggagcagcctgaggacgatgacgtgaaggggcagtgggaccgactggtgctcaacacgccgtctttccctagcaactactgggacaagtttgtcaagcgcaaggtcctggacaaacatggggacatctacgggcgggagcggattgctgagctactgggcatggacctggccacactagagatcacagcccacaatgagcgcaagcccaacccgccgccagggctgctgacctggctcatgtccatcgatgtcaagtaccagatctggaagttcggggtcatcttcacagacaactccttcctgtacctgggctggtatatggtgatgtccctcttgggacactacaacaacttcttctttgctgcccatctcctggacatcgccatgggggtcaagacgctgcgcaccatcctgtcctctgtcacccacaatgggaaacagctggtgatgaccgtgggccttctggcggtggtcgtctacctgtacaccgtggtggccttcaacttcttccgcaagttctacaacaagagcgaggatgaggatgaacctgacatgaagtgtgatgacatgatgacgtgttacctgtttcacatgtacgtgggtgtccgggctggcggaggcattggggacgagatcgaggaccccgcgggtgacgaatacgagctctacagggtggtcttcgacatcaccttcttcttcttcgtcatcgtcatcctgttggccatcatccagggtctgatcatcgacgcttttggtgagctccgagaccaacaagagcaagtgaaggaggatatggagaccaagtgcttcatctgtggaatcggcagtgactactttgatacgacaccgcatggcttcgagactcacacgctggaggagcacaacctggccaattacatgtttttcctgatgtatttgataaacaaggatgagacagaacacacgggtcaggagtcttatgtctggaagatgtaccaagagagatgttgggatttcttcccagctggtgattgtttccgtaagcagtatgaggaccagcttagctgacacacccccagctggccctccacccccacctcaagtgccttattctcacagcaagccccttagtccccaagcccctccccctaaggcagctgggggagaggtgacctagtactggaaaataaatctgtgctacgccccccagca

SEQ ID NO: 178680 - DNA, 15117 bp, Homo sapiens
  Payload ID: 15210
  Gene Symbol: RYR1
  Gene Name: ryanodine receptor 1 (skeletal)
  Uniprot ID: P21817
  ENST ID: ENST00000359596
  CDS Start-End: 1-15117
atgggtgacgcagaaggcgaagacgaggtccagttcctgcggacggacgatgaggtggtcctgcagtgcagcgctaccgtgctcaaggagcagctcaagctctgcctggccgccgagggcttcggcaaccgcctgtgcttcctggagcccactagcaacgcgcagaatgtgccccccgatctggccatctgttgcttcgtcctggagcagtccctgtctgtgcgagccctgcaggagatgctggctaacacggtggaggctggcgtggagtcatcccagggcgggggacacaggacgctcctgtatggccatgccatcctgctccggcatgcacacagccgcatgtatctgagctgcctcaccacctcccgctccatgactgacaagctggccttcgatgtgggactgcaggaggacgcaacaggagaggcttgctggtggaccatgcacccagcctccaagcagaggtctgaaggagaaaaggtccgcgttggggatgacatcatccttgtcagtgtctcctccgagcgctacctgcacctgtcgaccgccagtggggagctccaggttgacgcttccttcatgcagacactatggaacatgaaccccatctgctcccgctgcgaagagggcttcgtgacgggaggtcacgtcctccgcctctttcatggacatatggatgagtgtctgaccatttcccctgctgacagtgatgaccagcgcagacttgtctactatgaggggggagctgtgtgcactcatgcccgctccctctggaggctggagccactgagaatcagctggagtgggagccacctgcgctggggccagccactccgagtccggcatgtcactaccgggcagtacctagcgctcaccgaggaccagggcctggtggtggttgacgccagcaaggctcacaccaaggctacctccttctgcttccgcatctccaaggagaagctggatgtggcccccaagcgggatgtggagggcatgggcccccctgagatcaagtacggggagtcactgtgcttcgtgcagcatgtggcctcaggactgtggctcacctatgctgctccagaccccaaggccctgcggctcggcgtgctcaagaagaaggccatgctgcaccaggagggccacatggacgacgcactgtcgctgacccgctgccagcaggaggagtcccaggccgcccgcatgatccacagcaccaatggcctatacaaccagttcatcaagagcctggacagcttcagcgggaagccacggggctcggggccacccgctggcacggcgctgcccatcgagggcgttatcctgagcctgcaggacctcatcatctacttcgagcctccctccgaggacttgcagcacgaggagaagcagagcaagctgcgaagcctgcgcaaccgccagagcctcttccaggaggaggggatgctctccatggtcctgaattgcatagaccgcctaaatgtctacaccactgctgcccactttgctgagtttgcaggggaggaggcagccgagtcctggaaagagattgtgaatcttctctatgaactcctagcttctctaatccgtggcaatcgtagcaactgtgccctcttctccacaaacttggactggctggtcagcaagctggatcggctggaggcctcgtctggcatcctggaggtcctgtactgtgtcctcattgagagtccagaggttctgaacatcatccaggagaatcacatcaagtccatcatctccctcctggacaagcatgggaggaaccacaaggtcctggacgtgctatgctccctgtgtgtgtgtaatggtgtggctgtacgctccaaccaagatcttattactgagaacttgctgcctggccgtgagcttctgctgcagacaaacctcatcaactatgtcaccagcatccgccccaacatctttgtgggccgagcggaaggcaccacgcagtacagcaaatggtactttgaggtgatggtggacgaggtgactccatttctgacagctcaggccacccacttgcgggtgggctgggccctcaccgagggctacaccccctaccctggggccggcgagggctggggcggcaacggggtcggcgatgacctctattcctacggctttgatggactgcatctctggacaggacacgtggcacgcccagtgacttccccagggcagcacctcctggcccctgaagacgtgatcagctgctgcctggacctcagcgtgccgtccatctccttccgcatcaacggctgccccgtgcagggtgtctttgagtccttcaacctggacgggctcttcttccctgttgtcagcttctcggctggtgtcaaggtgcggttcctccttggtggccgccatggtgaattcaagttcctgcccccacctggctatgctccatgccatgaggctgtgctccctcgagagcgactccatcttgaacccatcaaggagtatcgacgggaggggccccgggggcctcacctggtgggccccagtcgctgcctctcacacaccgacttcgtgccctgccctgtggacactgtccagattgtcctgccgccccatctggagcgcattcgggagaagctggcggagaacatccacgagctctgggcgctaacccgcatcgagcagggctggacctacggcccggttcgggatgacaacaagaggctgcacccgtgtcttgtggacttccacagccttccagagcctgagaggaactacaacctgcagatgtctggggagacgctcaagactctgctggctctgggctgccacgtgggcatggcggatgagaaggcggaggacaacctgaagaagacaaaactccccaagacgtatatgatgagcaatgggtacaagccggctccgctggacctgagccacgtgcggctgacgccggcgcagacgacactggtggaccgtctggcagaaaatgggcacaacgtgtgggcccgagaccgcgtgggccagggctggagctacagcgcagtgcaggacatcccagcgcgccgaaaccctcggctggtgccctaccgcctgctggatgaagccaccaagcgcagcaaccgggacagcctctgccaggccgtgcgcaccctcctgggctacggctacaacatcgagcctcctgaccaggagcccagtcaggtggagaaccagtctcgttgtgaccgggtgcgcatcttccgggcagagaaatcctatacagtgcagagcggccgctggtacttcgagtttgaagcagtcaccacaggcgagatgcgcgtgggctgggcgaggcccgagctgaggcctgatgtagagctgggagctgacgagctggcctatgtcttcaatgggcaccgcggccagcgctggcacttgggcagtgaaccatttgggcgcccctggcagccgggcgatgtcgttggctgtatgatcgacctcacagagaacaccattatcttcaccctcaatggcgaggtcctcatgtctgactcaggctccgaaacagccttccgggagattgagattggggacggcttcctgcccgtctgcagcttgggacctggccaggtgggtcatctgaacctgggccaggacgtgagctctctgaggttctttgccatctgtggcctccaggaaggcttcgagccatttgccatcaacatgcagcgcccagtcaccacctggttcagcaaaggcctgccccagtttgagccagtgccccttgaacaccctcactatgaggtatcccgagtggacggcactgtggacacgcccccctgcctgcgcctgacccaccgcacctggggctcccagaacagcctggtggagatgcttttcctgcggctgagcctcccagtccagttccaccagcacttccgctgcactgcaggggccaccccgctggcacctcctggcctgcagccccccgccgaggacgaggcccgggcggcggaacccgaccctgactacgaaaacctgcgccgctcagctgggggctggagcgaggcagagaacggcaaagaagggactgcgaaggagggcgcccccgggggcaccccgcaggcggggggagaggcgcagcccgccagggcggagaatgagaaggatgccaccaccgagaagaacaagaagagaggcttcttattcaaggccaagaaggtcgccatgatgacccagccaccggccacccccacgctgccccgactccctcacgacgtggtgcctgcagacaaccgcgatgaccccgagatcatcctcaacaccaccacgtactattactccgtgagggtctttgctggacaggagcccagctgcgtgtgggcgggctgggtcacccctgactaccatcagcacgacatgagcttcgacctcagcaaggtccgggtcgtgacggtgaccatgggggatgaacaaggcaacgtccacagcagcctcaagtgtagcaactgctacatggtgtggggcggagactttgtgagtcccgggcagcagggccggatcagccacacggaccttgtcattgggtgcctggtggacttggccactggcttaatgacctttacagccaatggcaaagagagcaacacctttttccaggtggaacccaacactaagctatttcctgccgtcttcgtcctgcccacccaccagaacgtcatccagtttgagctggggaagcagaagaacatcatgccgttgtcagccgccatgttccaaagcgagcgcaagaacccggccccgcagtgcccaccgcggctggagatgcagatgctgatgccagtgtcctggagccgcatgcccaaccacttcctgcaggtggagacgaggcgtgccggcgagcggctgggctgggccgtgcagtgccaggagccgctgaccatgatggcgctgcacatccccgaggagaaccggtgcatggacatcctggagctgtcggagcgcctggacctgcagcgcttccactcgcacaccctgcgcctctaccgcgctgtgtgcgccctgggcaacaatcgcgtggcgcacgctctgtgcagccacgtagaccaagctcagctgctgcacgccctggaggacgcgcacctgccaggcccactgcgcgcaggctactatgacctcctcatcagcatccacctcgaaagtgcctgccgcagccgccgctccatgctctctgaatacatcgtgcccctcacgcctgagacccgcgccatcacgctcttccctcctggaaggagcacagaaaatggtcacccccggcatggcctgccgggagttggagtcaccacttcgctgaggcccccgcatcatttctcgcccccctgtttcgtggccgctctgccagctgctggggcagcagaggccccggcccgcctcagccctgccatcccgctggaggccctgcgggacaaggcactgaggatgctgggggaggcggtgcgcgacggtgggcagcacgctcgcgaccccgtcgggggctccgtggagttccagtttgtgcctgtgctcaagctcgtgtccaccctgctggtgatgggcatctttggcgatgaggatgtgaaacagatcttgaagatgattgagcctgaggtcttcactgaggaagaagaggaggaggacgaggaggaagagggtgaagaggaagatgaggaggagaaggaggaggatgaggaggaaacagcacaggaaaaggaagatgaggaaaaagaggaagaggaggcagcagaaggggagaaagaagaaggcttggaggaagggctgctccagatgaagttgccagagtctgtgaagttacagatgtgccacctgctggagtatttctgtgaccaagagctgcagcaccgtgtggagtccctggcagcctttgcggagcgctatgtggacaagctccaggccaaccagcggagccgctatggcctcctcataaaagccttcagcatgaccgcagcagagactgcaagacgtacccgcgagttccgctccccaccccaggaacagatcaatatgctattgcaattcaaagatggtacagatgaggaagactgtcctctccctgaagagattcgacaggatttgcttgactttcatcaagacctgctggcacactgtggaattcagctagatggagaggaggaggaaccagaggaagagaccaccctgggcagccgcctcatgagcctgttggagaaagtgcggctggtgaagaagaaggaagagaaacctgaggaggagcggtcagcagaggagagcaaaccccggtccctgcaggagctggtgtcccacatggtggtgcgctgggcccaagaggacttcgtgcagagccccgagctggtgcgggccatgttcagcctcctgcaccggcagtacgacgggctgggtgagctgctgcgtgccctgccgcgggcgtacaccatctcaccgtcctccgtggaagacaccatgagcctgctcgagtgcctcggccagatccgctcgctgctcatcgtgcagatgggcccccaggaggagaacctcatgatccagagcatcgggaacatcatgaacaacaaagtcttctaccaacacccgaacctgatgagggcgctgggcatgcacgagacggtcatggaggtcatggtcaacgtcctcgggggcggcgagtccaaggagatccgcttccccaagatggtgacaagctgctgccgcttcctctgctatttctgccgaatcagccggcagaaccagcgctccatgtttgaccacctgagctacctgctggagaacagtggcatcggcctgggcatgcagggctccacgcccctggacgtggctgctgcctccgtcattgacaacaatgagctggccttggcattgcaggagcaggacctggaaaaggttgtgtcctacctggcaggctgtggcctccagagctgccccatgcttgtggccaaagggtacccagacattggctggaacccctgtggtggagagcgctacctggacttcctgcgctttgctgtcttcgtcaacggcgagagcgtggaggagaacgccaatgtggtggtgcggctgctcatccggaagcctgagtgcttcggacccgccctgcggggtgagggtggctcagggctgctggctgccatcgaagaggccatccgcatctccgaggaccctgcgagggatggcccaggcatccgcagggaccggcggcgcgagcactttggtgaggaaccgcctgaagaaaaccgggtgcacctgggacacgccatcatgtccttctatgccgccttgatcgacctgctcggacgctgtgcaccagagatgcatctaatccaagccggcaagggtgaggccctgcggatccgcgccatcctccgctcccttgtgcccttggaggaccttgtgggcatcatcagcctcccactgcagattcccaccctgggcaaagatggggctctggtgcagccaaagatgtcagcatccttcgtgccggaccacaaggcgtccatggtgctcttcctggaccgtgtgtatggcatcgagaaccaggacttcttgctgcacgtgctggacgtggggttcctgcccgacatgagggcagccgcctcgctggacacggccactttcagcaccaccgagatggcgctggcgctgaaccgctacctgtgcctggccgtgctgccgctcatcaccaagtgtgcgccgctctttgcgggcacagaacaccgcgccatcatggtggactctatgctgcataccgtgtaccgcctgtctcggggtcgttcgctcaccaaggcgcagcgtgacgtcatcgaggactgcctcatgtcgctctgcaggtacatccgcccgtcgatgctgcagcacctgttgcgccgcctggtgttcgacgtgcccatcctcaacgagttcgccaagatgccactcaagctcctcaccaaccactatgagcgctgttggaagtactactgcctacccacgggctgggccaacttcggggtcacctcagaggaggagctgcacctcacacggaaactcttctggggcatctttgactctctggcccataagaaatacgacccggagctgtaccgcatggccatgccttgtctgtgcgccattgccggggctctgccccccgactatgtggatgcctcatactcatctaaggcagagaaaaaggccacagtggatgctgaaggcaactttgatccccggcctgtggagaccctcaatgtgatcatcccggagaagctggactccttcattaacaagtttgcggagtacacacacgagaagtgggccttcgacaagatccagaacaactggtcctatggagagaacatagacgaggagctgaagacccaccccatgctgaggccctacaagaccttttcagagaaggacaaagagatttaccgctggcccatcaaggagtccctgaaggccatgattgcctgggaatggacgatagagaaggccagggagggtgaggaggagaagacggaaaagaaaaaaacgcggaagatatcacaaagtgcccagacctatgatcctcgagaaggctacaaccctcagccccccgaccttagtgctgttaccctgtcccgggagctgcaggccatggcagaacaactggcagaaaattaccacaacacgtggggacggaagaagaagcaggagctggaagccaaaggcggtgggacccaccccctgctggtcccctacgacacgctcacggccaaggagaaggcacgagatcgagagaaggcccaggagctactgaaattcctgcagatgaatggctacgcggttacaagaggccttaaggacatggaactggactcgtcttccattgaaaagcggtttgcctttggcttcctgcagcagctgctgcgctggatggacatttctcaggagttcattgcccacctggaggctgtggtcagcagtgggcgagtggaaaagtccccacatgaacaggagattaaattctttgccaagatcctgctccctttgatcaaccagtacttcaccaaccactgcctctatttcttgtccactccggctaaagtgctgggcagcggtggccacgcctctaacaaggagaaggaaatgatcaccagcctcttctgcaaacttgctgctctcgtccgccaccgagtctctctctttgggacagacgccccagctgtggtcaactgtcttcacatcctggcccgctccctggatgccaggacagtgatgaagtcaggccctgagatcgtgaaggctggcctccgctccttcttcgagagtgcctcggaggacatcgagaagatggtggagaacctgcggctgggcaaggtgtcgcaggcgcgcacccaggtgaaaggcgtgggccagaacctcacctacaccactgtggcactgctgccggtcctcaccaccctcttccagcacatcgcccagcaccagttcggagatgacgtcatcctggacgacgtccaggtctcttgctaccgaacgctgtgcagtatctactccctgggaaccaccaagaacacttatgtggaaaagcttcggccagccctcggggagtgcctggcccgtctggcagcagccatgccggtggcgttcctggagccgcagctgaacgagtacaacgcctgctccgtgtacaccaccaagtctccgcgggagcgggccatcctggggctccccaacagtgtggaggagatgtgtcccgacatcccggtgctggagcggctcatggcagacattggggggctggccgagtcaggtgcccgctacacagagatgccgcatgtcatcgagatcacgctgcccatgctatgcagctacctgccccgatggtgggagcgcgggcccgaggcacccccttccgccctgcccgccggcgcccccccaccctgcacagctgtcacctctgaccacctcaactccctgctggggaatatcctgagaatcatcgtcaacaacctgggcattgacgaggcctcctggatgaagcggctggctgtgttcgcacagcccattgtgagccgtgcacggccggagctcctgcagtcccacttcatcccaactatcgggcggctgcgcaagagggcagggaaggtggtgtccgaggaggagcagctgcgcctggaggccaaggcggaggcccaggagggcgagctgctggtgcgggacgagttctctgtgctctgccgggacctctacgccctgtatccgctgctcatccgctacgtggacaacaacagggcgcagtggctgacggagccgaatcccagcgcggaggagctgttcaggatggtgggcgagatcttcatctactggtccaagtcccacaacttcaagcgcgaggagcagaactttgtggtccagaatgagatcaacaacatgtccttcctgactgctgacaacaaaagcaaaatggctaaggcgggagatatacagtccggtggctcggaccaggaacgcaccaagaagaagcgccggggggaccggtactctgtgcagacgtcactgatcgtggccacactgaagaagatgctgcccatcggcctgaatatgtgtgcgcccaccgaccaagacctcatcacgctggccaagacccgttacgccctgaaagacacagatgaggaggtccgggaatttctgcacaacaaccttcaccttcagggaaaggtcgaaggctccccgtctctgcgctggcagatggctctgtaccggggcgtcccgggtcgcgaggaggacgccgatgaccccgagaaaatcgtgcgcagagtccaggaagtgtcagccgtgctctactacctggaccagaccgagcacccttacaagtctaagaaggccgtgtggcacaagcttttgtccaaacagcgccggcgggcagtcgtggcctgtttccgtatgacgcccctgtacaacctgcccacgcaccgggcatgtaacatgttcctggagagctacaaggctgcatggatcctgactgaagaccacagttttgaggaccgcatgatagatgacctttcaaaagctggggagcaggaggaggaggaggaagaggtggaagagaagaagccagaccccctgcaccagttggtcctgcacttcagccgcactgccctgacggaaaagagcaaactggatgaggattacctgtacatggcctatgctgatatcatggcaaagagctgccacctggaggagggaggggagaacggtgaagctgaagaggaggttgaggtctcctttgaggagaaacagatggagaagcagaggctcttgtaccagcaagcacggctgcacacccggggggcggccgagatggtgctgcagatgatcagtgcctgcaaaggagagacaggtgccatggtgtcctccaccctgaagctgggcatctccatcctcaatggaggcaatgctgaggtccagcagaaaatgctggattatcttaaggacaagaaggaagttggcttcttccagagtatccaggcactgatgcaaacatgcagcgtcctggatctcaatgcctttgagagacagaacaaggccgaggggctgggcatggtgaatgaggatggcactgtcatcaatcgccagaacggagagaaggtcatggcggatgatgaattcacacaagacctgttccgattcctacaattgctctgtgaggggcacaataatgatttccagaactacctacggacacagacagggaacacgaccactattaacatcatcatttgcactgtggactacctcctgcggctgcaggaatccatcagcgacttctactggtactactcgggcaaggatgtcattgaagagcagggcaagaggaacttctccaaagccatgtcggtggctaagcaggtgttcaacagcctcactgagtacatccagggtccctgcaccgggaaccagcagagcctggcgcacagtcgcctatgggacgcagtggtgggattcctgcacgtgttcgcccacatgatgatgaagctcgctcaggactcaagccagatcgagctgctgaaggagctgctggatctgcagaaggacatggtggtgatgttgctgtcgctactagaagggaacgtggtgaacggcatgatcgcccggcagatggtggacatgctcgtggaatcctcatccaatgtggagatgatcctcaagttcttcgacatgttcctgaaactcaaggacattgtgggctctgaagccttccaggactacgtaacggatccccgtggcctcatctccaagaaggacttccagaaggccatggacagccagaagcagttcagcggtccagaaatccagttcctgctttcgtgctccgaagcggatgagaacgaaatgatcaactgcgaagagttcgccaaccgcttccaggagccagcacgcgacatcggcttcaacgtggcggtgctgctgaccaacctgtcggagcatgtgccgcatgaccctcgcctgcacaacttcctggagctggccgagagcatccttgagtacttccgcccctacctgggccgcatcgagatcatgggcgcgtcacgccgcatcgagcgcatctacttcgagatctcagagaccaaccgcgcccagtgggagatgccccaggtgaaggagtccaagcgccagttcatcttcgacgtggtgaacgagggcggcgaggctgagaagatggagctcttcgtgagtttctgcgaggacaccatcttcgagatgcagatcgccgcgcagatctcggagcccgagggcgagccggagaccgacgaggacgagggcgcgggcgcggcggaggcgggcgcggaaggcgcggaggagggcgcggcggggctcgagggcacggcggccacggcggcggcgggggcgacggcgcgggttgtggcggccgcaggccgggccctgcgaggcctcagctaccgcagcctgcggcggcgcgtgcggcggctgcggcggcttacggcccgcgaggcggccaccgcagtggcggcgctgctctgggcagcagtgacgcgcgctggggccgctggcgcgggggcggcggcgggcgcgctgggcctgctctggggctcgctgttcggcggcggcctggtggagggcgccaagaaggtgacggtgaccgagctcctggcaggcatgcccgaccccaccagcgacgaggtgcacggcgagcagccggccgggccgggcggagacgcagacggcgagggtgccagcgagggcgctggagacgccgcggagggcgctggagacgaggaggaggcggtgcacgaggccgggccgggcggtgccgacggggcggtggccgtgaccgatgggggccccttccggcccgaaggggctggcggtctcggggacatgggggacacgacgcctgcggaaccgcccacacccgagggctctcccatcctcaagaggaaattgggggtggatggagtggaggaggagctcccgccagagccagagcccgagccggaaccagagctggagccggagaaagccgatgccgagaatggggagaaggaagaagttcccgagcccacaccagagccccccaagaagcaagcacctccctcaccccctccaaagaaggaggaagctggaggcgaattctggggagaactggaggtgcagagggtgaagttcctgaactacctgtcccggaacttttacaccctgcggttccttgccctcttcttggcatttgccatcaacttcatcttgctgttttataaggtctcagactctccaccaggggaggacgacatggaaggctcagctgctggggatgtgtcaggtgcaggctctggtggcagctctggctggggcttgggggccggagaggaggcagagggcgatgaggatgagaacatggtgtactacttcctggaggaaagcacaggctacatggaacccgccctgcggtgtctgagcctcctgcatacactggtggcctttctctgcatcattggctataattgtctcaaggtgcccctggtaatctttaagcgggagaaggagctggcccggaagctggagtttgatggcctgtacatcacggagcagcctgaggacgatgacgtgaaggggcagtgggaccgactggtgctcaacacgccgtctttccctagcaactactgggacaagtttgtcaagcgcaaggtcctggacaaacatggggacatctacgggcgggagcggattgctgagctactgggcatggacctggccacactagagatcacagcccacaatgagcgcaagcccaacccgccgccagggctgctgacctggctcatgtccatcgatgtcaagtaccagatctggaagttcggggtcatcttcacagacaactccttcctgtacctgggctggtatatggtgatgtccctcttgggacactacaacaacttcttctttgctgcccatctcctggacatcgccatgggggtcaagacgctgcgcaccatcctgtcctctgtcacccacaatgggaaacagctggtgatgaccgtgggccttctggcggtggtcgtctacctgtacaccgtggtggccttcaacttcttccgcaagttctacaacaagagcgaggatgaggatgaacctgacatgaagtgtgatgacatgatgacgtgttacctgtttcacatgtacgtgggtgtccgggctggcggaggcattggggacgagatcgaggaccccgcgggtgacgaatacgagctctacagggtggtcttcgacatcaccttcttcttcttcgtcatcgtcatcctgttggccatcatccagggtctgatcatcgacgcttttggtgagctccgagaccaacaagagcaagtgaaggaggatatggagaccaagtgcttcatctgtggaatcggcagtgactactttgatacgacaccgcatggcttcgagactcacacgctggaggagcacaacctggccaattacatgtttttcctgatgtatttgataaacaaggatgagacagaacacacgggtcaggagtcttatgtctggaagatgtaccaagagagatgttgggatttcttcccagctggtgattgtttccgtaagcagtatgaggaccagcttagctga

SEQ ID NO: 178681 - DNA, 15348 bp, Homo sapiens
  Payload ID: 15210
  Gene Symbol: RYR1
  Gene Name: ryanodine receptor 1 (skeletal)
  ENST ID: ENST00000360985
  CDS Start-End: 108-15206
gtctccagaggtctccgaccccagcccgcccccagccctcccgcccagcccgcagccccctccctctgttccccgacctcagaccctgggcttccgacctcgacatcatgggtgacgcagaaggcgaagacgaggtccagttcctgcggacggacgatgaggtggtcctgcagtgcagcgctaccgtgctcaaggagcagctcaagctctgcctggccgccgagggcttcggcaaccgcctgtgcttcctggagcccactagcaacgcgcagaatgtgccccccgatctggccatctgttgcttcgtcctggagcagtccctgtctgtgcgagccctgcaggagatgctggctaacacggtggaggctggcgtggagtcatcccagggcgggggacacaggacgctcctgtatggccatgccatcctgctccggcatgcacacagccgcatgtatctgagctgcctcaccacctcccgctccatgactgacaagctggccttcgatgtgggactgcaggaggacgcaacaggagaggcttgctggtggaccatgcacccagcctccaagcagaggtctgaaggagaaaaggtccgcgttggggatgacatcatccttgtcagtgtctcctccgagcgctacctgcacctgtcgaccgccagtggggagctccaggttgacgcttccttcatgcagacactatggaacatgaaccccatctgctcccgctgcgaagagggcttcgtgacgggaggtcacgtcctccgcctctttcatggacatatggatgagtgtctgaccatttcccctgctgacagtgatgaccagcgcagacttgtctactatgaggggggagctgtgtgcactcatgcccgctccctctggaggctggagccactgagaatcagctggagtgggagccacctgcgctggggccagccactccgagtccggcatgtcactaccgggcagtacctagcgctcaccgaggaccagggcctggtggtggttgacgccagcaaggctcacaccaaggctacctccttctgcttccgcatctccaaggagaagctggatgtggcccccaagcgggatgtggagggcatgggcccccctgagatcaagtacggggagtcactgtgcttcgtgcagcatgtggcctcaggactgtggctcacctatgctgctccagaccccaaggccctgcggctcggcgtgctcaagaagaaggccatgctgcaccaggagggccacatggacgacgcactgtcgctgacccgctgccagcaggaggagtcccaggccgcccgcatgatccacagcaccaatggcctatacaaccagttcatcaagagcctggacagcttcagcgggaagccacggggctcggggccacccgctggcacggcgctgcccatcgagggcgttatcctgagcctgcaggacctcatcatctacttcgagcctccctccgaggacttgcagcacgaggagaagcagagcaagctgcgaagcctgcgcaaccgccagagcctcttccaggaggaggggatgctctccatggtcctgaattgcatagaccgcctaaatgtctacaccactgctgcccactttgctgagtttgcaggggaggaggcagccgagtcctggaaagagattgtgaatcttctctatgaactcctagcttctctaatccgtggcaatcgtagcaactgtgccctcttctccacaaacttggactggctggtcagcaagctggatcggctggaggcctcgtctggcatcctggaggtcctgtactgtgtcctcattgagagtccagaggttctgaacatcatccaggagaatcacatcaagtccatcatctccctcctggacaagcatgggaggaaccacaaggtcctggacgtgctatgctccctgtgtgtgtgtaatggtgtggctgtacgctccaaccaagatcttattactgagaacttgctgcctggccgtgagcttctgctgcagacaaacctcatcaactatgtcaccagcatccgccccaacatctttgtgggccgagcggaaggcaccacgcagtacagcaaatggtactttgaggtgatggtggacgaggtgactccatttctgacagctcaggccacccacttgcgggtgggctgggccctcaccgagggctacaccccctaccctggggccggcgagggctggggcggcaacggggtcggcgatgacctctattcctacggctttgatggactgcatctctggacaggacacgtggcacgcccagtgacttccccagggcagcacctcctggcccctgaagacgtgatcagctgctgcctggacctcagcgtgccgtccatctccttccgcatcaacggctgccccgtgcagggtgtctttgagtccttcaacctggacgggctcttcttccctgttgtcagcttctcggctggtgtcaaggtgcggttcctccttggtggccgccatggtgaattcaagttcctgcccccacctggctatgctccatgccatgaggctgtgctccctcgagagcgactccatcttgaacccatcaaggagtatcgacgggaggggccccgggggcctcacctggtgggccccagtcgctgcctctcacacaccgacttcgtgccctgccctgtggacactgtccagattgtcctgccgccccatctggagcgcattcgggagaagctggcggagaacatccacgagctctgggcgctaacccgcatcgagcagggctggacctacggcccggttcgggatgacaacaagaggctgcacccgtgtcttgtggacttccacagccttccagagcctgagaggaactacaacctgcagatgtctggggagacgctcaagactctgctggctctgggctgccacgtgggcatggcggatgagaaggcggaggacaacctgaagaagacaaaactccccaagacgtatatgatgagcaatgggtacaagccggctccgctggacctgagccacgtgcggctgacgccggcgcagacgacactggtggaccgtctggcagaaaatgggcacaacgtgtgggcccgagaccgcgtgggccagggctggagctacagcgcagtgcaggacatcccagcgcgccgaaaccctcggctggtgccctaccgcctgctggatgaagccaccaagcgcagcaaccgggacagcctctgccaggccgtgcgcaccctcctgggctacggctacaacatcgagcctcctgaccaggagcccagtcaggtggagaaccagtctcgttgtgaccgggtgcgcatcttccgggcagagaaatcctatacagtgcagagcggccgctggtacttcgagtttgaagcagtcaccacaggcgagatgcgcgtgggctgggcgaggcccgagctgaggcctgatgtagagctgggagctgacgagctggcctatgtcttcaatgggcaccgcggccagcgctggcacttgggcagtgaaccatttgggcgcccctggcagccgggcgatgtcgttggctgtatgatcgacctcacagagaacaccattatcttcaccctcaatggcgaggtcctcatgtctgactcaggctccgaaacagccttccgggagattgagattggggacggcttcctgcccgtctgcagcttgggacctggccaggtgggtcatctgaacctgggccaggacgtgagctctctgaggttctttgccatctgtggcctccaggaaggcttcgagccatttgccatcaacatgcagcgcccagtcaccacctggttcagcaaaggcctgccccagtttgagccagtgccccttgaacaccctcactatgaggtatcccgagtggacggcactgtggacacgcccccctgcctgcgcctgacccaccgcacctggggctcccagaacagcctggtggagatgcttttcctgcggctgagcctcccagtccagttccaccagcacttccgctgcactgcaggggccaccccgctggcacctcctggcctgcagccccccgccgaggacgaggcccgggcggcggaacccgaccctgactacgaaaacctgcgccgctcagctgggggctggagcgaggcagagaacggcaaagaagggactgcgaaggagggcgcccccgggggcaccccgcaggcggggagaggcgcacccgccagggcggagaatgagaaggatgccaccaccgagaagaacaagaagagaggcttcttattcaaggccaagaaggtcgccatgatgacccagccaccggccacccccacgctgccccgactccctcacgacgtggtgcctgcagacaaccgcgatgaccccgagatcatcctcaacaccaccacgtactattactccgtgagggtctttgctggacaggagcccagctgcgtgtgggcgggctgggtcacccctgactaccatcagcacgacatgagcttcgacctcagcaaggtccgggtcgtgacggtgaccatgggggatgaacaaggcaacgtccacagcagcctcaagtgtagcaactgctacatggtgtggggcggagactttgtgagtcccgggcagcagggccggatcagccacacggaccttgtcattgggtgcctggtggacttggccactggcttaatgacctttacagccaatggcaaagagagcaacacctttttccaggtggaacccaacactaagctatttcctgccgtcttcgtcctgcccacccaccagaacgtcatccagtttgagctggggaagcagaagaacatcatgccgttgtcagccgccatgttccaaagcgagcgcaagaacccggccccgcagtgcccaccgcggctggagatgcagatgctgatgccagtgtcctggagccgcatgcccaaccacttcctgcaggtggagacgaggcgtgccggcgagcggctgggctgggccgtgcagtgccaggagccgctgaccatgatggcgctgcacatccccgaggagaaccggtgcatggacatcctggagctgtcggagcgcctggacctgcagcgcttccactcgcacaccctgcgcctctaccgcgctgtgtgcgccctgggcaacaatcgcgtggcgcacgctctgtgcagccacgtagaccaagctcagctgctgcacgccctggaggacgcgcacctgccaggcccactgcgcgcaggctactatgacctcctcatcagcatccacctcgaaagtgcctgccgcagccgccgctccatgctctctgaatacatcgtgcccctcacgcctgagacccgcgccatcacgctcttccctcctggaaggagcacagaaaatggtcacccccggcatggcctgccgggagttggagtcaccacttcgctgaggcccccgcatcatttctcgcccccctgtttcgtggccgctctgccagctgctggggcagcagaggccccggcccgcctcagccctgccatcccgctggaggccctgcgggacaaggcactgaggatgctgggggaggcggtgcgcgacggtgggcagcacgctcgcgaccccgtcgggggctccgtggagttccagtttgtgcctgtgctcaagctcgtgtccaccctgctggtgatgggcatctttggcgatgaggatgtgaaacagatcttgaagatgattgagcctgaggtcttcactgaggaagaagaggaggaggacgaggaggaagagggtgaagaggaagatgaggaggagaaggaggaggatgaggaggaaacagcacaggaaaaggaagatgaggaaaaagaggaagaggaggcagcagaaggggagaaagaagaaggcttggaggaagggctgctccagatgaagttgccagagtctgtgaagttacagatgtgccacctgctggagtatttctgtgaccaagagctgcagcaccgtgtggagtccctggcagcctttgcggagcgctatgtggacaagctccaggccaaccagcggagccgctatggcctcctcataaaagccttcagcatgaccgcagcagagactgcaagacgtacccgcgagttccgctccccaccccaggaacagatcaatatgctattgcaattcaaagatggtacagatgaggaagactgtcctctccctgaagagattcgacaggatttgcttgactttcatcaagacctgctggcacactgtggaattcagctagatggagaggaggaggaaccagaggaagagaccaccctgggcagccgcctcatgagcctgttggagaaagtgcggctggtgaagaagaaggaagagaaacctgaggaggagcggtcagcagaggagagcaaaccccggtccctgcaggagctggtgtcccacatggtggtgcgctgggcccaagaggacttcgtgcagagccccgagctggtgcgggccatgttcagcctcctgcaccggcagtacgacgggctgggtgagctgctgcgtgccctgccgcgggcgtacaccatctcaccgtcctccgtggaagacaccatgagcctgctcgagtgcctcggccagatccgctcgctgctcatcgtgcagatgggcccccaggaggagaacctcatgatccagagcatcgggaacatcatgaacaacaaagtcttctaccaacacccgaacctgatgagggcgctgggcatgcacgagacggtcatggaggtcatggtcaacgtcctcgggggcggcgagtccaaggagatccgcttccccaagatggtgacaagctgctgccgcttcctctgctatttctgccgaatcagccggcagaaccagcgctccatgtttgaccacctgagctacctgctggagaacagtggcatcggcctgggcatgcagggctccacgcccctggacgtggctgctgcctccgtcattgacaacaatgagctggccttggcattgcaggagcaggacctggaaaaggttgtgtcctacctggcaggctgtggcctccagagctgccccatgcttgtggccaaagggtacccagacattggctggaacccctgtggtggagagcgctacctggacttcctgcgctttgctgtcttcgtcaacggcgagagcgtggaggagaacgccaatgtggtggtgcggctgctcatccggaagcctgagtgcttcggacccgccctgcggggtgagggtggctcagggctgctggctgccatcgaagaggccatccgcatctccgaggaccctgcgagggatggcccaggcatccgcagggaccggcggcgcgagcactttggtgaggaaccgcctgaagaaaaccgggtgcacctgggacacgccatcatgtccttctatgccgccttgatcgacctgctcggacgctgtgcaccagagatgcatctaatccaagccggcaagggtgaggccctgcggatccgcgccatcctccgctcccttgtgcccttggaggaccttgtgggcatcatcagcctcccactgcagattcccaccctgggcaaagatggggctctggtgcagccaaagatgtcagcatccttcgtgccggaccacaaggcgtccatggtgctcttcctggaccgtgtgtatggcatcgagaaccaggacttcttgctgcacgtgctggacgtggggttcctgcccgacatgagggcagccgcctcgctggacacggccactttcagcaccaccgagatggcgctggcgctgaaccgctacctgtgcctggccgtgctgccgctcatcaccaagtgtgcgccgctctttgcgggcacagaacaccgcgccatcatggtggactctatgctgcataccgtgtaccgcctgtctcggggtcgttcgctcaccaaggcgcagcgtgacgtcatcgaggactgcctcatgtcgctctgcaggtacatccgcccgtcgatgctgcagcacctgttgcgccgcctggtgttcgacgtgcccatcctcaacgagttcgccaagatgccactcaagctcctcaccaaccactatgagcgctgttggaagtactactgcctacccacgggctgggccaacttcggggtcacctcagaggaggagctgcacctcacacggaaactcttctggggcatctttgactctctggcccataagaaatacgacccggagctgtaccgcatggccatgccttgtctgtgcgccattgccggggctctgccccccgactatgtggatgcctcatactcatctaaggcagagaaaaaggccacagtggatgctgaaggcaactttgatccccggcctgtggagaccctcaatgtgatcatcccggagaagctggactccttcattaacaagtttgcggagtacacacacgagaagtgggccttcgacaagatccagaacaactggtcctatggagagaacatagacgaggagctgaagacccaccccatgctgaggccctacaagaccttttcagagaaggacaaagagatttaccgctggcccatcaaggagtccctgaaggccatgattgcctgggaatggacgatagagaaggccagggagggtgaggaggagaagacggaaaagaaaaaaacgcggaagatatcacaaagtgcccagacctatgatcctcgagaaggctacaaccctcagccccccgaccttagtgctgttaccctgtcccgggagctgcaggccatggcagaacaactggcagaaaattaccacaacacgtggggacggaagaagaagcaggagctggaagccaaaggcggtgggacccaccccctgctggtcccctacgacacgctcacggccaaggagaaggcacgagatcgagagaaggcccaggagctactgaaattcctgcagatgaatggctacgcggttacaagaggccttaaggacatggaactggactcgtcttccattgaaaagcggtttgcctttggcttcctgcagcagctgctgcgctggatggacatttctcaggagttcattgcccacctggaggctgtggtcagcagtgggcgagtggaaaagtccccacatgaacaggagattaaattctttgccaagatcctgctccctttgatcaaccagtacttcaccaaccactgcctctatttcttgtccactccggctaaagtgctgggcagcggtggccacgcctctaacaaggagaaggaaatgatcaccagcctcttctgcaaacttgctgctctcgtccgccaccgagtctctctctttgggacagacgccccagctgtggtcaactgtcttcacatcctggcccgctccctggatgccaggacagtgatgaagtcaggccctgagatcgtgaaggctggcctccgctccttcttcgagagtgcctcggaggacatcgagaagatggtggagaacctgcggctgggcaaggtgtcgcaggcgcgcacccaggtgaaaggcgtgggccagaacctcacctacaccactgtggcactgctgccggtcctcaccaccctcttccagcacatcgcccagcaccagttcggagatgacgtcatcctggacgacgtccaggtctcttgctaccgaacgctgtgcagtatctactccctgggaaccaccaagaacacttatgtggaaaagcttcggccagccctcggggagtgcctggcccgtctggcagcagccatgccggtggcgttcctggagccgcagctgaacgagtacaacgcctgctccgtgtacaccaccaagtctccgcgggagcgggccatcctggggctccccaacagtgtggaggagatgtgtcccgacatcccggtgctggagcggctcatggcagacattggggggctggccgagtcaggtgcccgctacacagagatgccgcatgtcatcgagatcacgctgcccatgctatgcagctacctgccccgatggtgggagcgcgggcccgaggcacccccttccgccctgcccgccggcgcccccccaccctgcacagctgtcacctctgaccacctcaactccctgctggggaatatcctgagaatcatcgtcaacaacctgggcattgacgaggcctcctggatgaagcggctggctgtgttcgcacagcccattgtgagccgtgcacggccggagctcctgcagtcccacttcatcccaactatcgggcggctgcgcaagagggcagggaaggtggtgtccgaggaggagcagctgcgcctggaggccaaggcggaggcccaggagggcgagctgctggtgcgggacgagttctctgtgctctgccgggacctctacgccctgtatccgctgctcatccgctacgtggacaacaacagggcgcagtggctgacggagccgaatcccagcgcggaggagctgttcaggatggtgggcgagatcttcatctactggtccaagtcccacaacttcaagcgcgaggagcagaactttgtggtccagaatgagatcaacaacatgtccttcctgactgctgacaacaaaagcaaaatggctaagtccggtggctcggaccaggaacgcaccaagaagaagcgccggggggaccggtactctgtgcagacgtcactgatcgtggccacactgaagaagatgctgcccatcggcctgaatatgtgtgcgcccaccgaccaagacctcatcacgctggccaagacccgttacgccctgaaagacacagatgaggaggtccgggaatttctgcacaacaaccttcaccttcagggaaaggtcgaaggctccccgtctctgcgctggcagatggctctgtaccggggcgtcccgggtcgcgaggaggacgccgatgaccccgagaaaatcgtgcgcagagtccaggaagtgtcagccgtgctctactacctggaccagaccgagcacccttacaagtctaagaaggccgtgtggcacaagcttttgtccaaacagcgccggcgggcagtcgtggcctgtttccgtatgacgcccctgtacaacctgcccacgcaccgggcatgtaacatgttcctggagagctacaaggctgcatggatcctgactgaagaccacagttttgaggaccgcatgatagatgacctttcaaaagctggggagcaggaggaggaggaggaagaggtggaagagaagaagccagaccccctgcaccagttggtcctgcacttcagccgcactgccctgacggaaaagagcaaactggatgaggattacctgtacatggcctatgctgatatcatggcaaagagctgccacctggaggagggaggggagaacggtgaagctgaagaggaggttgaggtctcctttgaggagaaacagatggagaagcagaggctcttgtaccagcaagcacggctgcacacccggggggcggccgagatggtgctgcagatgatcagtgcctgcaaaggagagacaggtgccatggtgtcctccaccctgaagctgggcatctccatcctcaatggaggcaatgctgaggtccagcagaaaatgctggattatcttaaggacaagaaggaagttggcttcttccagagtatccaggcactgatgcaaacatgcagcgtcctggatctcaatgcctttgagagacagaacaaggccgaggggctgggcatggtgaatgaggatggcactgtcatcaatcgccagaacggagagaaggtcatggcggatgatgaattcacacaagacctgttccgattcctacaattgctctgtgaggggcacaataatgatttccagaactacctacggacacagacagggaacacgaccactattaacatcatcatttgcactgtggactacctcctgcggctgcaggaatccatcagcgacttctactggtactactcgggcaaggatgtcattgaagagcagggcaagaggaacttctccaaagccatgtcggtggctaagcaggtgttcaacagcctcactgagtacatccagggtccctgcaccgggaaccagcagagcctggcgcacagtcgcctatgggacgcagtggtgggattcctgcacgtgttcgcccacatgatgatgaagctcgctcaggactcaagccagatcgagctgctgaaggagctgctggatctgcagaaggacatggtggtgatgttgctgtcgctactagaagggaacgtggtgaacggcatgatcgcccggcagatggtggacatgctcgtggaatcctcatccaatgtggagatgatcctcaagttcttcgacatgttcctgaaactcaaggacattgtgggctctgaagccttccaggactacgtaacggatccccgtggcctcatctccaagaaggacttccagaaggccatggacagccagaagcagttcagcggtccagaaatccagttcctgctttcgtgctccgaagcggatgagaacgaaatgatcaactgcgaagagttcgccaaccgcttccaggagccagcacgcgacatcggcttcaacgtggcggtgctgctgaccaacctgtcggagcatgtgccgcatgaccctcgcctgcacaacttcctggagctggccgagagcatccttgagtacttccgcccctacctgggccgcatcgagatcatgggcgcgtcacgccgcatcgagcgcatctacttcgagatctcagagaccaaccgcgcccagtgggagatgccccaggtgaaggagtccaagcgccagttcatcttcgacgtggtgaacgagggcggcgaggctgagaagatggagctcttcgtgagtttctgcgaggacaccatcttcgagatgcagatcgccgcgcagatctcggagcccgagggcgagccggagaccgacgaggacgagggcgcgggcgcggcggaggcgggcgcggaaggcgcggaggagggcgcggcggggctcgagggcacggcggccacggcggcggcgggggcgacggcgcgggttgtggcggccgcaggccgggccctgcgaggcctcagctaccgcagcctgcggcggcgcgtgcggcggctgcggcggcttacggcccgcgaggcggccaccgcagtggcggcgctgctctgggcagcagtgacgcgcgctggggccgctggcgcgggggcggcggcgggcgcgctgggcctgctctggggctcgctgttcggcggcggcctggtggagggcgccaagaaggtgacggtgaccgagctcctggcaggcatgcccgaccccaccagcgacgaggtgcacggcgagcagccggccgggccgggcggagacgcagacggcgagggtgccagcgagggcgctggagacgccgcggagggcgctggagacgaggaggaggcggtgcacgaggccgggccgggcggtgccgacggggcggtggccgtgaccgatgggggccccttccggcccgaaggggctggcggtctcggggacatgggggacacgacgcctgcggaaccgcccacacccgagggctctcccatcctcaagaggaaattgggggtggatggagtggaggaggagctcccgccagagccagagcccgagccggaaccagagctggagccggagaaagccgatgccgagaatggggagaaggaagaagttcccgagcccacaccagagccccccaagaagcaagcacctccctcaccccctccaaagaaggaggaagctggaggcgaattctggggagaactggaggtgcagagggtgaagttcctgaactacctgtcccggaacttttacaccctgcggttccttgccctcttcttggcatttgccatcaacttcatcttgctgttttataaggtctcagactctccaccaggggaggacgacatggaaggctcagctgctggggatgtgtcaggtgcaggctctggtggcagctctggctggggcttgggggccggagaggaggcagagggcgatgaggatgagaacatggtgtactacttcctggaggaaagcacaggctacatggaacccgccctgcggtgtctgagcctcctgcatacactggtggcctttctctgcatcattggctataattgtctcaaggtgcccctggtaatctttaagcgggagaaggagctggcccggaagctggagtttgatggcctgtacatcacggagcagcctgaggacgatgacgtgaaggggcagtgggaccgactggtgctcaacacgccgtctttccctagcaactactgggacaagtttgtcaagcgcaaggtcctggacaaacatggggacatctacgggcgggagcggattgctgagctactgggcatggacctggccacactagagatcacagcccacaatgagcgcaagcccaacccgccgccagggctgctgacctggctcatgtccatcgatgtcaagtaccagatctggaagttcggggtcatcttcacagacaactccttcctgtacctgggctggtatatggtgatgtccctcttgggacactacaacaacttcttctttgctgcccatctcctggacatcgccatgggggtcaagacgctgcgcaccatcctgtcctctgtcacccacaatgggaaacagctggtgatgaccgtgggccttctggcggtggtcgtctacctgtacaccgtggtggccttcaacttcttccgcaagttctacaacaagagcgaggatgaggatgaacctgacatgaagtgtgatgacatgatgacgtgttacctgtttcacatgtacgtgggtgtccgggctggcggaggcattggggacgagatcgaggaccccgcgggtgacgaatacgagctctacagggtggtcttcgacatcaccttcttcttcttcgtcatcgtcatcctgttggccatcatccagggtctgatcatcgacgcttttggtgagctccgagaccaacaagagcaagtgaaggaggatatggagaccaagtgcttcatctgtggaatcggcagtgactactttgatacgacaccgcatggcttcgagactcacacgctggaggagcacaacctggccaattacatgtttttcctgatgtatttgataaacaaggatgagacagaacacacgggtcaggagtcttatgtctggaagatgtaccaagagagatgttgggatttcttcccagctggtgattgtttccgtaagcagtatgaggaccagcttagctgacacacccccagctggccctccacccccacctcaagtgccttattctcacagcaagccccttagtccccaagcccctccccctaaggcagctgggggagaggtgacctagtactggaaaataaatctgtgctacgccccccag

SEQ ID NO: 178682 - DNA, 515 bp, Homo sapiens
  Payload ID: 15210
  Gene Symbol: RYR1
  Gene Name: ryanodine receptor 1 (skeletal)
  ENST ID: ENST00000596431
  CDS Start-End: 1-515
gagaagcagaggctcttgtaccagcaagcacggctgcacacccggggggcggccgagatggtgctgcagatgatcagtgcctgcaaaggagagacaggtgccatggtgtcctccaccctgaagctgggcatctccatcctcaatggaggcaatgctgaggtccagcagaaaatgctggattatcttaaggacaagaaggaagttggcttcttccagagtatccaggcactgatgcaaacatgcagcgtcctggatctcaatgcctttgagagacagaacaaggccgaggggctgggcatggtgaatgaggatggcactggagagaaggtcatggcggatgatgaattcacacaagacctgttccgattcctacaattgctctgtgaggggcacaataatggcgctctgcagtggctgccaaagttctatacacgtggtggatttctgtactttaggtccagaaaagacctaagggaaaaaactgcctggcatttaaaaataaatctattagaatc

SEQ ID NO: 178683 - DNA, 6263 bp, Homo sapiens
  Payload ID: 15210
  Gene Symbol: RYR1
  Gene Name: ryanodine receptor 1 (skeletal)
  ENST ID: ENST00000594335
  CDS Start-End: 1-2659
gaacatcatgaacaacaaagtcttctaccaacacccgaacctgatgagggcgctgggcatgcacgagacggtcatggaggtcatggtcaacgtcctcgggggcggcgagtccaaggagatccgcttccccaagatggtgacaagctgctgccgcttcctctgctatttctgccgaatcagccggcagaaccagcgctccatgtttgaccacctgagctacctgctggagaacagtggcatcggcctgggcatgcagggctccacgcccctggacgtggctgctgcctccgtcattgacaacaatgagctggccttggcattgcaggagcaggacctggaaaaggttgtgtcctacctggcaggctgtggcctccagagctgccccatgcttgtggccaaagggtacccagacattggctggaacccctgtggtggagagcgctacctggacttcctgcgctttgctgtcttcgtcaacggcgagagcgtggaggagaacgccaatgtggtggtgcggctgctcatccggaagcctgagtgcttcggacccgccctgcggggtgagggtggctcagggctgctggctgccatcgaagaggccatccgcatctccgaggaccctgcgagggatggcccaggcatccgcagggaccggcggcgcgagcactttggtgaggaaccgcctgaagaaaaccgggtgcacctgggacacgccatcatgtccttctatgccgccttgatcgacctgctcggacgctgtgcaccagagatgcatctaatccaagccggcaagggtgaggccctgcggatccgcgccatcctccgctcccttgtgcccttggaggaccttgtgggcatcatcagcctcccactgcagattcccaccctgggcaaagatggggctctggtgcagccaaagatgtcagcatccttcgtgccggaccacaaggcgtccatggtgctcttcctggaccgtgtgtatggcatcgagaaccaggacttcttgctgcacgtgctggacgtggggttcctgcccgacatgagggcagccgcctcgctggacacggccactttcagcaccaccgagatggcgctggcgctgaaccgctacctgtgcctggccgtgctgccgctcatcaccaagtgtgcgccgctctttgcgggcacagaacaccgcgccatcatggtggactctatgctgcataccgtgtaccgcctgtctcggggtcgttcgctcaccaaggcgcagcgtgacgtcatcgaggactgcctcatgtcgctctgcaggtacatccgcccgtcgatgctgcagcacctgttgcgccgcctggtgttcgacgtgcccatcctcaacgagttcgccaagatgccactcaagctcctcaccaaccactatgagcgctgttggaagtactactgcctacccacgggctgggccaacttcggggtcacctcagaggaggagctgcacctcacacggaaactcttctggggcatctttgactctctggcccataagaaatacgacccggagctgtaccgcatggccatgccttgtctgtgcgccattgccggggctctgccccccgactatgtggatgcctcatactcatctaaggcagagaaaaaggccacagtggatgctgaaggcaactttgatccccggcctgtggagaccctcaatgtgatcatcccggagaagctggactccttcattaacaagtttgcggagtacacacacgagaagtgggccttcgacaagatccagaacaactggtcctatggagagaacatagacgaggagctgaagacccaccccatgctgaggccctacaagaccttttcagagaaggacaaagagatttaccgctggcccatcaaggagtccctgaaggccatgattgcctgggaatggacgatagagaaggccagggagggtgaggaggagaagacggaaaagaaaaaaacgcggaagatatcacaaagtgcccagacctatgatcctcgagaaggctacaaccctcagccccccgaccttagtgctgttaccctgtcccgggagctgcaggccatggcagaacaactggcagaaaattaccacaacacgtggggacggaagaagaagcaggagctggaagccaaaggcggtgggacccaccccctgctggtcccctacgacacgctcacggccaaggagaaggcacgagatcgagagaaggcccaggagctactgaaattcctgcagatgaatggctacgcggttacaagaggccttaaggacatggaactggactcgtcttccattgaaaagcggtttgcctttggcttcctgcagcagctgctgcgctggatggacatttctcaggagttcattgcccacctggaggctgtggtcagcagtgggcgagtggaaaagtccccacatgaacaggagattaaattctttgccaagatcctgctccctttgatcaaccagtacttcaccaaccactgcctctatttcttgtccactccggctaaagtgctgggcagcggtggccacgcctctaacaaggagaaggaaatgatcaccagggacagacgccccagctgtggtcaactgtcttcacatcctggcccgctccctggatgccaggacagtgatgaagtcaggccctgagatcgtgaaggctggcctccgctccttcttcgagagtgcctcggaggacatcgagaagatggtggagaacctgcggctgggcaaggtgtcgcaggcgcgcacccaggtgaaaggcgtgggccagaacctcacctacaccactgtggcactgctgccggtcctcaccaccctcttccagcacatcgcccagcaccagttcggagatgacgtcatcctggacgacgtccaggtctcttgctaccgaacgctgtgcagtatctactccctgggaaccaccaagaacacttatgtggaaaagcttcggccagccctcggggagtgcctggcccgtctggcagcagccatgccggtggcgttcctggagccgcagctgaacgagtacaacgcctgctccgtgtacaccaccaagtctccgcgggagcgggccatcctggggctccccaacagtgtggaggagatgtgtcccgacatcccggtgctggagcggctcatggcagacattggggggctggccgagtcaggtgcccgctacacagagatgccgcatgtcatcgagatcacgctgcccatgctatgcagctacctgccccgatggtgggagcgcgggcccgaggcacccccttccgccctgcccgccggcgcccccccaccctgcacagctgtcacctctgaccacctcaactccctgctggggaatatcctgagaatcatcgtcaacaacctgggcattgacgaggcctcctggatgaagcggctggctgtgttcgcacagcccattgtgagccgtgcacggccggagctcctgcagtcccacttcatcccaactatcgggcggctgcgcaagagggcagggaaggtggtgtccgaggaggagcagctgcgcctggaggccaaggcggaggcccaggagggcgagctgctggtgcgggacgagttctctgtgctctgccgggacctctacgccctgtatccgctgctcatccgctacgtggacaacaacagggcgcagtggctgacggagccgaatcccagcgcggaggagctgttcaggatggtgggcgagatcttcatctactggtccaagtcccacaacttcaagcgcgaggagcagaactttgtggtccagaatgagatcaacaacatgtccttcctgactgctgacaacaaaagcaaaatggctaagtccggtggctcggaccaggaacgcaccaagaagaagcgccggggggaccggtactctgtgcagacgtcactgatcgtggccacactgaagaagatgctgcccatcggcctgaatatgtgtgcgcccaccgaccaagacctcatcacgctggccaagacccgttacgccctgaaagacacagatgaggaggtccgggaatttctgcacaacaaccttcaccttcagggaaaggtcgaaggctccccgtctctgcgctggcagatggctctgtaccggggcgtcccgggtcgcgaggaggacgccgatgaccccgagaaaatcgtgcgcagagtccaggaagtgtcagccgtgctctactacctggaccagaccgagcacccttacaagtctaagaaggccgtgtggcacaagcttttgtccaaacagcgccggcgggcagtcgtggcctgtttccgtatgacgcccctgtacaacctgcccacgcaccgggcatgtaacatgttcctggagagctacaaggctgcatggatcctgactgaagaccacagttttgaggaccgcatgatagatgacctttcaaaagctggggagcaggaggaggaggaggaagaggtggaagagaagaagccagaccccctgcaccagttggtcctgcacttcagccgcactgccctgacggaaaagagcaaactggatgaggattacctgtacatggcctatgctgatatcatggcaaagagctgccacctggaggagggaggggagaacggtgaagctgaagaggaggttgaggtctcctttgaggagaaacagatggagaagcagaggctcttgtaccagcaagcacggctgcacacccggggggcggccgagatggtgctgcagatgatcagtgcctgcaaaggagagacaggtgccatggtgtcctccaccctgaagctgggcatctccatcctcaatggaggcaatgctgaggtccagcagaaaatgctggattatcttaaggacaagaaggaagttggcttcttccagagtatccaggcactgatgcaaacatgcagcgtcctggatctcaatgcctttgagagacagaacaaggccgaggggctgggcatggtgaatgaggatggcactggagagaaggtcatggcggatgatgaattcacacaagacctgttccgattcctacaattgctctgtgaggggcacaataatgatttccagaactacctacggacacagacagggaacacgaccactattaacatcatcatttgcactgtggactacctcctgcggctgcaggaatccatcagcgacttctactggtactactcgggcaaggatgtcattgaagagcagggcaagaggaacttctccaaagccatgtcggtggctaagcaggtgttcaacagcctcactgagtacatccagggtccctgcaccgggaaccagcagagcctggcgcacagtcgcctatgggacgcagtggtgggattcctgcacgtgttcgcccacatgatgatgaagctcgctcaggactcaagccagatcgagctgctgaaggagctgctggatctgcagaaggacatggtggtgatgttgctgtcgctactagaagggaacgtggtgaacggcatgatcgcccggcagatggtggacatgctcgtggaatcctcatccaatgtggagatgatcctcaagttcttcgacatgttcctgaaactcaaggacattgtgggctctgaagccttccaggactacgtaacggatccccgtggcctcatctccaagaaggacttccagaaggccatggacagccagaagcagttcagcggtccagaaatccagttcctgctttcgtgctccgaagcggatgagaacgaaatgatcaactgcgaagagttcgccaaccgcttccaggagccagcacgcgacatcggcttcaacgtggcggtgctgctgaccaacctgtcggagcatgtgccgcatgaccctcgcctgcacaacttcctggagctggccgagagcatccttgagtacttccgcccctacctgggccgcatcgagatcatgggcgcgtcacgccgcatcgagcgcatctacttcgagatctcagagaccaaccgcgcccagtgggagatgccccaggtgaaggagtccaagcgccagttcatcttcgacgtggtgaacgagggcggcgaggctgagaagatggagctcttcgtgagtttctgcgaggacaccatcttcgagatgcagatcgccgcgcagatctcggagcccgagggcgagccggagaccgacgaggacgagggcgcgggcgcggcggaggcgggcgcggaaggcgcggaggagggcgcggcggggctcgagggcacggcggccacggcggcggcgggggcgacggcgcgggttgtg

SEQ ID NO: 178684 - DNA, 843 bp, Homo sapiens
  Payload ID: 15210
  Gene Symbol: RYR1
  Gene Name: ryanodine receptor 1 (skeletal)
  ENST ID: ENST00000593322
  CDS Start-End: 1-239
cacggctgcacacccggggggcggccgagatggtgctgcagatgatcagtgcctgcaaaggagagacaggtgccatggtgtcctccaccctgaagctgggcatctccatcctcaatggaggcaatgctgaggtccagcagaaaatgctggattatcttaaggacaagaaggaagttggcttcttccagagtatccaggcactgatgcaaacatgcaggagagaaggtcatggcggatgatgaattcacacaagacctgttccgattcctacaattgctctgtgaggggcacaataatgatttccagaactacctacggacacagacagggaacacgaccactattaacatcatcatttgcactgtggactacctcctgcggctgcaggaatccatcagcgacttctactggtactactcgggcaaggatgtcattgaagagcagggcaagaggaacttctccaaagccatgtcggtggctaagcaggtgttcaacagcctcactgagtacatccagggtccctgcaccgggaaccagcagagcctggcgcacagtcgcctatgggacgcagtggtgggattcctgcacgtgttcgcccacatgatgatgaagctcgctcaggactcaagccagatcgagctgctgaaggagctgctggatctgcagaaggacatggtggtgatgttgctgtcgctactagaagggaacgtggtgaacggcatgatcgcccggcagatggtggacatgctcgtggaatcctcatccaatgtggagatgatcctcaagttcttcgacatgttcctgaaactcaaggacattgtgggctctgaagccttccaggac

SEQ ID NO: 178685 - DNA, 2200 bp, Homo sapiens
  Payload ID: 15210
  Gene Symbol: RYR1
  Gene Name: ryanodine receptor 1 (skeletal)
  ENST ID: ENST00000599547
  CDS Start-End: 1-2200
aaacttgctgctctcgtccgccaccgagtctctctctttggacagtgatgaagtcaggccctgagatcgtgaaggctggcctccgctccttcttcgagagtgcctcggaggacatcgagaagatggtggagaacctgcggctgggcaaggtgtcgcaggcgcgcacccaggtgaaaggcgtgggccagaacctcacctacaccactgtggcactgctgccggtcctcaccaccctcttccagcacatcgcccagcaccagttcggagatgacgtcatcctggacgacgtccaggtctcttgctaccgaacgctgtgcagtatctactccctgggaaccaccaagaacacttatgtggaaaagcttcggccagccctcggggagtgcctggcccgtctggcagcagccatgccggtggcgttcctggagccgcagctgaacgagtacaacgcctgctccgtgtacaccaccaagtctccgcgggagcgggccatcctggggctccccaacagtgtggaggagatgtgtcccgacatcccggtgctggagcggctcatggcagacattggggggctggccgagtcaggtgcccgctacacagagatgccgcatgtcatcgagatcacgctgcccatgctatgcagctacctgccccgatggtgggagcgcgggcccgaggcacccccttccgccctgcccgccggcgcccccccaccctgcacagctgtcacctctgaccacctcaactccctgctggggaatatcctgagaatcatcgtcaacaacctgggcattgacgaggcctcctggatgaagcggctggctgtgttcgcacagcccattgtgagccgtgcacggccggagctcctgcagtcccacttcatcccaactatcgggcggctgcgcaagagggcagggaaggtggtgtccgaggaggagcagctgcgcctggaggccaaggcggaggcccaggagggcgagctgctggtgcgggacgagttctctgtgctctgccgggacctctacgccctgtatccgctgctcatccgctacgtggacaacaacagggcgcagtggctgacggagccgaatcccagcgcggaggagctgttcaggatggtgggcgagatcttcatctactggtccaagtcccacaacttcaagcgcgaggagcagaactttgtggtccagaatgagatcaacaacatgtccttcctgactgctgacaacaaaagcaaaatggctaaggcgggagatatacagtccggtggctcggaccaggaacgcaccaagaagaagcgccggggggaccggtactctgtgcagacgtcactgatcgtggccacactgaagaagatgctgcccatcggcctgaatatgtgtgcgcccaccgaccaagacctcatcacgctggccaagacccgttacgccctgaaagacacagatgaggaggtccgggaatttctgcacaacaaccttcaccttcagggaaaggtcgaaggctccccgtctctgcgctggcagatggctctgtaccggggcgtcccgggtcgcgaggaggacgccgatgaccccgagaaaatcgtgcgcagagtccaggaagtgtcagccgtgctctactacctggaccagaccgagcacccttacaagtctaagaaggccgtgtggcacaagcttttgtccaaacagcgccggcgggcagtcgtggcctgtttccgtatgacgcccctgtacaacctgcccacgcaccgggcatgtaacatgttcctggagagctacaaggctgcatggatcctgactgaagaccacagttttgaggaccgcatgatagatgacctttcaaaagctggggagcaggaggaggaggaggaagaggtggaagagaagaagccagaccccctgcaccagttggtcctgcacttcagccgcactgccctgacggaaaagagcaaactggatgaggattacctgtacatggcctatgctgatatcatggcaaagagctgccacctggaggagggaggggagaacggtgaagctgaagaggaggttgaggtctcctttgaggagaaacagatggagaagcagaggctcttgtaccagcaagcacggctgcacacccggggggcggccgagatggtgctgcagatgatcagtgcctgcaaaggagagacaggtgccatggtgtcctccaccctgaa

SEQ ID NO: 178686 - DNA, 432 bp, Homo sapiens
  Payload ID: 15210
  Gene Symbol: RYR1
  Gene Name: ryanodine receptor 1 (skeletal)
  ENST ID: ENST00000593677
  CDS Start-End: 1-432
aggagctcccgccagagccagagcccgagccggaaccagagctggagccggagaaagccgatgccgagaatggggagaaggaagaagttcccgagcccacaccagagccccccaagaagcaagcacctccctcaccccctccaaagaaggaggaagctggaggcgaattctggggagaactggaggtgcagagggtgaagttcctggtctcagactctccaccaggggaggacgacatggaaggctcagctgctggggatgtgtcaggtgcaggctctggtggcagctctggctggggcttgggggccggagaggaggcagagggcgatgaggatgagaacatggtgtactacttcctggaggaaagcacaggctacatggaacccgccctgcggtgtctgagcctcctgcatacactggtggcctttctct

SEQ ID NO: 178687 - DNA, 863 bp, Homo sapiens
  Payload ID: 15210
  Gene Symbol: RYR1
  Gene Name: ryanodine receptor 1 (skeletal)
  ENST ID: ENST00000601514
  CDS Start-End: 1-863
cgtggtcctggctctgtgggacctggcctaggatggaaacttaggtctggaggcggagtcaggaccctgactctgttggtggagacaaggttttccttctgccgtaccgagcacccttacaagtctaagaaggccgtgtggcacaagcttttgtccaaacagcgccggcgggcagtcgtggcctgtttccgtatgacgcccctgtacaacctgcccacgcaccgggcatgtaacatgttcctggagagctacaaggctgcatggatcctgactgaagaccacagttttgaggaccgcatgatagatgacctttcaaaagctggggagcaggaggaggaggaggaagaggtggaagagaagaagccagaccccctgcaccagttggtcctgcacttcagccgcactgccctgacggaaaagagcaaactggatgaggattacctgtacatggcctatgctgatatcatggcaaagagctgccacctggaggagggaggggagaacggtgaagctgaagaggaggttgaggtctcctttgaggagaaacagatggagaagcagaggctcttgtaccagcaagcacggctgcacacccggggggcggccgagatggtgctgcagatgatcagtgcctgcaaaggagagacaggtgccatggtgtcctccaccctgaagctgggcatctccatcctcaatggaggcaatgctgaggtccagcagaaaatgctggattatcttaaggacaagaaggaagttggcttcttccagagtatccaggcactgatgcaaacatgcagcgtcctggatctcaatgcctttgagagacagaacaaggccgaggggctgggcatggtgaatgagga

SEQ ID NO: 178688 - DNA, 14850 bp, Homo sapiens
  Payload ID: 15211
  Gene Symbol: RYR2
  Gene Name: ryanodine receptor 2 (cardiac)
  ENST ID: ENST00000360064
  CDS Start-End: 1-14850
gatgatgaagtggttctgcagtgcaccgcaaccatccacaaagaacaacagaagctatgcttggcagcagaaggatttggcaacagactttgtttcttggagtccacttccaattccaagaatgtgcccccagacctctccatctgcacctttgtgctggagcagtccctctctgtccgggcgctgcaggagatgctggctaacaccgtggagaaatcagaagggcaagttgatgtggaaaaatggctcttctctctaaagactgctcaaggtggtggtcatcgaacactcctctacggacatgccatattgctgcgccattcctatagtggcatgtatctgtgctgcctgtccacctcccggtcttcaactgataagctggcttttgatgttggcttgcaagaggacaccacaggggaggcttgttggtggaccatacaccctgcctctaagcagcgatcagaaggagaaaaagtacgagttggagatgacctcatcttagttagcgtgtcctctgaaaggtacttgcacttgtcttatggcaacggcagcttacacgtggatgccgctttccagcagactctctggagcgtggccccaatcagctcaggaagtgaggcagcccaagggtatctcattggtggtgatgtcctcaggttgctgcatggacacatggacgagtgtctcactgtcccttcaggagaacatggtgaagagcagcggagaactgttcattatgaaggtggcgctgtgtctgttcatgcacgttccctttggagactagagacgctaagagttgcgtggagtggaagccacataagatggggacagccattccgactacgccatgtcacaacaggaaaatacttgagtctcatggaagacaaaaaccttctactcatggacaaagagaaagctgatgtaaaatcaacagcatttaccttccggtcttccaaggaaaaattggatgtaggggtgagaaaagaagtagatggcatgggaacatctgaaataaaatacggtgactcagtatgctatatacaacatgtagacacaggcctatggcttacttaccagtctgtggacgtgaaatccgtgagaatgggatctatacaacgtaaggctattatgcatcatgaaggccacatggatgatggcataagtttgtcgagatcccagcatgaagaatcacgcacagcccgagttatccggagcacagtcttccttttcaatagatttataaggggccttgatgctctcagcaagaaagcgaaggcttccacagtcgatttgcctatagagtccgtaagcctaagtctgcaggatctcattggctacttccaccccccagatgagcatttagagcatgaagacaaacagaacagactacgagccctgaagaatcggcaaaatctcttccaggaagagggaatgatcaacctcgtgcttgagtgcatagaccgtttgcacgtctacagcagtgcagcacactttgctgatgttgctgggcgagaagcaggagagtcttggaaatccattctgaattctctgtatgagttgctggcggctctaattagaggaaatcgtaaaaactgtgctcaattttctggctccctcgactggttgatcagcagattggaaagactggaagcttcttcaggcattctggaagttttacactgtgttttagtagaaagtccagaagctctaaatattattaaagaaggacatattaaatctattatctcacttttagacaaacatggaagaaatcacaaggttctggatgtcttgtgctcactctgtgtttgccacggggttgcagtccgttctaaccagcatctcatctgtgacaatctcctaccaggaagagacttgttattgcagacacgtcttgtgaaccatgtcagcagcatgagacccaatatttttctgggcgtcagtgaaggttctgctcagtataagaaatggtactatgaattgatggtggaccacacagagccctttgtgacagctgaagcaactcacctgcgagtgggctgggcttccactgaaggatattctccctaccctggagggggcgaagagtggggtggaaatggtgttggagatgatctcttctcctatggatttgatggccttcatctctggtcaggttgtattgctcgtactgtaagctcaccaaaccaacatctgttaagaactgatgatgtcatcagttgctgtttagatctgagtgccccaagcatctcgttccgaattaatggacaacctgttcaaggaatgtttgagaatttcaacatcgatggcctcttctttccagtcgttagtttctctgcaggaataaaagtacgctttctgcttggagggcgacatggagaattcaaatttcttcctccacctgggtatgctccttgttatgaagctgttctgccaaaagaaaagttgaaagtggaacacagccgagagtacaagcaagaaagaacttacacacgcgacctgctgggccccacagtttccctgacgcaagctgccttcacacccatccctgtggataccagccagatcgtgttgcctcctcatctagaaagaataagagaaaaactggcagagaatatccatgaactctgggttatgaataaaattgagcttggctggcagtatggtccggttagagatgacaacaagagacaacacccatgcctggtggagttctccaagctgcctgaacaggagcgcaattacaacttacaaatgtcgcttgagaccctgaagactttgttggcattaggatgtcatgtgggtatatcagatgaacatgctgaagacaaggtgaaaaaaatgaagctacccaagaattaccagctgacaagtggatacaagcctgcccctatggacctgagctttatcaaactcaccccatcacaagaagcaatggtggacaagttggcagaaaatgcacataatgtgtgggcgcgggatcgaatccggcagggctggacttatggcatccaacaggacgtaaagaacagaagaaatcctcgccttgttccctacactcttctggatgaccgaaccaagaaatccaacaaggacagcctccgcgaggctgtgcgcacgctgctggggtacggctacaacttggaagcaccagatcaagatcatgcagccagagccgaagtgtgcagcggcaccggggaaaggttccgaatcttccgtgccgagaagacctatgcagtgaaggccggacggtggtattttgaatttgagacggtcactgctggagacatgagggttggttggagtcgtcctggttgtcaaccggatcaggagcttggctcagatgaacgtgcctttgcctttgatggcttcaaggcccagcggtggcatcagggcaatgaacactatgggcgctcttggcaagcaggcgatgtcgtggggtgtatggttgacatgaacgaacacaccatgatgttcacactgaatggtgaaatccttcttgatgattcaggctcagaactggctttcaaggactttgatgttggcgatggattcatacctgtgtgtagccttggagtggctcaagtgggtaggatgaactttggaaaggatgtcagcaccttgaaatatttcaccatctgtggcttacaagagggctatgaaccatttgccgttaatacaaacagggatattaccatgtggctgagcaagaggcttcctcagtttcttcaagttccatcaaaccatgaacatatagaggtgaccagaatagacggcaccatagacagttccccatgtttaaaggtcactcagaagtcttttggttctcagaacagcaacactgatatcatgttttatcgcctgagcatgccgatcgagtgcgcggaggtcttctccaagacggtggctggagggctccctggggctggcctttttgggcccaagaatgacttggaagattatgatgctgattctgactttgaggttctgatgaagacagctcatggccatctagtgcccgatcgtgttgacaaagacaaagaagctactaaaccagagtttaacaaccacaaagattatgcccaggaaaagccctctcgtctgaaacaaagatttttgcttagaagaacaaagccagattacagcacaagccattctgcaagactcaccgaagatgtccttgctgatgatcgggatgactatgatttcttgatgcaaacgtccacgtactattactcagtgagaatctttcctggacaagaacctgctaatgtctgggtgggctggattacatcagatttccatcagtatgacacaggctttgacttggacagagttcgcacagtaacagttactctaggagatgaaaaaggaaaagtgcatgaaagcatcaaacgcagcaactgctatatggtatgtgcgggtgagagcatgagccccgggcaaggacgcaacaataatggactggagattggctgtgtggtggatgctgccagcgggctgctcacattcattgccaatggcaaggaactgagcacatactatcaggtggaaccgagtacaaaattatttcctgcggtttttgcacaagctacaagtcccaatgttttccagtttgagttgggaagaataaagaatgtgatgcctctctcggcgggattattcaagagtgagcacaagaaccccgtgccgcagtgccccccgcgcctccacgtgcagttcctgtcacacgtcctgtggagcagaatgcccaaccagtttttgaaggtagatgtgtctcgaataagtgaacgccaaggctggttggtgcagtgtttggatcctctgcagttcatgtctcttcatatccctgaggaaaacagatctgttgacatcttagagttgacagagcaggaggaattgctgaaatttcactatcacactctccggctctactcagccgtctgtgctcttgggaaccaccgggtggcccatgccctgtgcagccatgtggatgaacctcagctcctctatgccattgagaacaagtacatgcctggtttgctgcgtgctggctactatgacctgctgattgacatccacctgagctcctatgccactgccaggctcatgatgaacaacgagtacattgtccccatgacggaggagacgaagagcatcaccctgttccctgatgagaacaaaaaacacggccttccagggatcggcctcagcacctccctcaggccacggatgcagttttcctcccccagttttgtaagcattagtaatgaatgttaccagtacagtccagagttcccactggacatcctcaagtccaaaaccatacagatgctgacagaagctgttaaagagggcagtcttcatgcccgggacccagttggagggactactgaattcctctttgtacctctcatcaagcttttctataccctgctgatcatgggcatctttcacaacgaggacttgaagcacatcttgcagttgattgagcccagtgtgtttaaagaagctgccactccggaggaggagagtgacacgctggagaaagagctcagtgtggacgatgcaaagctgcaaggagctggtgaggaagaagccaaggggggcaagcggcccaaggaaggcctgctccaaatgaaactgccagagccagttaaattgcagatgtgcctactgcttcagtacctctgtgactgccaggtccggcaccggatagaagccattgtagccttttcagatgattttgtggctaagctccaagacaatcaacgtttccgatacaacgaagtcatgcaagccttaaacatgtcagctgcactcacagccaggaagacaaaggaatttagatcaccacctcaagaacagatcaatatgcttctcaattttaaggatgacaaaagtgaatgtccatgtccagaagaaattcgtgaccaactattggatttccatgaagatttgatgacacattgtggaattgagctggatgaagatgggtctctggatggaaacagtgatttaacaattagagggcgtctgctatccctggtagaaaaggtgacatatctgaagaagaagcaagcagaaaaaccagttgagagtgactccaaaaagtcctccactctgcagcagctgatttctgagaccatggtccgatgggctcaggagtctgtcattgaagaccccgagctggtgagggccatgtttgtgttgctccatcggcagtatgacggcattgggggtcttgttcgggccctgccaaagacctacacgataaatggtgtgtccgtggaggacaccatcaacctgctggcatcccttggtcagattcggtccctgctgagtgtgagaatgggcaaagaagaagagaagctcatgattcgtggattaggggatattatgaataacaaagtgttttaccagcaccctaatctcatgagggcactggggatgcacgagactgtgatggaggtcatggtgaacgtccttggaggtggagagtccaaggaaatcacctttcccaagatggtggccaactgttgccgttttctctgttacttctgtcgtataagtaggcagaatcaaaaagctatgtttgatcatctcagttatttactggaaaacagcagtgttggtcttgcctccccagctatgagaggttcaacaccactggatgtggctgcagcttcggtgatggataataatgaactagcattagctctgcgtgagccggatctagaaaaggtagttcgttatttggctggttgtggactgcaaagttgccagatgctggtgtctaagggctatccagacattgggtggaacccagttgaaggagagagatatcttgactttcttagatttgctgtcttctgtaatggggagagtgtggaggaaaatgcaaatgtcgtggtgagattgctcattcggaggcctgagtgttttggtcctgctttgagaggagaaggtgggaatgggcttcttgcagcaatggaagaagccatcaaaatcgccgaggatccttcccgagatggtccctcaccaaatagcggatccagtaaaacacttgacacagaggaggaggaagatgacactatccacatggggaacgcgatcatgaccttctattcagctttgattgacctcttgggacgctgtgctcctgagatgcatttgattcatgccgggaagggagaagccatcagaattaggtccattttgagatccctcattcccctgggagatttggtgggcgttatcagcatcgcttttcagatgccaacaatagccaaagatgggaatgtggtggaacctgacatgtctgcggggttttgcccagatcacaaggcagccatggttttattccttgacagggtctatgggattgaggttcaagacttcctcctccatcttcttgaggttggctttctgccagatctccgggcggctgcttctttagatacggcagctttgagtgctacagacatggccttggccctcaatcggtacctttgcacagccgtcttgccattgttaacaagatgtgctcctctctttgctggcacagagcaccacgcttctctcattgactcattacttcatactgtgtatagactttctaagggctgttcacttaccaaagctcagcgggattccatagaagtttgtttactctctatttgtggacaactgagaccttctatgatgcagcacttactcagaagattagtatttgatgttccattattaaatgaacacgcaaagatgcctcttaaactgctgacaaatcattatgaaagatgctggaaatattactgcctgcctggagggtggggaaactttggtgctgcctcagaagaagaacttcatttatcaagaaagttgttctggggcatttttgatgccctgtctcaaaagaaatatgaacaagaacttttcaaactggcactgccttgcctgagtgcagttgcgggagctttgcctccagactacatggagtcaaattatgtcagtatgatggaaaaacagtcatcaatggattctgaagggaactttaacccacaacctgttgatacctcaaatattacaattcctgagaaattggaatacttcattaacaaatatgcagaacactcccatgacaaatggtcaatggacaagttggcaaatggatggatttatggagaaatatattcagactcttctaaggttcagccattaatgaagccatataagctattgtctgaaaaggaaaaagaaatttatcgctggccaatcaaagaatctttaaaaactatgctggcttggggctggagaattgaaagaactcgggagggagacagcatggccctttacaaccggactcgtcgtatttctcagacaagccaggtttctgtggacgctgcccatggttacagtccccgggccattgacatgagcaatgttacactatctagagacctgcatgctatggcagaaatgatggctgaaaactaccataatatatgggcaaagaaaaagaaaatggagttggagtccaaaggaggaggaaaccatcctctgctggtgccctatgatacactgacagccaaagagaaagccaaggatagagaaaaagcacaggacatcctcaagttcttgcagatcaatggatatgctgtatccagaggatttaaggacctggaactggacacgccttctattgagaaacgatttgcctatagtttcctccaacaactcattcgctatgtggatgaagcccatcagtatatcctggagtttgatggtggcagcagaggcaaaggagaacatttcccttatgaacaagaaatcaagttctttgcaaaagtcgttcttcctttaattgatcagtatttcaaaaaccatcgtttatacttcttatctgcagcaagcagacctctctgctctggaggacatgcttccaacaaagagaaagaaatggtgactagcctattctgcaaacttggagttcttgtcaggcataggatttcactatttggcaatgatgcaacatcaattgtcaactgtcttcatattttgggtcagactttggatgcaaggacagtgatgaagactggcctggagagtgttaaaagtgcactcagagcttttctggacaacgctgcagaggatctggagaagaccatggaaaacctcaagcagggccagttcactcacacccgaaaccagcccaaaggggttactcagattatcaattacaccacagtggccctgctgccaatgctgtcttcattatttgaacatattggccagcatcagttcggagaagacctaatattggaagatgtccaggtgtcttgttatagaattctgactagcttatatgctttgggaaccagcaagagtatttacgtggagaggcaacgttctgcattaggagaatgtctagctgcctttgctggtgcttttcctgtagcatttttggaaactcatctggacaaacataatatttactccatctacaataccaagtcttcacgagaaagagcagctctcagtttgccaactaatgtggaagatgtttgtccaaacataccgtctttggagaaactcatggaagaaatcgtggaattagccgagtccggcattcgctacactcaaatgccacatgtcatggaagtcatactgcccatgctttgcagctacatgtctcgttggtgggagcatggacctgagaacaatccagaacgggccgagatgtgctgcacagccctgaactcagagcacatgaacacacttctagggaacatattgaaaatcatatataataacttggggattgatgagggagcctggatgaagaggctagcagtgttttcccagcctataataaataaagtgaaacctcagctcttgaaaactcatttcttgccgttaatggagaaactcaagaaaaaggcagctacggtggtgtctgaggaagaccacctgaaagctgaggccaggggggacatgtcggaggcagaactcctcatcctagatgagttcaccacactggccagagatctctatgccttctaccctctcttgattagatttgtggactataacagggcaaagtggctaaaggagcctaacccagaagcagaggagctcttccgcatggtggctgaagtgtttatctactggtcgaagtcccataatttcaaaagagaagagcagaacttcgttgtacagaatgaaatcaacaatatgtctttccttattactgataccaagtcaaagatgtcaaaggcagctgtttctgatcaggaaaggaagaaaatgaagcgcaaaggagatcggtattccatgcagacctctctgattgtagcagctctgaagcggttactgcccattgggttgaacatctgtgcccctggggaccaggagctcattgctctggccaaaaatcgatttagcctgaaagataccgaggatgaagtacgagatataatccgcagcaatattcatttacaaggcaagttggaggatcctgctattagatggcaaatggctctttacaaagacttaccaaacaggactgatgatacctcagatccagagaagacggtagaaagagtattggatatagcaaatgtgctttttcatcttgaacagaagtctaaacgtgtgggtcggagacattactgtctggtggaacatcctcagagatctaaaaaggctgtatggcataaactactgtccaagcagaggaaaagggctgttgtagcctgcttccggatggcccccttatataatctgccaaggcatcgggctgtcaatctctttcttcagggatatgaaaagtcttggattgaaacagaagaacattactttgaagataaactgatagaagatttagcaaaacctggggctgaacctccagaagaagatgaaggcactaagagagttgatcctctacatcagctgatccttctgtttagtcggacagctttaacagagaaatgcaaactggaggaagattttttatatatggcctatgcagatattatggcaaagagttgtcatgatgaggaagatgacgatggtgaagaggaagtgaagagttttgaagaaaaagaaatggaaaagcaaaagcttctataccagcaagcccgactccacgatcgtggcgcggctgagatggtgctacagacaatcagtgccagcaaaggtgaaactggaccaatggtagcagctactctgaaacttggaattgctattttaaatggtgggaactccacagtacagcagaaaatgcttgactacctcaaggagaaaaaggatgtgggcttctttcagagcctggccggcctgatgcagtcatgtagtgtccttgacctaaatgcatttgagcgacaaaacaaagctgaaggtcttgggatggtgacagaggaaggatcaggagaaaaggttctgcaggacgatgagttcacctgtgacctcttccgattcctgcaactactctgtgagggacacaactcagattttcagaattatctgagaactcagactggcaataatacaactgtcaacataattatctccactgtagactacctactgagagttcaggaatcaattagtgacttttattggtattactctgggaaagatgttattgatgaacaaggacaacggaatttctccaaagctatccaagtggcaaaacaagtctttaacactcttacagagtatattcagggtccttgcactgggaatcaacagagtttggcacacagcaggctgtgggatgctgtggtcggctttcttcatgtgtttgcccatatgcagatgaagctgtcgcaggattccagtcaaattgagctattaaaagaattaatggatctgcagaaggatatggtggtcatgttgctgtccatgttagaaggtaatgttgttaatggaacgattggcaaacagatggtggatatgcttgtggaatcttccaacaacgtggagatgattctcaaattttttgacatgttcttaaaactaaaggatttgacgtcgtctgatacttttaaagaatatgaccccgatggcaagggagtcatttccaagagggacttccacaaagcgatggagagccataagcactacacgcagtcagaaacggaatttcttttgtcttgtgcggagacggatgagaatgaaaccctcgactacgaagagttcgtcaaacgcttccacgaacctgcgaaggacatcggcttcaacgtcgccgtccttctgacaaacctctctgagcacatgcccaacgatacccgacttcagacttttctggaattagcagagagcgtcctgaattatttccagccctttctgggccgcatcgaaatcatgggaagcgccaaacgcatcgagagggtctattttgaaatcagtgagtccagccgaacccagtgggagaagccccaggtcaaggagtccaaaagacagttcatatttgacgtggtcaacgaaggcggagagaaagagaagatggaactctttgtgaacttctgcgaggacaccatctttgaaatgcagctggcggctcagatctcggagtcggacttgaacgagaggtcagcgaataaggaagaaagcgagaaggagaggccggaagagcaggggccgaggatggctttcttctccattctgacggtcaggtcggccctgtttgcgctcaggtacaatatcttgacccttatgcgaatgctcagtctgaagagcctgaagaagcagatgaaaaaagtaaaaaagatgaccgtgaaggacatggtcacggccttcttttcatcctactggagtattttcatgaccctcttgcacttcgtggccagcgttttcagaggctttttccgcatcatttgcagcctgctgcttgggggaagcctcgtcgaaggtgctaaaaagatcaaagttgcagaactgttagccaacatgccagaccccactcaggatgaggttagaggagatggggaggagggagagaggaaacccctggaagccgccctgccctccgaggatctgaccgacttaaaggagctgacagaggaaagtgaccttctttcggacatctttggcctggatctgaagagagaaggaggacagtacaaactgattcctcataatccaaatgctgggctcagtgacctcatgagcaacccagtccccatgcctgaggtgcaggaaaaatttcaggtaatttatctcgtcacagcagcattctctcggagagcttatgttttgtttgtttgttttcataggggagaagatggagaaaaagaagagaaagccaaggaagacaagggcaaacaaaagttgaggcagcttcacacacacagatacggagaaccagaagtgccagagtcagcattctggaagaaaatcatagcatatcaacagaaacttctaaactattttgctcgcaacttttacaacatgagaatgttagccttatttgtcgcatttgctatcaatttcatcttgctcttttataaggtctccacttcttctgtggttgaaggaaaggagctccccacgagaagttcaagtgaaaatgccaaagtgacaagcctggacagcagctcccatagaatcatcgcagttcactatgtactagaggagagcagcggctacatggagcccacgttgcgtatcttagctattctgcacacggtcatttctttcttctgcatcattggatactactgcttgaaagtcccattggttatttttaagcgagaaaaggaagtggcacggaaattggaatttgatgggctttatattacagaacagccttcagaagatgatattaaaggccagtgggatagactcgtaatcaacacacagtcatttcccaacaactactgggacaaatttgttaaaagaaaggttatggataaatatggagagttctacggccgagacagaatcagtgaattacttggcatggacaaggcagctctggacttcagtgatgccagagaaaagaagaagccaaagaaagacagctccttatcagctgtactgaactccattgatgtgaagtatcagatgtggaaactaggagtcgttttcactgacaactccttcctctacctagcctggtatatgactatgtctgttcttggacactataacaactttttttttgccgctcaccttctcgacattgctatgggattcaagacattaagaaccatcttgtcctcagtaactcacaatggcaaacagctcgtattaaccgttggcttattagctgttgttgtatacctatacactgtggtggcattcaattttttccgaaaattctacaataaaagtgaagatggtgatacaccagatatgaaatgtgacgatatgctaacatgctatatgttccacatgtatgttggagttcgtgctggaggagggatcggggatgaaatcgaagacccagcaggagatgaatatgagatctatcgaatcatctttgacatcactttcttcttctttgttattgtcattctcttggccataatacaaggtctaattattgatgcttttggagaactaagagaccaacaggaacaagtcaaagaagacatggagaccaaatgcttcatctgtgggataggcaatgattacttcgacacagtgccacatggctttgaaacccacactttacaggagcacaacttggctaattacttgttttttctgatgtatcttataaacaaagatgaaacagaacacacaggacaggaatcttatgtctggaagatgtatcaagaaaggtgttgggaatttttcccagcaggggattgcttccggaaacagtatgaagaccagctaaat

SEQ ID NO: 178689 - DNA, 16562 bp, Homo sapiens
  Payload ID: 15211
  Gene Symbol: RYR2
  Gene Name: ryanodine receptor 2 (cardiac)
  Uniprot ID: Q92736
  ENST ID: ENST00000366574
  CDS Start-End: 318-15221
ccgagcggaccgccggctgcaggcagcgagcgcggctgggctgcggggctgcttccccgcgtcctccgggcccgggccgccctcctcccgcacagtgcggagcagggaggccccgcgcctcgaccacccgcgcccgagcgtccgcgcctcctcctccgctctgcaggcggggaccgcccggcgctcggcacccggcagcgcggccccctccagcccccggctcccggcagcagaagcagaaggcagcgccaggggccgccgccgccgccgagctccgcggggctcgggagccggccccggcgaggaggcgcggaaccatggccgatgggggcgagggcgaagacgagatccagttcctgcgaactgatgatgaagtggttctgcagtgcaccgcaaccatccacaaagaacaacagaagctatgcttggcagcagaaggatttggcaacagactttgtttcttggagtccacttccaattccaagaatgtgcccccagacctctccatctgcacctttgtgctggagcagtccctctctgtccgggcgctgcaggagatgctggctaacaccgtggagaaatcagaagggcaagttgatgtggaaaaatggaaattcatgatgaagactgctcaaggtggtggtcatcgaacactcctctacggacatgccatattgctgcgccattcctatagtggcatgtatctgtgctgcctgtccacctcccggtcttcaactgataagctggcttttgatgttggcttgcaagaggacaccacaggggaggcttgttggtggaccatacaccctgcctctaagcagcgatcagaaggagaaaaagtacgagttggagatgacctcatcttagttagcgtgtcctctgaaaggtacttgcacttgtcttatggcaacggcagcttacacgtggatgccgctttccagcagactctctggagcgtggccccaatcagctcaggaagtgaggcagcccaagggtatctcattggtggtgatgtcctcaggttgctgcatggacacatggacgagtgtctcactgtcccttcaggagaacatggtgaagagcagcggagaactgttcattatgaaggtggcgctgtgtctgttcatgcacgttccctttggagactagagacgctaagagttgcgtggagtggaagccacataagatggggacagccattccgactacgccatgtcacaacaggaaaatacttgagtctcatggaagacaaaaaccttctactcatggacaaagagaaagctgatgtaaaatcaacagcatttaccttccggtcttccaaggaaaaattggatgtaggggtgagaaaagaagtagatggcatgggaacatctgaaataaaatacggtgactcagtatgctatatacaacatgtagacacaggcctatggcttacttaccagtctgtggacgtgaaatccgtgagaatgggatctatacaacgtaaggctattatgcatcatgaaggccacatggatgatggcataagtttgtcgagatcccagcatgaagaatcacgcacagcccgagttatccggagcacagtcttccttttcaatagatttataaggggccttgatgctctcagcaagaaagcgaaggcttccacagtcgatttgcctatagagtccgtaagcctaagtctgcaggatctcattggctacttccaccccccagatgagcatttagagcatgaagacaaacagaacagactacgagccctgaagaatcggcaaaatctcttccaggaagagggaatgatcaacctcgtgcttgagtgcatagaccgtttgcacgtctacagcagtgcagcacactttgctgatgttgctgggcgagaagcaggagagtcttggaaatccattctgaattctctgtatgagttgctggcggctctaattagaggaaatcgtaaaaactgtgctcaattttctggctccctcgactggttgatcagcagattggaaagactggaagcttcttcaggcattctggaagttttacactgtgttttagtagaaagtccagaagctctaaatattattaaagaaggacatattaaatctattatctcacttttagacaaacatggaagaaatcacaaggttctggatgtcttgtgctcactctgtgtttgccacggggttgcagtccgttctaaccagcatctcatctgtgacaatctcctaccaggaagagacttgttattgcagacacgtcttgtgaaccatgtcagcagcatgagacccaatatttttctgggcgtcagtgaaggttctgctcagtataagaaatggtactatgaattgatggtggaccacacagagccctttgtgacagctgaagcaactcacctgcgagtgggctgggcttccactgaaggatattctccctaccctggagggggcgaagagtggggtggaaatggtgttggagatgatctcttctcctatggatttgatggccttcatctctggtcaggttgtattgctcgtactgtaagctcaccaaaccaacatctgttaagaactgatgatgtcatcagttgctgtttagatctgagtgccccaagcatctcgttccgaattaatggacaacctgttcaaggaatgtttgagaatttcaacatcgatggcctcttctttccagtcgttagtttctctgcaggaataaaagtacgctttctgcttggagggcgacatggagaattcaaatttcttcctccacctgggtatgctccttgttatgaagctgttctgccaaaagaaaagttgaaagtggaacacagccgagagtacaagcaagaaagaacttacacacgcgacctgctgggccccacagtttccctgacgcaagctgccttcacacccatccctgtggataccagccagatcgtgttgcctcctcatctagaaagaataagagaaaaactggcagagaatatccatgaactctgggttatgaataaaattgagcttggctggcagtatggtccggttagagatgacaacaagagacaacacccatgcctggtggagttctccaagctgcctgaacaggagcgcaattacaacttacaaatgtcgcttgagaccctgaagactttgttggcattaggatgtcatgtgggtatatcagatgaacatgctgaagacaaggtgaaaaaaatgaagctacccaagaattaccagctgacaagtggatacaagcctgcccctatggacctgagctttatcaaactcaccccatcacaagaagcaatggtggacaagttggcagaaaatgcacataatgtgtgggcgcgggatcgaatccggcagggctggacttatggcatccaacaggacgtaaagaacagaagaaatcctcgccttgttccctacactcttctggatgaccgaaccaagaaatccaacaaggacagcctccgcgaggctgtgcgcacgctgctggggtacggctacaacttggaagcaccagatcaagatcatgcagccagagccgaagtgtgcagcggcaccggggaaaggttccgaatcttccgtgccgagaagacctatgcagtgaaggccggacggtggtattttgaatttgagacggtcactgctggagacatgagggttggttggagtcgtcctggttgtcaaccggatcaggagcttggctcagatgaacgtgcctttgcctttgatggcttcaaggcccagcggtggcatcagggcaatgaacactatgggcgctcttggcaagcaggcgatgtcgtggggtgtatggttgacatgaacgaacacaccatgatgttcacactgaatggtgaaatccttcttgatgattcaggctcagaactggctttcaaggactttgatgttggcgatggattcatacctgtgtgtagccttggagtggctcaagtgggtaggatgaactttggaaaggatgtcagcaccttgaaatatttcaccatctgtggcttacaagagggctatgaaccatttgccgttaatacaaacagggatattaccatgtggctgagcaagaggcttcctcagtttcttcaagttccatcaaaccatgaacatatagaggtgaccagaatagacggcaccatagacagttccccatgtttaaaggtcactcagaagtcttttggttctcagaacagcaacactgatatcatgttttatcgcctgagcatgccgatcgagtgcgcggaggtcttctccaagacggtggctggagggctccctggggctggcctttttgggcccaagaatgacttggaagattatgatgctgattctgactttgaggttctgatgaagacagctcatggccatctagtgcccgatcgtgttgacaaagacaaagaagctactaaaccagagtttaacaaccacaaagattatgcccaggaaaagccctctcgtctgaaacaaagatttttgcttagaagaacaaagccagattacagcacaagccattctgcaagactcaccgaagatgtccttgctgatgatcgggatgactatgatttcttgatgcaaacgtccacgtactattactcagtgagaatctttcctggacaagaacctgctaatgtctgggtgggctggattacatcagatttccatcagtatgacacaggctttgacttggacagagttcgcacagtaacagttactctaggagatgaaaaaggaaaagtgcatgaaagcatcaaacgcagcaactgctatatggtatgtgcgggtgagagcatgagccccgggcaaggacgcaacaataatggactggagattggctgtgtggtggatgctgccagcgggctgctcacattcattgccaatggcaaggaactgagcacatactatcaggtggaaccgagtacaaaattatttcctgcggtttttgcacaagctacaagtcccaatgttttccagtttgagttgggaagaataaagaatgtgatgcctctctcggcgggattattcaagagtgagcacaagaaccccgtgccgcagtgccccccgcgcctccacgtgcagttcctgtcacacgtcctgtggagcagaatgcccaaccagtttttgaaggtagatgtgtctcgaataagtgaacgccaaggctggttggtgcagtgtttggatcctctgcagttcatgtctcttcatatccctgaggaaaacagatctgttgacatcttagagttgacagagcaggaggaattgctgaaatttcactatcacactctccggctctactcagccgtctgtgctcttgggaaccaccgggtggcccatgccctgtgcagccatgtggatgaacctcagctcctctatgccattgagaacaagtacatgcctggtttgctgcgtgctggctactatgacctgctgattgacatccacctgagctcctatgccactgccaggctcatgatgaacaacgagtacattgtccccatgacggaggagacgaagagcatcaccctgttccctgatgagaacaaaaaacacggccttccagggatcggcctcagcacctccctcaggccacggatgcagttttcctcccccagttttgtaagcattagtaatgaatgttaccagtacagtccagagttcccactggacatcctcaagtccaaaaccatacagatgctgacagaagctgttaaagagggcagtcttcatgcccgggacccagttggagggactactgaattcctctttgtacctctcatcaagcttttctataccctgctgatcatgggcatctttcacaacgaggacttgaagcacatcttgcagttgattgagcccagtgtgtttaaagaagctgccactccggaggaggagagtgacacgctggagaaagagctcagtgtggacgatgcaaagctgcaaggagctggtgaggaagaagccaaggggggcaagcggcccaaggaaggcctgctccaaatgaaactgccagagccagttaaattgcagatgtgcctactgcttcagtacctctgtgactgccaggtccggcaccggatagaagccattgtagccttttcagatgattttgtggctaagctccaagacaatcaacgtttccgatacaacgaagtcatgcaagccttaaacatgtcagctgcactcacagccaggaagacaaaggaatttagatcaccacctcaagaacagatcaatatgcttctcaattttaaggatgacaaaagtgaatgtccatgtccagaagaaattcgtgaccaactattggatttccatgaagatttgatgacacattgtggaattgagctggatgaagatgggtctctggatggaaacagtgatttaacaattagagggcgtctgctatccctggtagaaaaggtgacatatctgaagaagaagcaagcagaaaaaccagttgagagtgactccaaaaagtcctccactctgcagcagctgatttctgagaccatggtccgatgggctcaggagtctgtcattgaagaccccgagctggtgagggccatgtttgtgttgctccatcggcagtatgacggcattgggggtcttgttcgggccctgccaaagacctacacgataaatggtgtgtccgtggaggacaccatcaacctgctggcatcccttggtcagattcggtccctgctgagtgtgagaatgggcaaagaagaagagaagctcatgattcgtggattaggggatattatgaataacaaagtgttttaccagcaccctaatctcatgagggcactggggatgcacgagactgtgatggaggtcatggtgaacgtccttggaggtggagagtccaaggaaatcacctttcccaagatggtggccaactgttgccgttttctctgttacttctgtcgtataagtaggcagaatcaaaaagctatgtttgatcatctcagttatttactggaaaacagcagtgttggtcttgcctccccagctatgagaggttcaacaccactggatgtggctgcagcttcggtgatggataataatgaactagcattagctctgcgtgagccggatctagaaaaggtagttcgttatttggctggttgtggactgcaaagttgccagatgctggtgtctaagggctatccagacattgggtggaacccagttgaaggagagagatatcttgactttcttagatttgctgtcttctgtaatggggagagtgtggaggaaaatgcaaatgtcgtggtgagattgctcattcggaggcctgagtgttttggtcctgctttgagaggagaaggtgggaatgggcttcttgcagcaatggaagaagccatcaaaatcgccgaggatccttcccgagatggtccctcaccaaatagcggatccagtaaaacacttgacacagaggaggaggaagatgacactatccacatggggaacgcgatcatgaccttctattcagctttgattgacctcttgggacgctgtgctcctgagatgcatttgattcatgccgggaagggagaagccatcagaattaggtccattttgagatccctcattcccctgggagatttggtgggcgttatcagcatcgcttttcagatgccaacaatagccaaagatgggaatgtggtggaacctgacatgtctgcggggttttgcccagatcacaaggcagccatggttttattccttgacagggtctatgggattgaggttcaagacttcctcctccatcttcttgaggttggctttctgccagatctccgggcggctgcttctttagatacggcagctttgagtgctacagacatggccttggccctcaatcggtacctttgcacagccgtcttgccattgttaacaagatgtgctcctctctttgctggcacagagcaccacgcttctctcattgactcattacttcatactgtgtatagactttctaagggctgttcacttaccaaagctcagcgggattccatagaagtttgtttactctctatttgtggacaactgagaccttctatgatgcagcacttactcagaagattagtatttgatgttccattattaaatgaacacgcaaagatgcctcttaaactgctgacaaatcattatgaaagatgctggaaatattactgcctgcctggagggtggggaaactttggtgctgcctcagaagaagaacttcatttatcaagaaagttgttctggggcatttttgatgccctgtctcaaaagaaatatgaacaagaacttttcaaactggcactgccttgcctgagtgcagttgcgggagctttgcctccagactacatggagtcaaattatgtcagtatgatggaaaaacagtcatcaatggattctgaagggaactttaacccacaacctgttgatacctcaaatattacaattcctgagaaattggaatacttcattaacaaatatgcagaacactcccatgacaaatggtcaatggacaagttggcaaatggatggatttatggagaaatatattcagactcttctaaggttcagccattaatgaagccatataagctattgtctgaaaaggaaaaagaaatttatcgctggccaatcaaagaatctttaaaaactatgctggcttggggctggagaattgaaagaactcgggagggagacagcatggccctttacaaccggactcgtcgtatttctcagacaagccaggtttctgtggacgctgcccatggttacagtccccgggccattgacatgagcaatgttacactatctagagacctgcatgctatggcagaaatgatggctgaaaactaccataatatatgggcaaagaaaaagaaaatggagttggagtccaaaggaggaggaaaccatcctctgctggtgccctatgatacactgacagccaaagagaaagccaaggatagagaaaaagcacaggacatcctcaagttcttgcagatcaatggatatgctgtatccagaggatttaaggacctggaactggacacgccttctattgagaaacgatttgcctatagtttcctccaacaactcattcgctatgtggatgaagcccatcagtatatcctggagtttgatggtggcagcagaggcaaaggagaacatttcccttatgaacaagaaatcaagttctttgcaaaagtcgttcttcctttaattgatcagtatttcaaaaaccatcgtttatacttcttatctgcagcaagcagacctctctgctctggaggacatgcttccaacaaagagaaagaaatggtgactagcctattctgcaaacttggagttcttgtcaggcataggatttcactatttggcaatgatgcaacatcaattgtcaactgtcttcatattttgggtcagactttggatgcaaggacagtgatgaagactggcctggagagtgttaaaagtgcactcagagcttttctggacaacgctgcagaggatctggagaagaccatggaaaacctcaagcagggccagttcactcacacccgaaaccagcccaaaggggttactcagattatcaattacaccacagtggccctgctgccaatgctgtcttcattatttgaacatattggccagcatcagttcggagaagacctaatattggaagatgtccaggtgtcttgttatagaattctgactagcttatatgctttgggaaccagcaagagtatttacgtggagaggcaacgttctgcattaggagaatgtctagctgcctttgctggtgcttttcctgtagcatttttggaaactcatctggacaaacataatatttactccatctacaataccaagtcttcacgagaaagagcagctctcagtttgccaactaatgtggaagatgtttgtccaaacataccgtctttggagaaactcatggaagaaatcgtggaattagccgagtccggcattcgctacactcaaatgccacatgtcatggaagtcatactgcccatgctttgcagctacatgtctcgttggtgggagcatggacctgagaacaatccagaacgggccgagatgtgctgcacagccctgaactcagagcacatgaacacacttctagggaacatattgaaaatcatatataataacttggggattgatgagggagcctggatgaagaggctagcagtgttttcccagcctataataaataaagtgaaacctcagctcttgaaaactcatttcttgccgttaatggagaaactcaagaaaaaggcagctacggtggtgtctgaggaagaccacctgaaagctgaggccaggggggacatgtcggaggcagaactcctcatcctagatgagttcaccacactggccagagatctctatgccttctaccctctcttgattagatttgtggactataacagggcaaagtggctaaaggagcctaacccagaagcagaggagctcttccgcatggtggctgaagtgtttatctactggtcgaagtcccataatttcaaaagagaagagcagaacttcgttgtacagaatgaaatcaacaatatgtctttccttattactgataccaagtcaaagatgtcaaaggcagctgtttctgatcaggaaaggaagaaaatgaagcgcaaaggagatcggtattccatgcagacctctctgattgtagcagctctgaagcggttactgcccattgggttgaacatctgtgcccctggggaccaggagctcattgctctggccaaaaatcgatttagcctgaaagataccgaggatgaagtacgagatataatccgcagcaatattcatttacaaggcaagttggaggatcctgctattagatggcaaatggctctttacaaagacttaccaaacaggactgatgatacctcagatccagagaagacggtagaaagagtattggatatagcaaatgtgctttttcatcttgaacagaagtctaaacgtgtgggtcggagacattactgtctggtggaacatcctcagagatctaaaaaggctgtatggcataaactactgtccaagcagaggaaaagggctgttgtagcctgcttccggatggcccccttatataatctgccaaggcatcgggctgtcaatctctttcttcagggatatgaaaagtcttggattgaaacagaagaacattactttgaagataaactgatagaagatttagcaaaacctggggctgaacctccagaagaagatgaaggcactaagagagttgatcctctacatcagctgatccttctgtttagtcggacagctttaacagagaaatgcaaactggaggaagattttttatatatggcctatgcagatattatggcaaagagttgtcatgatgaggaagatgacgatggtgaagaggaagtgaagagttttgaagaaaaagaaatggaaaagcaaaagcttctataccagcaagcccgactccacgatcgtggcgcggctgagatggtgctacagacaatcagtgccagcaaaggtgaaactggaccaatggtagcagctactctgaaacttggaattgctattttaaatggtgggaactccacagtacagcagaaaatgcttgactacctcaaggagaaaaaggatgtgggcttctttcagagcctggccggcctgatgcagtcatgtagtgtccttgacctaaatgcatttgagcgacaaaacaaagctgaaggtcttgggatggtgacagaggaaggatcaggagaaaaggttctgcaggacgatgagttcacctgtgacctcttccgattcctgcaactactctgtgagggacacaactcagattttcagaattatctgagaactcagactggcaataatacaactgtcaacataattatctccactgtagactacctactgagagttcaggaatcaattagtgacttttattggtattactctgggaaagatgttattgatgaacaaggacaacggaatttctccaaagctatccaagtggcaaaacaagtctttaacactcttacagagtatattcagggtccttgcactgggaatcaacagagtttggcacacagcaggctgtgggatgctgtggtcggctttcttcatgtgtttgcccatatgcagatgaagctgtcgcaggattccagtcaaattgagctattaaaagaattaatggatctgcagaaggatatggtggtcatgttgctgtccatgttagaaggtaatgttgttaatggaacgattggcaaacagatggtggatatgcttgtggaatcttccaacaacgtggagatgattctcaaattttttgacatgttcttaaaactaaaggatttgacgtcgtctgatacttttaaagaatatgaccccgatggcaagggagtcatttccaagagggacttccacaaagcgatggagagccataagcactacacgcagtcagaaacggaatttcttttgtcttgtgcggagacggatgagaatgaaaccctcgactacgaagagttcgtcaaacgcttccacgaacctgcgaaggacatcggcttcaacgtcgccgtccttctgacaaacctctctgagcacatgcccaacgatacccgacttcagacttttctggaattagcagagagcgtcctgaattatttccagccctttctgggccgcatcgaaatcatgggaagcgccaaacgcatcgagagggtctattttgaaatcagtgagtccagccgaacccagtgggagaagccccaggtcaaggagtccaaaagacagttcatatttgacgtggtcaacgaaggcggagagaaagagaagatggaactctttgtgaacttctgcgaggacaccatctttgaaatgcagctggcggctcagatctcggagtcggacttgaacgagaggtcagcgaataaggaagaaagcgagaaggagaggccggaagagcaggggccgaggatggctttcttctccattctgacggtcaggtcggccctgtttgcgctcaggtacaatatcttgacccttatgcgaatgctcagtctgaagagcctgaagaagcagatgaaaaaagtaaaaaagatgaccgtgaaggacatggtcacggccttcttttcatcctactggagtattttcatgaccctcttgcacttcgtggccagcgttttcagaggctttttccgcatcatttgcagcctgctgcttgggggaagcctcgtcgaaggtgctaaaaagatcaaagttgcagaactgttagccaacatgccagaccccactcaggatgaggttagaggagatggggaggagggagagaggaaacccctggaagccgccctgccctccgaggatctgaccgacttaaaggagctgacagaggaaagtgaccttctttcggacatctttggcctggatctgaagagagaaggaggacagtacaaactgattcctcataatccaaatgctgggctcagtgacctcatgagcaacccagtccccatgcctgaggtgcaggaaaaatttcaggaacagaaggcaaaagaagaagaaaaggaagaaaaagaagaaaccaaatctgaacctgaaaaagccgagggagaagatggagaaaaagaagagaaagccaaggaagacaagggcaaacaaaagttgaggcagcttcacacacacagatacggagaaccagaagtgccagagtcagcattctggaagaaaatcatagcatatcaacagaaacttctaaactattttgctcgcaacttttacaacatgagaatgttagccttatttgtcgcatttgctatcaatttcatcttgctcttttataaggtctccacttcttctgtggttgaaggaaaggagctccccacgagaagttcaagtgaaaatgccaaagtgacaagcctggacagcagctcccatagaatcatcgcagttcactatgtactagaggagagcagcggctacatggagcccacgttgcgtatcttagctattctgcacacggtcatttctttcttctgcatcattggatactactgcttgaaagtcccattggttatttttaagcgagaaaaggaagtggcacggaaattggaatttgatgggctttatattacagaacagccttcagaagatgatattaaaggccagtgggatagactcgtaatcaacacacagtcatttcccaacaactactgggacaaatttgttaaaagaaaggttatggataaatatggagagttctacggccgagacagaatcagtgaattacttggcatggacaaggcagctctggacttcagtgatgccagagaaaagaagaagccaaagaaagacagctccttatcagctgtactgaactccattgatgtgaagtatcagatgtggaaactaggagtcgttttcactgacaactccttcctctacctagcctggtatatgactatgtctgttcttggacactataacaactttttttttgccgctcaccttctcgacattgctatgggattcaagacattaagaaccatcttgtcctcagtaactcacaatggcaaacagctcgtattaaccgttggcttattagctgttgttgtatacctatacactgtggtggcattcaattttttccgaaaattctacaataaaagtgaagatggtgatacaccagatatgaaatgtgacgatatgctaacatgctatatgttccacatgtatgttggagttcgtgctggaggagggatcggggatgaaatcgaagacccagcaggagatgaatatgagatctatcgaatcatctttgacatcactttcttcttctttgttattgtcattctcttggccataatacaaggtctaattattgatgcttttggagaactaagagaccaacaggaacaagtcaaagaagacatggagaccaaatgcttcatctgtgggataggcaatgattacttcgacacagtgccacatggctttgaaacccacactttacaggagcacaacttggctaattacttgttttttctgatgtatcttataaacaaagatgaaacagaacacacaggacaggaatcttatgtctggaagatgtatcaagaaaggtgttgggaatttttcccagcaggggattgcttccggaaacagtatgaagaccagctaaattaaactcagacccaatcacctctaaaaaccaaaaccctacccctctctctccctctctcaatttctctgctctcttggaaacattttgctgattttgtgaattgccagcgttgtgtgttttctgggagcatcgaagctctgtttcggaagagctgtttcctccccccaccttttgtatttactttgagactaaagactgaagaataatctaaattcatactcagacaaaaaaaggaattctggaaagaaaaccattctggacactgtcataacacacatagatagattttcttctgagactcccggagtcttctcgagctacgagaccttcacagagacacgtggcagccacactcacccagcctctttatttcaccatcctggaaggaaactgtctgtctaatggtcacagagcactgtagcacttaacagattgccatggacaccagttgcgaagggaaatagtgccttactatatgtgggttgagctatgcagaagatacgtgcatgaaaaaacatctttattttctttatgtcgacctttcttttcttagattgattttgtgaggttttttttttttcctttagtcttttctttagtgggggagggtaagaaaagcagtttgcacttaaaaagaaaaaaaaaaaacgggtggtgtgtctcaggacaaaaggaggctcttctcattcagctaaattcacatttgccccccccccccgcccccgcccccatatgctcctgctattattttggtaatgctctgatgcaacattgcaactttatgaaatctttgtatgaaaacaaaaagactgcaaaaaatacactttcaaaagaaaccattcattgcatgtttattatgcaagtttaaatgaacaaagaaaaccttcagaaacaagttgatcaacgtgagagaaatttcatgataattattcatagtaataaagtgtcgtgggcttaattgtatatctggagccagtgtcatccaccaacaatgtgatacaatatgaacttgacagtagttttgggttttgctcattctttcagccacctgtgatcagttttgttgattaaggacttcttgtcaggccattttttaatatcaaagctgaagcaatatccattcagggatttcatcagttgcatcacaaaacacggatgataatatacatcactccattttttccattttgagtccttttaaatgtaatgctaacctttacaattaaaaagtcagattcagaatggaaacaaggtcattttgcaaacattggagctcttttattacaagtctgcttgttaattttagaactgtaaaaccgctctgattaaactatttaactaac

SEQ ID NO: 178690 - DNA, 15552 bp, Homo sapiens
  Payload ID: 15212
  Gene Symbol: RYR3
  Gene Name: ryanodine receptor 3
  Uniprot ID: Q15413
  ENST ID: ENST00000389232
  CDS Start-End: 71-14680
cgcacgccgagcggctgccgggggaagcagaggcgccggaggctggggcaccgccgacgcctcgggagccatggccgaagggggagaaggaggcgaggacgagatccagtttctgaggactgaggatgaagtggtactccagtgcatcgccaccattcataaggagcagaggaagttctgcctggcagccgagggacttgggaatcgcctgtgcttcttggaacccacttcagaagccaagtacattcctccagatctctgcgtctgcaattttgtgctggaacagtccctatctgtcagagccctgcaggaaatgcttgccaacacaggtgaaaatggcggcgaaggggcagcacaaggaggtggccacaggaccctgttatacggccatgcagttctcctgaggcactctttcagcggaatgtatctaacatgcttgactacatcaagatcccagacagacaaacttgcctttgatgtaggtctacgggaacatgccacaggagaagcctgttggtggactatacatcctgcttccaaacagaggtccgaaggagagaaagttcgaattggcgatgacctcatcctcgtcagcgtgtcctctgaaagataccttcatctctcagtatcaaatggtaacatacaagtggatgcctcctttatgcaaacactctggaatgtacatcctacgtgctcaggaagtagcatcgaagaaggatacctacttggtgggcatgtagtacgtcttttccatggtcatgatgaatgtttgacgataccatctacagaccagaatgattcccagcacaggaggatattctacgaagctgggggagctgggactcgagccaggtctctttggagagtggaaccccttcggataagctggagtggcagtaacatcagatggggccaggctttccgactccggcatctcaccacaggccactacctggccttgacagaagaccaaggccttatactgcaagaccgggcaaagtcagacaccaagtccacagctttctctttccgggcatcaaaggaactcaaggagaaattagactccagtcacaagcgagacatagaaggcatgggagttccagaaatcaagtatggagattctgtctgctttgtgcagcatatagccagtggtctgtgggtgacctacaaagcacaagacgccaaaacttcccgcctgggacctctaaaaagaaaggtcatactccatcaggaaggccacatggatgatggattaacactgcagagatgccagcgtgaggagtcccaggctgctcggatcatccggaacactacagccttattcagccagtttgtcagcggaaacaatcgcacagctgcccccatcaccctgcctatagaagaagtcctgcagaccctacaggacttgatcgcctacttccagcccccagaggaggagatgcgacatgaagacaagcagaacaagctccgctcactcaaaaacagacaaaatcttttcaaggaagagggaatgttggcccttgtcttaaattgcattgaccgcttaaatgtctacaatagcgtagcacactttgcagggattgcaagggaagagagtggcatggcctggaaagaaattctgaacctcctctacaaattgctggctgctctcattcgcggaaacagaaacaattgcgctcaattctccaataaccttgattggctcatcagtaaattggacagactagaatcttcctcaggtatcttggaagttttgcactgcatcttaactgaaagcccagaagccttaaatctgatagcggagggccacatcaagtcgatcatctccctgttggataagcacgggcggaatcacaaggttctggatatcctgtgctccctctgtctctgcaatggggttgcagtgagagccaaccagaatctgatctgtgacaacttgctgccccggagaaacctactcctgcagacacgactgattaacgatgtaaccagtatccggccaaacatcttcctgggagtcgcggagggctcagcccagtacaagaagtggtacttcgagctgattatcgaccaggtggaccccttcctaacagcagagcccacacatctgcgggtgggctgggcctcttcttcaggctatgccccatacccaggaggtggagaaggatggggaggcaatggtgttggtgacgacctgtactcctatggctttgatggacttcacctttggtcaggccggatacccagagctgtggcttccatcaaccagcacctcctgagatcggatgacgtggtaagctgctgcctggacctcggggtgcccagcatctcattccgcatcaatgggcagcccgtgcaggggatgtttgagaacttcaacacagacgggctcttcttccctgtgatgagcttttcagcaggtgtcaaagtacgtttcctgatgggtggacgtcatggagagtttaagttcctgcctccctctggctatgccccttgctatgaagccttacttccaaaagagaagatgagattggagcctgtcaaagaatataaacgtgatgctgatggcattagagatctcttgggtaccacccagttcctctcccaagcctctttcatcccatgccccgtagacaccagtcaggttattttgccacctcacctagaaaagatccgagacagactagctgaaaacatccatgagctttggggaatgaataaaatagaacttggctggactttcggcaagatacgagatgacaataaaagacaacacccttgccttgtggagttttcaaagctcccagaaactgagaagaactataacctgcaaatgtcaactgaaaccttaaaaaccctcttggccctggggtgccacattgctcatgttaacccagctgctgaggaggatctcaagaaggtcaaactgcccaaaaactatatgatgtccaacggctataagccagcccctttggatttgtctgatgtgaagctgttacctcctcaagaaattttagtggataagcttgcagaaaatgcacacaatgtttgggcaaaagacagaataaaacaaggatggacctatggcatccaacaggatttgaagaacaaaagaaatccccgtctggtgccatatgcattactggatgagcgtaccaagaagtcaaacagggacagcctgcgggaagctgtgcgcacttttgttggttacgggtataacattgagccatcagaccaagaactagctgactcggctgtggagaaggtcagcatagacaagatccgatttttccgggtagagcgatcttatgcagtgagatctggaaagtggtattttgagtttgaagtggtgactggaggagacatgcgagtcggctgggcgaggccaggctgtcgacctgatgtcgagctgggggccgatgaccaagcctttgtgtttgaaggcaacaggggccagcgttggcatcaaggaagtgggtattttgggcgtacctggcagccaggggatgtggtcggatgtatgattaacctggatgatgcttcaatgatcttcacactgaatggggagctgctgatcaccaacaaaggctctgaacttgccttcgctgactacgagattgagaatggcttcgtgcccatctgctgtctgggtctatctcagatcggccgcatgaatctcgggacagatgccagtaccttcaagttttataccatgtgcggtctccaagagggctttgagccttttgctgtcaacatgaacagagatgttgctatgtggttcagcaagcgcctcccgacgtttgtcaacgtgccaaaggatcatccacacatagaggtcatgaggattgatggcaccatggacagccctccgtgtctcaaggtgacgcataagacatttggcacacagaatagcaatgccgacatgatctattgccgcttgagcatgcctgtcgagtgccactcctccttcagccacagcccctgtctggacagtgaagctttccagaaaaggaaacagatgcaagaaatactctctcatacaacaacacagtgctactacgccatccgcatctttgctggacaggatccatcctgtgtctgggtcggatgggtgactccagactatcacttgtacagtgaaaagtttgacctgaataaaaactgcacagtgactgtcaccctaggggatgaaagaggccgggtccatgaaagtgtgaaacgcagcaactgctacatggtctggggtggagacattgtagccagttcccagagatcaaatcggagcaacgtggacctggagatcggctgtctcgtggatctggccatgggcatgttgtccttctcagccaatggaaaggaactgggcacctgctaccaggtggagcctaataccaaagtgtttccagcagtcttcctgcagcctacaagtacttctttgtttcagtttgaacttggaaagctgaagaacgcaatgcccctgtcagcggccatattcaggagtgaagagaagaacccagtcccacagtgtccacctcggctggacgtccaaaccatccagcccgtgctctggagccgcatgcccaacagcttcctgaaggtggagaccgagcgtgtgagcgagcgccacggctgggtggtgcagtgcctggagcccctgcagatgatggcgctccacatccccgaggagaacaggtgtgtggatatcctggagctctgtgagcaggaggacctgatgcggttccattaccacacgctgaggctctacagcgcggtgtgcgccctgggaaacagccgcgtggcctacgccctgtgcagccacgtggacctctcccagctcttctatgccattgacaacaagtacctccccggcctccttcgatctggtttctatgacctgctcatcagcatccacctggccagcgccaaggagaggaagctgatgatgaagaacgagtacatcatccccattaccagcaccaccaggaatatccgcctcttcccggacgagtccaagaggcatggactgcctggggtgggcctgagaacatgtctcaagcccgggttcaggttctccaccccttgctttgttgtgactggtgaggatcaccaaaagcagagccccgagattcccttggagagtctcaggacgaaggctctgagtatgctgacagaggcagtgcagtgcagcggggcccacatccgagaccctgtaggggggtctgtggagttccagtttgtgcctgtgctgaaactcattggaaccctgctggtcatgggcgtgtttgatgatgatgatgttcggcagatcctcctcctgattgatccctctgtgtttggggagcatagtgcggggacagaggagggagcagaaaaggaggaagtgacccaggtggaggagaaggctgtggaggctggggagaaggccggcaaggaggctcctgtcaaaggcttgttgcagactcgattacccgaatccgtcaagctgcagatgtgtgagctcctcagctatctctgcgactgtgagctgcagcaccgagtggaggccattgtggcatttggtgacatttatgtctccaagctgcaggcaaatcagaagttccgctacaatgagctcatgcaggccctgaacatgtctgcggccctgactgcccggaagaccaaggagttccgctcacccccacaggagcagatcaacatgctgcttaactttcaactgggagagaactgcccctgcccagaggagattcgggaggagctgtatgatttccatgaggaccttctccttcactgtggggttcctttggaagaagaggaagaggaggaggaggacacctcctggacaggaaaactctgtgccttggtttacaaaatcaaaggcccacccaagccagagaaggagcagccgacggaggaggaggagagatgccccacaacattgaaggaactcatctcacagacgatgatctgctgggcccaggaggaccagatccaggattcagagctggtccgaatgatgttcaacctcctccggaggcagtatgacagcattggggagctgctgcaggcgctgcggaagacctacaccatcagccacacctctgtaagcgacaccatcaacctgctggctgccctgggccaaatccgctccctcctcagtgtcaggatgggcaaggaagaggagttgctcatgatcaatgggctgggagacataatgaacaacaaggtgttttaccagcatcccaacctcatgagagtcctgggcatgcacgagacggtgatggaggtgatggtgaacgtgttgggtacagagaaatctcagattgcatttccaaagatggttgctagctgctgccgtttcctttgctatttctgtcgaattagccggcaaaatcagaaggccatgtttgagcatctgagttatcttctggagaatagcagtgttggcctagcctccccgtcgatgaggggatccaccccgctggatgtggcagcttcctctgtgatggacaacaatgagttagcgctgagcttagaggaaccagacctcgagaaggtggtgacctacttggcaggctgtggcctacagagctgccccatgcttctggccaaaggataccctgatgtcggctggaaccccattgaaggggaacgctacctgtccttcctgaggtttgctgtcttcgtgaacagtgagagtgtggaagaaaacgccagcgttgtggtcaagctgctcatcagacgcccagagtgcttcggcccggccctgcggggtgaggggggaaacgggctcttggcagccatgcagggtgccattaagatctctgagaacccagcgctcgacctcccctctcaaggatacaaaagagaagtcacgggggacgatgaagaggaagaagaaatcgtgcatatgggcaatgcaattatgtcattttattcggcccttatagatctactgggccgctgtgctcctgaaatgcacctcatccagacaggaaagggggaagccatccgcatcaggtccatcctgcgctccctggtccccacagaagacctggttgggatcatcagcatccccttgaaactgccctccctcaacaaagatgggtcggtcagtgagccagatatggcggccaatttctgccctgaccacaaggcacctatggtgctgttcttggaccgcgtttatggcattaaggatcaaacttttctgctccacttgctggaggttggatttttacctgacctaagagcttctgcctctctagatacagtttccctaagcaccacagaggctgcgcttgcactaaataggtatatatgttctgctgtgctcccgctcctcacaagatgtgcccctctctttgccggaacagaacactgcacctctctgattgattccacactgcagacaatatacaggctatccaagggacgttccctcaccaaagcacaaagggacactatagaagaatgtttgcttgccatttgcaatcacttgaggccttccatgttacagcaactcctgcgacgcctcgtttttgatgtgccgcaactcaatgaatactgcaaaatgcctctcaagcttctgacgaatcactatgaacagtgttggaagtattactgcctgccttcaggatgggggagctacgggctagctgtggaagaagagctgcacctaacggagaagcttttctgggggatttttgactcgctctcccataagaaatatgacccagatcttttccgaatggccctgccttgtctcagtgctatagctggggccttgccaccagattatttagataccagaatcacagccacgttggagaaacagatctcagtggatgcggatggcaactttgacccaaaacctattaacaccatgaatttttccttgcctgaaaaattggaatacatcgtcaccaagtatgctgagcattcacatgataaatgggcctgtgacaagagtcagagtggatggaaatatgggatttccctggatgaaaatgtgaagacccacccactgataaggcctttcaagacattaacggagaaggagaaggaaatttatcgctggcctgcgcgagagtccctgaaaaccatgctggctgtgggctggactgtggagaggaccaaagagggagaagctttggttcaacagcgggaaaatgagaagcttcgaagtgtgtcccaggccaaccagggcaacagctacagtcctgctcccctcgacctctcaaacgttgtgctctccagagagctccagggaatggtggaggtcgtggctgagaactatcacaatatctgggccaagaagaagaagctggagctggagagcaaaggtggtggcagccaccctcttctggtaccatatgacaccttgactgccaaggaaaagttcaaggaccgggagaaggcacaggacctgtttaagttcctccaagtgaatggcatcatagtttccaggggtatgaaggatatggagctggatgcctcctccatggagaagaggtttgcctataagttcttgaagaagatcctgaaatacgttgattctgctcaagaatttattgcccatttagaagccattgtcagcagtgggaaaactgaaaagtctccccgtgaccaggagatcaaattctttgccaaagttctcctcccgctggttgaccagtacttcaccagtcattgcctctacttcttgtcatcccctctgaagccccttagcagcagcggatatgcctcccataaggagaaagaaatggtggccggcctgttctgcaaacttgccgctctcgttagacacagaatttccctctttggtagtgattctactacaatggtgagctgtcttcacatcttagctcagacacttgacacaaggactgtcatgaagtcaggctcagagctggtgaaggctgggttacgagcattctttgaaaatgctgcagaagatttggagaagacttcagaaaacctgaaacttgggaagttcacccattcccgaacgcagattaaaggcgtttctcagaatattaactacactacagtggctctgctccccatcctgacgtccatctttgagcacgtcactcagcatcagtttggaatggatctactcttgggtgatgtgcagatttcatgctaccacatactgtgcagcctctactcccttgggacgggaaagaacatttatgttgaaaggcaacgccctgcccttggagaatgtctggcctcgctggcagctgccataccagtggcattcctggagcccacccttaatcgctacaatccactctcggtcttcaacaccaaaacccccagggagaggtctattctggggatgccagacacggtagaagacatgtgtcctgacatcccccagctggaaggcctgatgaaggaaatcaacgacctggccgagtcaggggcccggtacacagagatgccccatgtcatcgaggtgatcttacccatgctctgcaactacttgtcctactggtgggagcggggtcctgagaacctgccccccagcacagggccatgctgcaccaaggtcacctctgaacacctcagtctcatcctgggcaacattctgaaaatcatcaacaacaacctgggcatcgatgaggcctcctggatgaagcgcattgcagtgtatgcacagcccatcatcagcaaagccaggcccgacctgctgagaagccacttcatcccaactctggagaagctgaagaaaaaggctgtcaagacggtgcaggaggaggagcagttgaaagccgatggcaaaggggacacccaggaggcagaactcctcatcctggacgagttcgcggtcctctgcagagatctctatgccttctaccccatgctgatccgctacgtggacaacaacagatctaactggctgaaaagtcctgatgctgattctgaccagctcttccgcatggtggcagaagtcttcattctgtggtgtaaatctcataacttcaagagagaagagcaaaattttgtgattcagaatgaaattaataatttggcatttttaactggagacagcaaaagcaagatgtcaaaagccatgcaagtaaagtctggaggacaagaccaggagcggaagaagacaaagcggcggggagacttgtattccatccagacctccctcatcgtggctgcactcaagaaaatgctgcccattggtttgaatatgtgtactccaggcgaccaggagctgatctccctcgcaaaatcgcgatacagccatagggacacagatgaagaggtcagagaacatctgcggaacaacttgcacttgcaggaaaagtctgatgacccagctgtaaaatggcaactgaacctctacaaggatgttctgaagagtgaagaacctttcaatccggaaaagacagtggagcgtgtgcagagaatttcagcagctgtcttccacctggaacaggtggaacagcctttgaggtccaagaaggccgtctggcacaaactgttatcaaagcaacggaaacgggcagtggtggcctgtttcaggatggcccctctctacaacctgcccaggcaccgctctattaacctcttcctccatggctatcagagattttggatagaaacagaggagtattcctttgaagagaaactagtacaggatttggctaaatctccaaaggtggaagaggaggaggaggaagagacagaaaaacaacctgacccactacatcagatcattctctattttagccgcaacgctctcacggagaggagcaaattggaagacgaccctttgtacacctcctattccagcatgatggccaagagttgtcaaagtggtgaggatgaagaagaagatgaagacaaggaaaaaacattcgaagagaaagagatggagaagcaaaaaaccctctatcagcaagctcggctgcatgagcgtggtgctgcagagatggtccttcagatgataagcgctagcaaaggtgagatgagccccatggtggttgagacgctgaagctggggatcgccattctgaacggaggcaatgctggtgtgcaacagaaaatgctagattacctaaaggagaaaaaggatgctggattctttcaaagcctttctggtcttatgcagtcttgcagtgtccttgatttgaatgcatttgagaggcagaataaagctgaaggcctggggatggtgactgaagaaggaacactcattgttcgggaacgtggtgaaaaagtactccagaatgacgagttcacgcgtgatctctttagattcctacagttactttgtgagggacataacagtgactttcagaacttcctgcggactcagatgggcaacaccaccaccgtgaatgtcatcatcagcactgtggactaccttctgcgtctgcaggaatcaatcagtgatttctactggtattattcagggaaggacatcattgatgaatctggacagcacaatttttccaaagctctggcagtcaccaagcagattttcaattctcttacagaatacatccagggcccttgcattggtaatcaacagagcctggctcacagcaggctgtgggacgcagtggttggcttcctccatgtctttgctaatatgcagatgaaactctctcaggattccagtcagatcgagctgctgaaggaactcttggatctccttcaggacatggtggtgatgcttctgtccctcctggaagggaatgtggtaaatggcaccattggcaagcagatggttgacacactggtagaatcatctaccaatgtagaaatgatcttgaaattctttgacatgttcttgaaacttaaagacttaaccagctcagacaccttcaaagaatatgacccagatggtaaaggaattatctccaaaaaagaattccagaaggccatggaagggcaaaaacagtacacgcagtcagagattgactttctcctgtcgtgtgcagaagctgatgagaatgacatgtttaattacgttgattttgtagaccggttccatgagccagccaaggacatagggtttaatgtggctgtgttattgacaaatctttctgaacacatgccaaacgattcccgcctgaagtgtctgttggacccagcagaaagtgtgctaaattacttcgaaccctacctaggacgcatcgagatcatgggtggggccaagaagattgagcgtgtttattttgagatcagtgaatccagtcgcactcagtgggagaagccccaggtgaaggaatctaagcgacagttcatttttgatgttgtcaatgaaggtggggagcaggaaaagatggagctgtttgtgaacttctgtgaggacaccatctttgaaatgcagttagcatctcagatctctgaatccgattcagctgacaggccagaagaggaggaagaagatgaagattcttcttacgtgttagaaattgcgggtgaagaggaagaagacgggtctcttgagccggcctctgcatttgctatggcctgtgcctctgtgaagaggaatgtcaccgacttcctgaagagagcaaccctgaagaacctcaggaagcagtacaggaacgtgaaaaagatgactgcgaaggagctggtgaaggtgctcttctcctttttctggatgctgttcgtggggctattccagttgctcttcaccatcctgggaggaatctttcagatcctctggagcacagtgtttggagggggcctggtagaaggggcaaagaacatcagagtgaccaagatcctgggtgacatgcctgacccaacccaatttggtatccatgatgacactatggaggctgagagggcagaggtgatggagccaggtatcaccactgaactagtacacttcataaagggggagaagggagatacagatatcatgtcagacctctttggactccacccaaagaaagagggcagcttaaagcatgggcctgaagtgggtttgggtgacctctcagaaattattggcaaggatgaaccccctacattagagagtactgtacagaagaagaggaaagctcaggcagcagaaatgaaagcagcaaatgaagcagaaggaaaagtagaatccgagaaggcagacatggaagatggagagaaggaagacaaagacaaagaagaggagcaagctgagtacctgtggacagaagtgacaaaaaagaagaagcggcggtgtggtcagaaggttgagaagccggaagctttcacagccaatttctttaaagggctggaaatctatcagaccaagttactgcattacctggccaggaatttctacaacctgaggttccttgctctgtttgtagccttcgctatcaacttcatcctgcttttttataaggtcactgaagaacctttagaagaagagacagaggatgttgcaaacctatggaattcctttaatgacgaggaagaggaagaagcgatggtattctttgtccttcaggagagcaccgggtatatggcaccaaccctgcgtgccctggccatcatccataccatcatctctctagtctgtgtggtgggctactactgcctgaaggtgcctttggtggttttcaaaagggaaaaagaaatcgccaggaagctggagtttgatggcctatatatcaccgaacagccatctgaagatgacatcaaggggcagtgggaccgcttggtgatcaacacaccatcttttcctaataactactgggacaagtttgtaaagagaaaggtgatcaacaagtatggagatctctacggagcagaacgcattgctgaacttctgggtttggacaaaaatgctcttgactttagcccagtagaagagaccaaagcagaagcggcttctctggtgtcatggctaagttccatagacatgaagtaccatatctggaagcttggagttgtttttactgacaactcctttctctaccttgcctggtatacaaccatgtcagtcctgggccactacaataacttcttctttgctgctcacctattggacatcgcaatgggcttcaagacactgaggaccattctgtcatctgtaactcacaatggcaaacagttggttctgactgtcggtctcctggccgtggtggtttatctctatactgtggtggctttcaacttcttccgcaagttctacaacaaaagcgaagacgatgacgagcccgatatgaagtgcgacgacatgatgacgtgttaccttttccacatgtacgtgggagtgagagcaggaggtggcattggtgatgaaattgaagaccctgctggtgatccttatgaaatgtatcgcattgtctttgacattacctttttcttcttcgtcattgtcatcttgctggccatcattcaaggtcttattattgatgctttcggagagctaagagaccagcaggaacaagtacgagaagatatggagactaaatgtttcatctgtgggattggcaatgactactttgacacaacccctcatggttttgaaacacatacattacaagagcacaacttagccaactacttgttctttctgatgtatttgattaataaagatgaaacagagcacacgggtcaggaatcttatgtctggaagatgtaccaagaaaggtgttgggatttcttcccagccggtgactgctttcgtaaacaatatgaagatcagcttggataaatctgaatcaaagaagcgcgacaattctggacagtcaacttcccatgaaataaagtcccctttttacagttctgcaacatatctgaaatgtgacattttctaaatgcctcccttaaaaaaaaaactgctgaaaatctgtgctattttgaaattgatttggctttttgtgcctaatggacatacactgtgggagagaacctgtcaaaatgtcgaagaaggaaggcgaagaatcaagtaatctctaggcaaatgccttcaagttttccagttctgaggtaactagttcagtttgttgggatggaagcatgaaggaaagggctagagaagtatgaaatctcgaatgtgtaatacctgaaaatttaaacacttgaatgtcatcatggtatccaacttgtgactcatagggtctgaactcactccaaaagataataactgcagtctaatttttcccatggtacttgctagtgactgtatccagaaaagctttaagcagttaaagaaacagaaaaaaaccgacactttgtcgacactgaaatatcgattaagtgccttaaaacctctttagacatagctatgcaagttttttatgtttgtgttccagaaggacagttccattcattagttgtgatcttccgtcttactttatgaaactgcacttgaaggttattcatacaagtttttttagtaacagctgtcagtcaactgctgttattagaagaaaagtactgtactgaaaattcagaaaaaaaatctcaaccttatgccaaaatggagtaatgctttatggtcccttgtaagtagtggagctgctctgtttaggtgaatctcctcaaatacaatgaagtgcccactgcaataaagtaatacgtacc

SEQ ID NO: 178691 - DNA, 15557 bp, Homo sapiens
  Payload ID: 15212
  Gene Symbol: RYR3
  Gene Name: ryanodine receptor 3
  Uniprot ID: Q15413
  ENST ID: ENST00000415757
  CDS Start-End: 85-14682
gcagcagcagtcagcgcacgccgagcggctgccgggggaagcagaggcgccggaggctggggcaccgccgacgcctcgggagccatggccgaagggggagaaggaggcgaggacgagatccagtttctgaggactgaggatgaagtggtactccagtgcatcgccaccattcataaggagcagaggaagttctgcctggcagccgagggacttgggaatcgcctgtgcttcttggaacccacttcagaagccaagtacattcctccagatctctgcgtctgcaattttgtgctggaacagtccctatctgtcagagccctgcaggaaatgcttgccaacacaggtgaaaatggcggcgaaggggcagcacaaggaggtggccacaggaccctgttatacggccatgcagttctcctgaggcactctttcagcggaatgtatctaacatgcttgactacatcaagatcccagacagacaaacttgcctttgatgtaggtctacgggaacatgccacaggagaagcctgttggtggactatacatcctgcttccaaacagaggtccgaaggagagaaagttcgaattggcgatgacctcatcctcgtcagcgtgtcctctgaaagataccttcatctctcagtatcaaatggtaacatacaagtggatgcctcctttatgcaaacactctggaatgtacatcctacgtgctcaggaagtagcatcgaagaaggatacctacttggtgggcatgtagtacgtcttttccatggtcatgatgaatgtttgacgataccatctacagaccagaatgattcccagcacaggaggatattctacgaagctgggggagctgggactcgagccaggtctctttggagagtggaaccccttcggataagctggagtggcagtaacatcagatggggccaggctttccgactccggcatctcaccacaggccactacctggccttgacagaagaccaaggccttatactgcaagaccgggcaaagtcagacaccaagtccacagctttctctttccgggcatcaaaggaactcaaggagaaattagactccagtcacaagcgagacatagaaggcatgggagttccagaaatcaagtatggagattctgtctgctttgtgcagcatatagccagtggtctgtgggtgacctacaaagcacaagacgccaaaacttcccgcctgggacctctaaaaagaaaggtcatactccatcaggaaggccacatggatgatggattaacactgcagagatgccagcgtgaggagtcccaggctgctcggatcatccggaacactacagccttattcagccagtttgtcagcggaaacaatcgcacagctgcccccatcaccctgcctatagaagaagtcctgcagaccctacaggacttgatcgcctacttccagcccccagaggaggagatgcgacatgaagacaagcagaacaagctccgctcactcaaaaacagacaaaatcttttcaaggaagagggaatgttggcccttgtcttaaattgcattgaccgcttaaatgtctacaatagcgtagcacactttgcagggattgcaagggaagagagtggcatggcctggaaagaaattctgaacctcctctacaaattgctggctgctctcattcgcggaaacagaaacaattgcgctcaattctccaataaccttgattggctcatcagtaaattggacagactagaatcttcctcaggtatcttggaagttttgcactgcatcttaactgaaagcccagaagccttaaatctgatagcggagggccacatcaagtcgatcatctccctgttggataagcacgggcggaatcacaaggttctggatatcctgtgctccctctgtctctgcaatggggttgcagtgagagccaaccagaatctgatctgtgacaacttgctgccccggagaaacctactcctgcagacacgactgattaacgatgtaaccagtatccggccaaacatcttcctgggagtcgcggagggctcagcccagtacaagaagtggtacttcgagctgattatcgaccaggtggaccccttcctaacagcagagcccacacatctgcgggtgggctgggcctcttcttcaggctatgccccatacccaggaggtggagaaggatggggaggcaatggtgttggtgacgacctgtactcctatggctttgatggacttcacctttggtcaggccggatacccagagctgtggcttccatcaaccagcacctcctgagatcggatgacgtggtaagctgctgcctggacctcggggtgcccagcatctcattccgcatcaatgggcagcccgtgcaggggatgtttgagaacttcaacacagacgggctcttcttccctgtgatgagcttttcagcaggtgtcaaagtacgtttcctgatgggtggacgtcatggagagtttaagttcctgcctccctctggctatgccccttgctatgaagccttacttccaaaagagaagatgagattggagcctgtcaaagaatataaacgtgatgctgatggcattagagatctcttgggtaccacccagttcctctcccaagcctctttcatcccatgccccgtagacaccagtcaggttattttgccacctcacctagaaaagatccgagacagactagctgaaaacatccatgagctttggggaatgaataaaatagaacttggctggactttcggcaagatacgagatgacaataaaagacaacacccttgccttgtggagttttcaaagctcccagaaactgagaagaactataacctgcaaatgtcaactgaaaccttaaaaaccctcttggccctggggtgccacattgctcatgttaacccagctgctgaggaggatctcaagaaggtcaaactgcccaaaaactatatgatgtccaacggctataagccagcccctttggatttgtctgatgtgaagctgttacctcctcaagaaattttagtggataagcttgcagaaaatgcacacaatgtttgggcaaaagacagaataaaacaaggatggacctatggcatccaacaggatttgaagaacaaaagaaatccccgtctggtgccatatgcattactggatgagcgtaccaagaagtcaaacagggacagcctgcgggaagctgtgcgcacttttgttggttacgggtataacattgagccatcagaccaagaactagctgactcggctgtggagaaggtcagcatagacaagatccgatttttccgggtagagcgatcttatgcagtgagatctggaaagtggtattttgagtttgaagtggtgactggaggagacatgcgagtcggctgggcgaggccaggctgtcgacctgatgtcgagctgggggccgatgaccaagcctttgtgtttgaaggcaacaggggccagcgttggcatcaaggaagtgggtattttgggcgtacctggcagccaggggatgtggtcggatgtatgattaacctggatgatgcttcaatgatcttcacactgaatggggagctgctgatcaccaacaaaggctctgaacttgccttcgctgactacgagattgagaatggcttcgtgcccatctgctgtctgggtctatctcagatcggccgcatgaatctcgggacagatgccagtaccttcaagttttataccatgtgcggtctccaagagggctttgagccttttgctgtcaacatgaacagagatgttgctatgtggttcagcaagcgcctcccgacgtttgtcaacgtgccaaaggatcatccacacatagaggtcatgaggattgatggcaccatggacagccctccgtgtctcaaggtgacgcataagacatttggcacacagaatagcaatgccgacatgatctattgccgcttgagcatgcctgtcgagtgccactcctccttcagccacagcccctgtctggacagtgaagctttccagaaaaggaaacagatgcaagaaatactctctcatacaacaacacagtgctactacgccatccgcatctttgctggacaggatccatcctgtgtctgggtcggatgggtgactccagactatcacttgtacagtgaaaagtttgacctgaataaaaactgcacagtgactgtcaccctaggggatgaaagaggccgggtccatgaaagtgtgaaacgcagcaactgctacatggtctggggtggagacattgtagccagttcccagagatcaaatcggagcaacgtggacctggagatcggctgtctcgtggatctggccatgggcatgttgtccttctcagccaatggaaaggaactgggcacctgctaccaggtggagcctaataccaaagtgtttccagcagtcttcctgcagcctacaagtacttctttgtttcagtttgaacttggaaagctgaagaacgcaatgcccctgtcagcggccatattcaggagtgaagagaagaacccagtcccacagtgtccacctcggctggacgtccaaaccatccagcccgtgctctggagccgcatgcccaacagcttcctgaaggtggagaccgagcgtgtgagcgagcgccacggctgggtggtgcagtgcctggagcccctgcagatgatggcgctccacatccccgaggagaacaggtgtgtggatatcctggagctctgtgagcaggaggacctgatgcggttccattaccacacgctgaggctctacagcgcggtgtgcgccctgggaaacagccgcgtggcctacgccctgtgcagccacgtggacctctcccagctcttctatgccattgacaacaagtacctccccggcctccttcgatctggtttctatgacctgctcatcagcatccacctggccagcgccaaggagaggaagctgatgatgaagaacgagtacatcatccccattaccagcaccaccaggaatatccgcctcttcccggacgagtccaagaggcatggactgcctggggtgggcctgagaacatgtctcaagcccgggttcaggttctccaccccttgctttgttgtgactggtgaggatcaccaaaagcagagccccgagattcccttggagagtctcaggacgaaggctctgagtatgctgacagaggcagtgcagtgcagcggggcccacatccgagaccctgtaggggggtctgtggagttccagtttgtgcctgtgctgaaactcattggaaccctgctggtcatgggcgtgtttgatgatgatgatgttcggcagatcctcctcctgattgatccctctgtgtttggggagcatagtgcggggacagaggagggagcagaaaaggaggaagtgacccaggtggaggagaaggctgtggaggctggggagaaggccggcaaggaggctcctgtcaaaggcttgttgcagactcgattacccgaatccgtcaagctgcagatgtgtgagctcctcagctatctctgcgactgtgagctgcagcaccgagtggaggccattgtggcatttggtgacatttatgtctccaagctgcaggcaaatcagaagttccgctacaatgagctcatgcaggccctgaacatgtctgcggccctgactgcccggaagaccaaggagttccgctcacccccacaggagcagatcaacatgctgcttaactttcaactgggagagaactgcccctgcccagaggagattcgggaggagctgtatgatttccatgaggaccttctccttcactgtggggttcctttggaagaagaggaagaggaggaggaggacacctcctggacaggaaaactctgtgccttggtttacaaaatcaaaggcccacccaagccagagaaggagcagccgacggaggaggaggagagatgccccacaacattgaaggaactcatctcacagacgatgatctgctgggcccaggaggaccagatccaggattcagagctggtccgaatgatgttcaacctcctccggaggcagtatgacagcattggggagctgctgcaggcgctgcggaagacctacaccatcagccacacctctgtaagcgacaccatcaacctgctggctgccctgggccaaatccgctccctcctcagtgtcaggatgggcaaggaagaggagttgctcatgatcaatgggctgggagacataatgaacaacaaggtgttttaccagcatcccaacctcatgagagtcctgggcatgcacgagacggtgatggaggtgatggtgaacgtgttgggtacagagaaatctcagattgcatttccaaagatggttgctagctgctgccgtttcctttgctatttctgtcgaattagccggcaaaatcagaaggccatgtttgagcatctgagttatcttctggagaatagcagtgttggcctagcctccccgtcgatgaggggatccaccccgctggatgtggcagcttcctctgtgatggacaacaatgagttagcgctgagcttagaggaaccagacctcgagaaggtggtgacctacttggcaggctgtggcctacagagctgccccatgcttctggccaaaggataccctgatgtcggctggaaccccattgaaggggaacgctacctgtccttcctgaggtttgctgtcttcgtgaacagtgagagtgtggaagaaaacgccagcgttgtggtcaagctgctcatcagacgcccagagtgcttcggcccggccctgcggggtgaggggggaaacgggctcttggcagccatgcagggtgccattaagatctctgagaacccagcgctcgacctcccctctcaaggatacaaaagagaagtcagcacgggggacgatgaagaggaagaagaaatcgtgcatatgggcaatgcaattatgtcattttattcggcccttatagatctactgggccgctgtgctcctgaaatgcacctcatccagacaggaaagggggaagccatccgcatcaggtccatcctgcgctccctggtccccacagaagacctggttgggatcatcagcatccccttgaaactgccctccctcaacaaagatgggtcggtcagtgagccagatatggcggccaatttctgccctgaccacaaggcacctatggtgctgttcttggaccgcgtttatggcattaaggatcaaacttttctgctccacttgctggaggttggatttttacctgacctaagagcttctgcctctctagatacagtttccctaagcaccacagaggctgcgcttgcactaaataggtatatatgttctgctgtgctcccgctcctcacaagatgtgcccctctctttgccggaacagaacactgcacctctctgattgattccacactgcagacaatatacaggctatccaagggacgttccctcaccaaagcacaaagggacactatagaagaatgtttgcttgccatttgcaatcacttgaggccttccatgttacagcaactcctgcgacgcctcgtttttgatgtgccgcaactcaatgaatactgcaaaatgcctctcaagcttctgacgaatcactatgaacagtgttggaagtattactgcctgccttcaggatgggggagctacgggctagctgtggaagaagagctgcacctaacggagaagcttttctgggggatttttgactcgctctcccataagaaatatgacccagatcttttccgaatggccctgccttgtctcagtgctatagctggggccttgccaccagattatttagataccagaatcacagccacgttggagaaacagatctcagtggatgcggatggcaactttgacccaaaacctattaacaccatgaatttttccttgcctgaaaaattggaatacatcgtcaccaagtatgctgagcattcacatgataaatgggcctgtgacaagagtcagagtggatggaaatatgggatttccctggatgaaaatgtgaagacccacccactgataaggcctttcaagacattaacggagaaggagaaggaaatttatcgctggcctgcgcgagagtccctgaaaaccatgctggctgtgggctggactgtggagaggaccaaagagggagaagctttggttcaacagcgggaaaatgagaagcttcgaagtgtgtcccaggccaaccagggcaacagctacagtcctgctcccctcgacctctcaaacgttgtgctctccagagagctccagggaatggtggaggtcgtggctgagaactatcacaatatctgggccaagaagaagaagctggagctggagagcaaaggtggtggcagccaccctcttctggtaccatatgacaccttgactgccaaggaaaagttcaaggaccgggagaaggcacaggacctgtttaagttcctccaagtgaatggcatcatagtttccaggggtatgaaggatatggagctggatgcctcctccatggagaagaggtttgcctataagttcttgaagaagatcctgaaatacgttgattctgctcaagaatttattgcccatttagaagccattgtcagcagtgggaaaactgaaaagtctccccgtgaccaggagatcaaattctttgccaaagttctcctcccgctggttgaccagtacttcaccagtcattgcctctacttcttgtcatcccctctgaagccccttagcagcagcggatatgcctcccataaggagaaagaaatggtggccggcctgttctgcaaacttgccgctctcgttagacacagaatttccctctttggtagtgattctactacaatggtgagctgtcttcacatcttagctcagacacttgacacaaggactgtcatgaagtcaggctcagagctggtgaaggctgggttacgagcattctttgaaaatgctgcagaagatttggagaagacttcagaaaacctgaaacttgggaagttcacccattcccgaacgcagattaaaggcgtttctcagaatattaactacactacagtggctctgctccccatcctgacgtccatctttgagcacgtcactcagcatcagtttggaatggatctactcttgggtgatgtgcagatttcatgctaccacatactgtgcagcctctactcccttgggacgggaaagaacatttatgttgaaaggcaacgccctgcccttggagaatgtctggcctcgctggcagctgccataccagtggcattcctggagcccacccttaatcgctacaatccactctcggtcttcaacaccaaaacccccagggagaggtctattctggggatgccagacacggtagaagacatgtgtcctgacatcccccagctggaaggcctgatgaaggaaatcaacgacctggccgagtcaggggcccggtacacagagatgccccatgtcatcgaggtgatcttacccatgctctgcaactacttgtcctactggtgggagcggggtcctgagaacctgccccccagcacagggccatgctgcaccaaggtcacctctgaacacctcagtctcatcctgggcaacattctgaaaatcatcaacaacaacctgggcatcgatgaggcctcctggatgaagcgcattgcagtgtatgcacagcccatcatcagcaaagccaggcccgacctgctgagaagccacttcatcccaactctggagaagctgaagaaaaaggctgtcaagacggtgcaggaggaggagcagttgaaagccgatggcaaaggggacacccaggaggcagaactcctcatcctggacgagttcgcggtcctctgcagagatctctatgccttctaccccatgctgatccgctacgtggacaacaacagatctaactggctgaaaagtcctgatgctgattctgaccagctcttccgcatggtggcagaagtcttcattctgtggtgtaaatctcataacttcaagagagaagagcaaaattttgtgattcagaatgaaattaataatttggcatttttaactggagacagcaaaagcaagatgtcaaaatctggaggacaagaccaggagcggaagaagacaaagcggcggggagacttgtattccatccagacctccctcatcgtggctgcactcaagaaaatgctgcccattggtttgaatatgtgtactccaggcgaccaggagctgatctccctcgcaaaatcgcgatacagccatagggacacagatgaagaggtcagagaacatctgcggaacaacttgcacttgcaggaaaagtctgatgacccagctgtaaaatggcaactgaacctctacaaggatgttctgaagagtgaagaacctttcaatccggaaaagacagtggagcgtgtgcagagaatttcagcagctgtcttccacctggaacaggtggaacagcctttgaggtccaagaaggccgtctggcacaaactgttatcaaagcaacggaaacgggcagtggtggcctgtttcaggatggcccctctctacaacctgcccaggcaccgctctattaacctcttcctccatggctatcagagattttggatagaaacagaggagtattcctttgaagagaaactagtacaggatttggctaaatctccaaaggtggaagaggaggaggaggaagagacagaaaaacaacctgacccactacatcagatcattctctattttagccgcaacgctctcacggagaggagcaaattggaagacgaccctttgtacacctcctattccagcatgatggccaagagttgtcaaagtggtgaggatgaagaagaagatgaagacaaggaaaaaacattcgaagagaaagagatggagaagcaaaaaaccctctatcagcaagctcggctgcatgagcgtggtgctgcagagatggtccttcagatgataagcgctagcaaaggtgagatgagccccatggtggttgagacgctgaagctggggatcgccattctgaacggaggcaatgctggtgtgcaacagaaaatgctagattacctaaaggagaaaaaggatgctggattctttcaaagcctttctggtcttatgcagtcttgcagtgtccttgatttgaatgcatttgagaggcagaataaagctgaaggcctggggatggtgactgaagaaggaacactcattgttcgggaacgtggtgaaaaagtactccagaatgacgagttcacgcgtgatctctttagattcctacagttactttgtgagggacataacagtgactttcagaacttcctgcggactcagatgggcaacaccaccaccgtgaatgtcatcatcagcactgtggactaccttctgcgtctgcaggaatcaatcagtgatttctactggtattattcagggaaggacatcattgatgaatctggacagcacaatttttccaaagctctggcagtcaccaagcagattttcaattctcttacagaatacatccagggcccttgcattggtaatcaacagagcctggctcacagcaggctgtgggacgcagtggttggcttcctccatgtctttgctaatatgcagatgaaactctctcaggattccagtcagatcgagctgctgaaggaactcttggatctccttcaggacatggtggtgatgcttctgtccctcctggaagggaatgtggtaaatggcaccattggcaagcagatggttgacacactggtagaatcatctaccaatgtagaaatgatcttgaaattctttgacatgttcttgaaacttaaagacttaaccagctcagacaccttcaaagaatatgacccagatggtaaaggaattatctccaaaaaagaattccagaaggccatggaagggcaaaaacagtacacgcagtcagagattgactttctcctgtcgtgtgcagaagctgatgagaatgacatgtttaattacgttgattttgtagaccggttccatgagccagccaaggacatagggtttaatgtggctgtgttattgacaaatctttctgaacacatgccaaacgattcccgcctgaagtgtctgttggacccagcagaaagtgtgctaaattacttcgaaccctacctaggacgcatcgagatcatgggtggggccaagaagattgagcgtgtttattttgagatcagtgaatccagtcgcactcagtgggagaagccccaggtgaaggaatctaagcgacagttcatttttgatgttgtcaatgaaggtggggagcaggaaaagatggagctgtttgtgaacttctgtgaggacaccatctttgaaatgcagttagcatctcagatctctgaatccgattcagctgacaggccagaagaggaggaagaagatgaagattcttcttacgtgttagaaattgcgggtgaagaggaagaagacgggtctcttgagccggcctctgcatttgctatggcctgtgcctctgtgaagaggaatgtcaccgacttcctgaagagagcaaccctgaagaacctcaggaagcagtacaggaacgtgaaaaagatgactgcgaaggagctggtgaaggtgctcttctcctttttctggatgctgttcgtggggctattccagttgctcttcaccatcctgggaggaatctttcagatcctctggagcacagtgtttggagggggcctggtagaaggggcaaagaacatcagagtgaccaagatcctgggtgacatgcctgacccaacccaatttggtatccatgatgacactatggaggctgagagggcagaggtgatggagccaggtatcaccactgaactagtacacttcataaagggggagaagggagatacagatatcatgtcagacctctttggactccacccaaagaaagagggcagcttaaagcatgggcctgaagtgggtttgggtgacctctcagaaattattggcaaggatgaaccccctacattagagagtactgtacagaagaagaggaaagctcaggcagcagaaatgaaagcagcaaatgaagcagaaggaaaagtagaatccgagaaggcagacatggaagatggagagaaggaagacaaagacaaagaagaggagcaagctgagtacctgtggacagaagtgacaaaaaagaagaagcggcggtgtggtcagaaggttgagaagccggaagctttcacagccaatttctttaaagggctggaaatctatcagaccaagttactgcattacctggccaggaatttctacaacctgaggttccttgctctgtttgtagccttcgctatcaacttcatcctgcttttttataaggtcactgaagaacctttagaagaagagacagaggatgttgcaaacctatggaattcctttaatgacgaggaagaggaagaagcgatggtattctttgtccttcaggagagcaccgggtatatggcaccaaccctgcgtgccctggccatcatccataccatcatctctctagtctgtgtggtgggctactactgcctgaaggtgcctttggtggttttcaaaagggaaaaagaaatcgccaggaagctggagtttgatggcctatatatcaccgaacagccatctgaagatgacatcaaggggcagtgggaccgcttggtgatcaacacaccatcttttcctaataactactgggacaagtttgtaaagagaaaggtgatcaacaagtatggagatctctacggagcagaacgcattgctgaacttctgggtttggacaaaaatgctcttgactttagcccagtagaagagaccaaagcagaagcggcttctctggtgtcatggctaagttccatagacatgaagtaccatatctggaagcttggagttgtttttactgacaactcctttctctaccttgcctggtatacaaccatgtcagtcctgggccactacaataacttcttctttgctgctcacctattggacatcgcaatgggcttcaagacactgaggaccattctgtcatctgtaactcacaatggcaaacagttggttctgactgtcggtctcctggccgtggtggtttatctctatactgtggtggctttcaacttcttccgcaagttctacaacaaaagcgaagacgatgacgagcccgatatgaagtgcgacgacatgatgacgtgttaccttttccacatgtacgtgggagtgagagcaggaggtggcattggtgatgaaattgaagaccctgctggtgatccttatgaaatgtatcgcattgtctttgacattacctttttcttcttcgtcattgtcatcttgctggccatcattcaaggtcttattattgatgctttcggagagctaagagaccagcaggaacaagtacgagaagatatggagactaaatgtttcatctgtgggattggcaatgactactttgacacaacccctcatggttttgaaacacatacattacaagagcacaacttagccaactacttgttctttctgatgtatttgattaataaagatgaaacagagcacacgggtcaggaatcttatgtctggaagatgtaccaagaaaggtgttgggatttcttcccagccggtgactgctttcgtaaacaatatgaagatcagcttggataaatctgaatcaaagaagcgcgacaattctggacagtcaacttcccatgaaataaagtcccctttttacagttctgcaacatatctgaaatgtgacattttctaaatgcctcccttaaaaaaaaaactgctgaaaatctgtgctattttgaaattgatttggctttttgtgcctaatggacatacactgtgggagagaacctgtcaaaatgtcgaagaaggaaggcgaagaatcaagtaatctctaggcaaatgccttcaagttttccagttctgaggtaactagttcagtttgttgggatggaagcatgaaggaaagggctagagaagtatgaaatctcgaatgtgtaatacctgaaaatttaaacacttgaatgtcatcatggtatccaacttgtgactcatagggtctgaactcactccaaaagataataactgcagtctaatttttcccatggtacttgctagtgactgtatccagaaaagctttaagcagttaaagaaacagaaaaaaaccgacactttgtcgacactgaaatatcgattaagtgccttaaaacctctttagacatagctatgcaagttttttatgtttgtgttccagaaggacagttccattcattagttgtgatcttccgtcttactttatgaaactgcacttgaaggttattcatacaagtttttttagtaacagctgtcagtcaactgctgttattagaagaaaagtactgtactgaaaattcagaaaaaaaatctcaaccttatgccaaaatggagtaatgctttatggtcccttgtaagtagtggagctgctctgtttaggtgaatctcctcaaatacaatgaagtgcccactgcaataaagtaatacgtaccaat

SEQ ID NO: 178692 - DNA, 15564 bp, Homo sapiens
  Payload ID: 15212
  Gene Symbol: RYR3
  Gene Name: ryanodine receptor 3
  ENST ID: ENST00000622037
  CDS Start-End: 71-14692
cgcacgccgagcggctgccgggggaagcagaggcgccggaggctggggcaccgccgacgcctcgggagccatggccgaagggggagaaggaggcgaggacgagatccagtttctgaggactgaggatgaagtggtactccagtgcatcgccaccattcataaggagcagaggaagttctgcctggcagccgagggacttgggaatcgcctgtgcttcttggaacccacttcagaagccaagtacattcctccagatctctgcgtctgcaattttgtgctggaacagtccctatctgtcagagccctgcaggaaatgcttgccaacacaggtgaaaatggcggcgaaggggcagcacaaggaggtggccacaggaccctgttatacggccatgcagttctcctgaggcactctttcagcggaatgtatctaacatgcttgactacatcaagatcccagacagacaaacttgcctttgatgtaggtctacgggaacatgccacaggagaagcctgttggtggactatacatcctgcttccaaacagaggtccgaaggagagaaagttcgaattggcgatgacctcatcctcgtcagcgtgtcctctgaaagataccttcatctctcagtatcaaatggtaacatacaagtggatgcctcctttatgcaaacactctggaatgtacatcctacgtgctcaggaagtagcatcgaagaaggatacctacttggtgggcatgtagtacgtcttttccatggtcatgatgaatgtttgacgataccatctacagaccagaatgattcccagcacaggaggatattctacgaagctgggggagctgggactcgagccaggtctctttggagagtggaaccccttcggataagctggagtggcagtaacatcagatggggccaggctttccgactccggcatctcaccacaggccactacctggccttgacagaagaccaaggccttatactgcaagaccgggcaaagtcagacaccaagtccacagctttctctttccgggcatcaaaggaactcaaggagaaattagactccagtcacaagcgagacatagaaggcatgggagttccagaaatcaagtatggagattctgtctgctttgtgcagcatatagccagtggtctgtgggtgacctacaaagcacaagacgccaaaacttcccgcctgggacctctaaaaagaaaggtcatactccatcaggaaggccacatggatgatggattaacactgcagagatgccagcgtgaggagtcccaggctgctcggatcatccggaacactacagccttattcagccagtttgtcagcggaaacaatcgcacagctgcccccatcaccctgcctatagaagaagtcctgcagaccctacaggacttgatcgcctacttccagcccccagaggaggagatgcgacatgaagacaagcagaacaagctccgctcactcaaaaacagacaaaatcttttcaaggaagagggaatgttggcccttgtcttaaattgcattgaccgcttaaatgtctacaatagcgtagcacactttgcagggattgcaagggaagagagtggcatggcctggaaagaaattctgaacctcctctacaaattgctggctgctctcattcgcggaaacagaaacaattgcgctcaattctccaataaccttgattggctcatcagtaaattggacagactagaatcttcctcaggtatcttggaagttttgcactgcatcttaactgaaagcccagaagccttaaatctgatagcggagggccacatcaagtcgatcatctccctgttggataagcacgggcggaatcacaaggttctggatatcctgtgctccctctgtctctgcaatggggttgcagtgagagccaaccagaatctgatctgtgacaacttgctgccccggagaaacctactcctgcagacacgactgattaacgatgtaaccagtatccggccaaacatcttcctgggagtcgcggagggctcagcccagtacaagaagtggtacttcgagctgattatcgaccaggtggaccccttcctaacagcagagcccacacatctgcgggtgggctgggcctcttcttcaggctatgccccatacccaggaggtggagaaggatggggaggcaatggtgttggtgacgacctgtactcctatggctttgatggacttcacctttggtcaggccggatacccagagctgtggcttccatcaaccagcacctcctgagatcggatgacgtggtaagctgctgcctggacctcggggtgcccagcatctcattccgcatcaatgggcagcccgtgcaggggatgtttgagaacttcaacacagacgggctcttcttccctgtgatgagcttttcagcaggtgtcaaagtacgtttcctgatgggtggacgtcatggagagtttaagttcctgcctccctctggctatgccccttgctatgaagccttacttccaaaagagaagatgagattggagcctgtcaaagaatataaacgtgatgctgatggcattagagatctcttgggtaccacccagttcctctcccaagcctctttcatcccatgccccgtagacaccagtcaggttattttgccacctcacctagaaaagatccgagacagactagctgaaaacatccatgagctttggggaatgaataaaatagaacttggctggactttcggcaagatacgagatgacaataaaagacaacacccttgccttgtggagttttcaaagctcccagaaactgagaagaactataacctgcaaatgtcaactgaaaccttaaaaaccctcttggccctggggtgccacattgctcatgttaacccagctgctgaggaggatctcaagaaggtcaaactgcccaaaaactatatgatgtccaacggctataagccagcccctttggatttgtctgatgtgaagctgttacctcctcaagaaattttagtggataagcttgcagaaaatgcacacaatgtttgggcaaaagacagaataaaacaaggatggacctatggcatccaacaggatttgaagaacaaaagaaatccccgtctggtgccatatgcattactggatgagcgtaccaagaagtcaaacagggacagcctgcgggaagctgtgcgcacttttgttggttacgggtataacattgagccatcagaccaagaactagctgactcggctgtggagaaggtcagcatagacaagatccgatttttccgggtagagcgatcttatgcagtgagatctggaaagtggtattttgagtttgaagtggtgactggaggagacatgcgagtcggctgggcgaggccaggctgtcgacctgatgtcgagctgggggccgatgaccaagcctttgtgtttgaaggcaacaggggccagcgttggcatcaaggaagtgggtattttgggcgtacctggcagccaggggatgtggtcggatgtatgattaacctggatgatgcttcaatgatcttcacactgaatggggagctgctgatcaccaacaaaggctctgaacttgccttcgctgactacgagattgagaatggcttcgtgcccatctgctgtctgggtctatctcagatcggccgcatgaatctcgggacagatgccagtaccttcaagttttataccatgtgcggtctccaagagggctttgagccttttgctgtcaacatgaacagagatgttgctatgtggttcagcaagcgcctcccgacgtttgtcaacgtgccaaaggatcatccacacatagaggtcatgaggattgatggcaccatggacagccctccgtgtctcaaggtgacgcataagacatttggcacacagaatagcaatgccgacatgatctattgccgcttgagcatgcctgtcgagtgccactcctccttcagccacagcccctgtctggacagtgaagctttccagaaaaggaaacagatgcaagaaatactctctcatacaacaacacagtgctactacgccatccgcatctttgctggacaggatccatcctgtgtctgggtcggatgggtgactccagactatcacttgtacagtgaaaagtttgacctgaataaaaactgcacagtgactgtcaccctaggggatgaaagaggccgggtccatgaaagtgtgaaacgcagcaactgctacatggtctggggtggagacattgtagccagttcccagagatcaaatcggagcaacgtggacctggagatcggctgtctcgtggatctggccatgggcatgttgtccttctcagccaatggaaaggaactgggcacctgctaccaggtggagcctaataccaaagtgtttccagcagtcttcctgcagcctacaagtacttctttgtttcagtttgaacttggaaagctgaagaacgcaatgcccctgtcagcggccatattcaggagtgaagagaagaacccagtcccacagtgtccacctcggctggacgtccaaaccatccagcccgtgctctggagccgcatgcccaacagcttcctgaaggtggagaccgagcgtgtgagcgagcgccacggctgggtggtgcagtgcctggagcccctgcagatgatggcgctccacatccccgaggagaacaggtgtgtggatatcctggagctctgtgagcaggaggacctgatgcggttccattaccacacgctgaggctctacagcgcggtgtgcgccctgggaaacagccgcgtggcctacgccctgtgcagccacgtggacctctcccagctcttctatgccattgacaacaagtacctccccggcctccttcgatctggtttctatgacctgctcatcagcatccacctggccagcgccaaggagaggaagctgatgatgaagaacgagtacatcatccccattaccagcaccaccaggaatatccgcctcttcccggacgagtccaagaggcatggactgcctggggtgggcctgagaacatgtctcaagcccgggttcaggttctccaccccttgctttgttgtgactggtgaggatcaccaaaagcagagccccgagattcccttggagagtctcaggacgaaggctctgagtatgctgacagaggcagtgcagtgcagcggggcccacatccgagaccctgtaggggggtctgtggagttccagtttgtgcctgtgctgaaactcattggaaccctgctggtcatgggcgtgtttgatgatgatgatgttcggcagatcctcctcctgattgatccctctgtgtttggggagcatagtgcggggacagaggagggagcagaaaaggaggaagtgacccaggtggaggagaaggctgtggaggctggggagaaggccggcaaggaggctcctgtcaaaggcttgttgcagactcgattacccgaatccgtcaagctgcagatgtgtgagctcctcagctatctctgcgactgtgagctgcagcaccgagtggaggccattgtggcatttggtgacatttatgtctccaagctgcaggcaaatcagaagttccgctacaatgagctcatgcaggccctgaacatgtctgcggccctgactgcccggaagaccaaggagttccgctcacccccacaggagcagatcaacatgctgcttaactttcaactgggagagaactgcccctgcccagaggagattcgggaggagctgtatgatttccatgaggaccttctccttcactgtggggttcctttggaagaagaggaagaggaggaggaggacacctcctggacaggaaaactctgtgccttggtttacaaaatcaaaggcccacccaagccagagaaggagcagccgacggaggaggaggagagatgccccacaacattgaaggaactcatctcacagacgatgatctgctgggcccaggaggaccagatccaggattcagagctggtccgaatgatgttcaacctcctccggaggcagtatgacagcattggggagctgctgcaggcgctgcggaagacctacaccatcagccacacctctgtaagcgacaccatcaacctgctggctgccctgggccaaatccgctccctcctcagtgtcaggatgggcaaggaagaggagttgctcatgatcaatgggctgggagacataatgaacaacaaggtgttttaccagcatcccaacctcatgagagtcctgggcatgcacgagacggtgatggaggtgatggtgaacgtgttgggtacagagaaatctcagattgcatttccaaagatggttgctagctgctgccgtttcctttgctatttctgtcgaattagccggcaaaatcagaaggccatgtttgagcatctgagttatcttctggagaatagcagtgttggcctagcctccccgtcgatgaggggatccaccccgctggatgtggcagcttcctctgtgatggacaacaatgagttagcgctgagcttagaggaaccagacctcgagaaggtggtgacctacttggcaggctgtggcctacagagctgccccatgcttctggccaaaggataccctgatgtcggctggaaccccattgaaggggaacgctacctgtccttcctgaggtttgctgtcttcgtgaacagtgagagtgtggaagaaaacgccagcgttgtggtcaagctgctcatcagacgcccagagtgcttcggcccggccctgcggggtgaggggggaaacgggctcttggcagccatgcagggtgccattaagatctctgagaacccagcgctcgacctcccctctcaaggatacaaaagagaagtcagcacgggggacgatgaagaggaagaagaaatcgtgcatatgggcaatgcaattatgtcattttattcggcccttatagatctactgggccgctgtgctcctgaaatgcacctcatccagacaggaaagggggaagccatccgcatcaggtccatcctgcgctccctggtccccacagaagacctggttgggatcatcagcatccccttgaaactgccctccctcaacaaagatgggtcggtcagtgagccagatatggcggccaatttctgccctgaccacaaggcacctatggtgctgttcttggaccgcgtttatggcattaaggatcaaacttttctgctccacttgctggaggttggatttttacctgacctaagagcttctgcctctctagatacagtttccctaagcaccacagaggctgcgcttgcactaaataggtatatatgttctgctgtgctcccgctcctcacaagatgtgcccctctctttgccggaacagaacactgcacctctctgattgattccacactgcagacaatatacaggctatccaagggacgttccctcaccaaagcacaaagggacactatagaagaatgtttgcttgccatttgcaatcacttgaggccttccatgttacagcaactcctgcgacgcctcgtttttgatgtgccgcaactcaatgaatactgcaaaatgcctctcaagcttctgacgaatcactatgaacagtgttggaagtattactgcctgccttcaggatgggggagctacgggctagctgtggaagaagagctgcacctaacggagaagcttttctgggggatttttgactcgctctcccataagaaatatgacccagatcttttccgaatggccctgccttgtctcagtgctatagctggggccttgccaccagattatttagataccagaatcacagccacgttggagaaacagatctcagtggatgcggatggcaactttgacccaaaacctattaacaccatgaatttttccttgcctgaaaaattggaatacatcgtcaccaagtatgctgagcattcacatgataaatgggcctgtgacaagagtcagagtggatggaaatatgggatttccctggatgaaaatgtgaagacccacccactgataaggcctttcaagacattaacggagaaggagaaggaaatttatcgctggcctgcgcgagagtccctgaaaaccatgctggctgtgggctggactgtggagaggaccaaagagggagaagctttggttcaacagcgggaaaatgagaagcttcgaagtgtgtcccaggccaaccagggcaacagctacagtcctgctcccctcgacctctcaaacgttgtgctctccagagagctccagggaatggtggaggtcgtggctgagaactatcacaatatctgggccaagaagaagaagctggagctggagagcaaaggtggtggcagccaccctcttctggtaccatatgacaccttgactgccaaggaaaagttcaaggaccgggagaaggcacaggacctgtttaagttcctccaagtgaatggcatcatagtttccaggggtatgaaggatatggagctggatgcctcctccatggagaagaggtttgcctataagttcttgaagaagatcctgaaatacgttgattctgctcaagaatttattgcccatttagaagccattgtcagcagtgggaaaactgaaaagtctccccgtgaccaggagatcaaattctttgccaaagttctcctcccgctggttgaccagtacttcaccagtcattgcctctacttcttgtcatcccctctgaagccccttagcagcagcggatatgcctcccataaggagaaagaaatggtggccggcctgttctgcaaacttgccgctctcgttagacacagaatttccctctttggtaatgattctactacaatggtgagctgtcttcacatcttagctcagacacttgacacaaggactgtcatgaagtcaggctcagagctggtgaaggctgggttacgagcattctttgaaaatgctgcagaagatttggagaagacttcagaaaacctgaaacttgggaagttcacccattcccgaacgcagattaaaggcgtttctcagaatattaactacactacagtggctctgctccccatcctgacgtccatctttgagcacgtcactcagcatcagtttggaatggatctactcttgggtgatgtgcagatttcatgctaccacatactgtgcagcctctactcccttgggacgggaaagaacatttatgttgaaaggcaacgccctgcccttggagaatgtctggcctcgctggcagctgccataccagtggcattcctggagcccacccttaatcgctacaatccactctcggtcttcaacaccaaaacccccagggagaggtctattctggggatgccagacacggtagaagacatgtgtcctgacatcccccagctggaaggcctgatgaaggaaatcaacgacctggccgagtcaggggcccggtacacagagatgccccatgtcatcgaggtgatcttacccatgctctgcaactacttgtcctactggtgggagcggggtcctgagaacctgccccccagcacagggccatgctgcaccaaggtcacctctgaacacctcagtctcatcctgggcaacattctgaaaatcatcaacaacaacctgggcatcgatgaggcctcctggatgaagcgcattgcagtgtatgcacagcccatcatcagcaaagccaggcccgacctgctgagaagccacttcatcccaactctggagaagctgaagaaaaaggctgtcaagacggtgcaggaggaggagcagttgaaagccgatggcaaaggggacacccaggaggcagaactcctcatcctggacgagttcgcggtcctctgcagagatctctatgccttctaccccatgctgatccgctacgtggacaacaacagatctaactggctgaaaagtcctgatgctgattctgaccagctcttccgcatggtggcagaagtcttcattctgtggtgtaaatctcataacttcaagagagaagagcaaaattttgtgattcagaatgaaattaataatttggcatttttaactggagacagcaaaagcaagatgtcaaaagccatgcaagtaaagtctggaggacaagaccaggagcggaagaagacaaagcggcggggagacttgtattccatccagacctccctcatcgtggctgcactcaagaaaatgctgcccattggtttgaatatgtgtactccaggcgaccaggagctgatctccctcgcaaaatcgcgatacagccatagggacacagatgaagaggtcagagaacatctgcggaacaacttgcacttgcaggaaaagtctgatgacccagctgtaaaatggcaactgaacctctacaaggatgttctgaagagtgaagaacctttcaatccggaaaagacagtggagcgtgtgcagagaatttcagcagctgtcttccacctggaacaggtggaacagcctttgaggtccaagaaggccgtctggcacaaactgttatcaaagcaacggaaacgggcagtggtggcctgtttcaggatggcccctctctacaacctgcccaggcaacacatgcaccgctctattaacctcttcctccatggctatcagagattttggatagaaacagaggagtattcctttgaagagaaactagtacaggatttggctaaatctccaaaggtggaagaggaggaggaggaagagacagaaaaacaacctgacccactacatcagatcattctctattttagccgcaacgctctcacggagaggagcaaattggaagacgaccctttgtacacctcctattccagcatgatggccaagagttgtcaaagtggtgaggatgaagaagaagatgaagacaaggaaaaaacattcgaagagaaagagatggagaagcaaaaaaccctctatcagcaagctcggctgcatgagcgtggtgctgcagagatggtccttcagatgataagcgctagcaaaggtgagatgagccccatggtggttgagacgctgaagctggggatcgccattctgaacggaggcaatgctggtgtgcaacagaaaatgctagattacctaaaggagaaaaaggatgctggattctttcaaagcctttctggtcttatgcagtcttgcagtgtccttgatttgaatgcatttgagaggcagaataaagctgaaggcctggggatggtgactgaagaaggaacactcattgttcgggaacgtggtgaaaaagtactccagaatgacgagttcacgcgtgatctctttagattcctacagttactttgtgagggacataacagtgactttcagaacttcctgcggactcagatgggcaacaccaccaccgtgaatgtcatcatcagcactgtggactaccttctgcgtctgcaggaatcaatcagtgatttctactggtattattcagggaaggacatcattgatgaatctggacagcacaatttttccaaagctctggcagtcaccaagcagattttcaattctcttacagaatacatccagggcccttgcattggtaatcaacagagcctggctcacagcaggctgtgggacgcagtggttggcttcctccatgtctttgctaatatgcagatgaaactctctcaggattccagtcagatcgagctgctgaaggaactcttggatctccttcaggacatggtggtgatgcttctgtccctcctggaagggaatgtggtaaatggcaccattggcaagcagatggttgacacactggtagaatcatctaccaatgtagaaatgatcttgaaattctttgacatgttcttgaaacttaaagacttaaccagctcagacaccttcaaagaatatgacccagatggtaaaggaattatctccaaaaaagaattccagaaggccatggaagggcaaaaacagtacacgcagtcagagattgactttctcctgtcgtgtgcagaagctgatgagaatgacatgtttaattacgttgattttgtagaccggttccatgagccagccaaggacatagggtttaatgtggctgtgttattgacaaatctttctgaacacatgccaaacgattcccgcctgaagtgtctgttggacccagcagaaagtgtgctaaattacttcgaaccctacctaggacgcatcgagatcatgggtggggccaagaagattgagcgtgtttattttgagatcagtgaatccagtcgcactcagtgggagaagccccaggtgaaggaatctaagcgacagttcatttttgatgttgtcaatgaaggtggggagcaggaaaagatggagctgtttgtgaacttctgtgaggacaccatctttgaaatgcagttagcatctcagatctctgaatccgattcagctgacaggccagaagaggaggaagaagatgaagattcttcttacgtgttagaaattgcgggtgaagaggaagaagacgggtctcttgagccggcctctgcatttgctatggcctgtgcctctgtgaagaggaatgtcaccgacttcctgaagagagcaaccctgaagaacctcaggaagcagtacaggaacgtgaaaaagatgactgcgaaggagctggtgaaggtgctcttctcctttttctggatgctgttcgtggggctattccagttgctcttcaccatcctgggaggaatctttcagatcctctggagcacagtgtttggagggggcctggtagaaggggcaaagaacatcagagtgaccaagatcctgggtgacatgcctgacccaacccaatttggtatccatgatgacactatggaggctgagagggcagaggtgatggagccaggtatcaccactgaactagtacacttcataaagggggagaagggagatacagatatcatgtcagacctctttggactccacccaaagaaagagggcagcttaaagcatgggcctgaagtgggtttgggtgacctctcagaaattattggcaaggatgaaccccctacattagagagtactgtacagaagaagaggaaagctcaggcagcagaaatgaaagcagcaaatgaagcagaaggaaaagtagaatccgagaaggcagacatggaagatggagagaaggaagacaaagacaaagaagaggagcaagctgagtacctgtggacagaagtgacaaaaaagaagaagcggcggtgtggtcagaaggttgagaagccggaagctttcacagccaatttctttaaagggctggaaatctatcagaccaagttactgcattacctggccaggaatttctacaacctgaggttccttgctctgtttgtagccttcgctatcaacttcatcctgcttttttataaggtcactgaagaacctttagaagaagagacagaggatgttgcaaacctatggaattcctttaatgacgaggaagaggaagaagcgatggtattctttgtccttcaggagagcaccgggtatatggcaccaaccctgcgtgccctggccatcatccataccatcatctctctagtctgtgtggtgggctactactgcctgaaggtgcctttggtggttttcaaaagggaaaaagaaatcgccaggaagctggagtttgatggcctatatatcaccgaacagccatctgaagatgacatcaaggggcagtgggaccgcttggtgatcaacacaccatcttttcctaataactactgggacaagtttgtaaagagaaaggtgatcaacaagtatggagatctctacggagcagaacgcattgctgaacttctgggtttggacaaaaatgctcttgactttagcccagtagaagagaccaaagcagaagcggcttctctggtgtcatggctaagttccatagacatgaagtaccatatctggaagcttggagttgtttttactgacaactcctttctctaccttgcctggtatacaaccatgtcagtcctgggccactacaataacttcttctttgctgctcacctattggacatcgcaatgggcttcaagacactgaggaccattctgtcatctgtaactcacaatggcaaacagttggttctgactgtcggtctcctggccgtggtggtttatctctatactgtggtggctttcaacttcttccgcaagttctacaacaaaagcgaagacgatgacgagcccgatatgaagtgcgacgacatgatgacgtgttaccttttccacatgtacgtgggagtgagagcaggaggtggcattggtgatgaaattgaagaccctgctggtgatccttatgaaatgtatcgcattgtctttgacattacctttttcttcttcgtcattgtcatcttgctggccatcattcaaggtcttattattgatgctttcggagagctaagagaccagcaggaacaagtacgagaagatatggagactaaatgtttcatctgtgggattggcaatgactactttgacacaacccctcatggttttgaaacacatacattacaagagcacaacttagccaactacttgttctttctgatgtatttgattaataaagatgaaacagagcacacgggtcaggaatcttatgtctggaagatgtaccaagaaaggtgttgggatttcttcccagccggtgactgctttcgtaaacaatatgaagatcagcttggataaatctgaatcaaagaagcgcgacaattctggacagtcaacttcccatgaaataaagtcccctttttacagttctgcaacatatctgaaatgtgacattttctaaatgcctcccttaaaaaaaaaactgctgaaaatctgtgctattttgaaattgatttggctttttgtgcctaatggacatacactgtgggagagaacctgtcaaaatgtcgaagaaggaaggcgaagaatcaagtaatctctaggcaaatgccttcaagttttccagttctgaggtaactagttcagtttgttgggatggaagcatgaaggaaagggctagagaagtatgaaatctcgaatgtgtaatacctgaaaatttaaacacttgaatgtcatcatggtatccaacttgtgactcatagggtctgaactcactccaaaagataataactgcagtctaatttttcccatggtacttgctagtgactgtatccagaaaagctttaagcagttaaagaaacagaaaaaaaccgacactttgtcgacactgaaatatcgattaagtgccttaaaacctctttagacatagctatgcaagttttttatgtttgtgttccagaaggacagttccattcattagttgtgatcttccgtcttactttatgaaactgcacttgaaggttattcatacaagtttttttagtaacagctgtcagtcaactgctgttattagaagaaaagtactgtactgaaaattcagaaaaaaaatctcaaccttatgccaaaatggagtaatgctttatggtcccttgtaagtagtggagctgctctgtttaggtgaatctcctcaaatacaatgaagtgcccactgcaataaagtaatacgtacc

SEQ ID NO: 178693 - DNA, 15591 bp, Homo sapiens
  Payload ID: 15212
  Gene Symbol: RYR3
  Gene Name: ryanodine receptor 3
  ENST ID: ENST00000634891
  CDS Start-End: 102-14714
ggaggaggagaaagagcgcagcagcagtcagcgcacgccgagcggctgccgggggaagcagaggcgccggaggctggggcaccgccgacgcctcgggagccatggccgaagggggagaaggaggcgaggacgagatccagtttctgaggactgaggatgaagtggtactccagtgcatcgccaccattcataaggagcagaggaagttctgcctggcagccgagggacttgggaatcgcctgtgcttcttggaacccacttcagaagccaagtacattcctccagatctctgcgtctgcaattttgtgctggaacagtccctatctgtcagagccctgcaggaaatgcttgccaacacaggtgaaaatggcggcgaaggggcagcacaaggaggtggccacaggaccctgttatacggccatgcagttctcctgaggcactctttcagcggaatgtatctaacatgcttgactacatcaagatcccagacagacaaacttgcctttgatgtaggtctacgggaacatgccacaggagaagcctgttggtggactatacatcctgcttccaaacagaggtccgaaggagagaaagttcgaattggcgatgacctcatcctcgtcagcgtgtcctctgaaagataccttcatctctcagtatcaaatggtaacatacaagtggatgcctcctttatgcaaacactctggaatgtacatcctacgtgctcaggaagtagcatcgaagaaggatacctacttggtgggcatgtagtacgtcttttccatggtcatgatgaatgtttgacgataccatctacagaccagaatgattcccagcacaggaggatattctacgaagctgggggagctgggactcgagccaggtctctttggagagtggaaccccttcggataagctggagtggcagtaacatcagatggggccaggctttccgactccggcatctcaccacaggccactacctggccttgacagaagaccaaggccttatactgcaagaccgggcaaagtcagacaccaagtccacagctttctctttccgggcatcaaaggaactcaaggagaaattagactccagtcacaagcgagacatagaaggcatgggagttccagaaatcaagtatggagattctgtctgctttgtgcagcatatagccagtggtctgtgggtgacctacaaagcacaagacgccaaaacttcccgcctgggacctctaaaaagaaaggtcatactccatcaggaaggccacatggatgatggattaacactgcagagatgccagcgtgaggagtcccaggctgctcggatcatccggaacactacagccttattcagccagtttgtcagcggaaacaatcgcacagctgcccccatcaccctgcctatagaagaagtcctgcagaccctacaggacttgatcgcctacttccagcccccagaggaggagatgcgacatgaagacaagcagaacaagctccgctcactcaaaaacagacaaaatcttttcaaggaagagggaatgttggcccttgtcttaaattgcattgaccgcttaaatgtctacaatagcgtagcacactttgcagggattgcaagggaagagagtggcatggcctggaaagaaattctgaacctcctctacaaattgctggctgctctcattcgcggaaacagaaacaattgcgctcaattctccaataaccttgattggctcatcagtaaattggacagactagaatcttcctcaggtatcttggaagttttgcactgcatcttaactgaaagcccagaagccttaaatctgatagcggagggccacatcaagtcgatcatctccctgttggataagcacgggcggaatcacaaggttctggatatcctgtgctccctctgtctctgcaatggggttgcagtgagagccaaccagaatctgatctgtgacaacttgctgccccggagaaacctactcctgcagacacgactgattaacgatgtaaccagtatccggccaaacatcttcctgggagtcgcggagggctcagcccagtacaagaagtggtacttcgagctgattatcgaccaggtggaccccttcctaacagcagagcccacacatctgcgggtgggctgggcctcttcttcaggctatgccccatacccaggaggtggagaaggatggggaggcaatggtgttggtgacgacctgtactcctatggctttgatggacttcacctttggtcaggccggatacccagagctgtggcttccatcaaccagcacctcctgagatcggatgacgtggtaagctgctgcctggacctcggggtgcccagcatctcattccgcatcaatgggcagcccgtgcaggggatgtttgagaacttcaacacagacgggctcttcttccctgtgatgagcttttcagcaggtgtcaaagtacgtttcctgatgggtggacgtcatggagagtttaagttcctgcctccctctggctatgccccttgctatgaagccttacttccaaaagagaagatgagattggagcctgtcaaagaatataaacgtgatgctgatggcattagagatctcttgggtaccacccagttcctctcccaagcctctttcatcccatgccccgtagacaccagtcaggttattttgccacctcacctagaaaagatccgagacagactagctgaaaacatccatgagctttggggaatgaataaaatagaacttggctggactttcggcaagatacgagatgacaataaaagacaacacccttgccttgtggagttttcaaagctcccagaaactgagaagaactataacctgcaaatgtcaactgaaaccttaaaaaccctcttggccctggggtgccacattgctcatgttaacccagctgctgaggaggatctcaagaaggtcaaactgcccaaaaactatatgatgtccaacggctataagccagcccctttggatttgtctgatgtgaagctgttacctcctcaagaaattttagtggataagcttgcagaaaatgcacacaatgtttgggcaaaagacagaataaaacaaggatggacctatggcatccaacaggatttgaagaacaaaagaaatccccgtctggtgccatatgcattactggatgagcgtaccaagaagtcaaacagggacagcctgcgggaagctgtgcgcacttttgttggttacgggtataacattgagccatcagaccaagaactagctgactcggctgtggagaaggtcagcatagacaagatccgatttttccgggtagagcgatcttatgcagtgagatctggaaagtggtattttgagtttgaagtggtgactggaggagacatgcgagtcggctgggcgaggccaggctgtcgacctgatgtcgagctgggggccgatgaccaagcctttgtgtttgaaggcaacaggggccagcgttggcatcaaggaagtgggtattttgggcgtacctggcagccaggggatgtggtcggatgtatgattaacctggatgatgcttcaatgatcttcacactgaatggggagctgctgatcaccaacaaaggctctgaacttgccttcgctgactacgagattgagaatggcttcgtgcccatctgctgtctgggtctatctcagatcggccgcatgaatctcgggacagatgccagtaccttcaagttttataccatgtgcggtctccaagagggctttgagccttttgctgtcaacatgaacagagatgttgctatgtggttcagcaagcgcctcccgacgtttgtcaacgtgccaaaggatcatccacacatagaggtcatgaggattgatggcaccatggacagccctccgtgtctcaaggtgacgcataagacatttggcacacagaatagcaatgccgacatgatctattgccgcttgagcatgcctgtcgagtgccactcctccttcagccacagcccctgtctggacagtgaagctttccagaaaaggaaacagatgcaagaaatactctctcatacaacaacacagtgctactacgccatccgcatctttgctggacaggatccatcctgtgtctgggtcggatgggtgactccagactatcacttgtacagtgaaaagtttgacctgaataaaaactgcacagtgactgtcaccctaggggatgaaagaggccgggtccatgaaagtgtgaaacgcagcaactgctacatggtctggggtggagacattgtagccagttcccagagatcaaatcggagcaacgtggacctggagatcggctgtctcgtggatctggccatgggcatgttgtccttctcagccaatggaaaggaactgggcacctgctaccaggtggagcctaataccaaagtgtttccagcagtcttcctgcagcctacaagtacttctttgtttcagtttgaacttggaaagctgaagaacgcaatgcccctgtcagcggccatattcaggagtgaagagaagaacccagtcccacagtgtccacctcggctggacgtccaaaccatccagcccgtgctctggagccgcatgcccaacagcttcctgaaggtggagaccgagcgtgtgagcgagcgccacggctgggtggtgcagtgcctggagcccctgcagatgatggcgctccacatccccgaggagaacaggtgtgtggatatcctggagctctgtgagcaggaggacctgatgcggttccattaccacacgctgaggctctacagcgcggtgtgcgccctgggaaacagccgcgtggcctacgccctgtgcagccacgtggacctctcccagctcttctatgccattgacaacaagtacctccccggcctccttcgatctggtttctatgacctgctcatcagcatccacctggccagcgccaaggagaggaagctgatgatgaagaacgagtacatcatccccattaccagcaccaccaggaatatccgcctcttcccggacgagtccaagaggcatggactgcctggggtgggcctgagaacatgtctcaagcccgggttcaggttctccaccccttgctttgttgtgactggtgaggatcaccaaaagcagagccccgagattcccttggagagtctcaggacgaaggctctgagtatgctgacagaggcagtgcagtgcagcggggcccacatccgagaccctgtaggggggtctgtggagttccagtttgtgcctgtgctgaaactcattggaaccctgctggtcatgggcgtgtttgatgatgatgatgttcggcagatcctcctcctgattgatccctctgtgtttggggagcatagtgcggggacagaggagggagcagaaaaggaggaagtgacccaggtggaggagaaggctgtggaggctggggagaaggccggcaaggaggctcctgtcaaaggcttgttgcagactcgattacccgaatccgtcaagctgcagatgtgtgagctcctcagctatctctgcgactgtgagctgcagcaccgagtggaggccattgtggcatttggtgacatttatgtctccaagctgcaggcaaatcagaagttccgctacaatgagctcatgcaggccctgaacatgtctgcggccctgactgcccggaagaccaaggagttccgctcacccccacaggagcagatcaacatgctgcttaactttcaactgggagagaactgcccctgcccagaggagattcgggaggagctgtatgatttccatgaggaccttctccttcactgtggggttcctttggaagaagaggaagaggaggaggaggacacctcctggacaggaaaactctgtgccttggtttacaaaatcaaaggcccacccaagccagagaaggagcagccgacggaggaggaggagagatgccccacaacattgaaggaactcatctcacagacgatgatctgctgggcccaggaggaccagatccaggattcagagctggtccgaatgatgttcaacctcctccggaggcagtatgacagcattggggagctgctgcaggcgctgcggaagacctacaccatcagccacacctctgtaagcgacaccatcaacctgctggctgccctgggccaaatccgctccctcctcagtgtcaggatgggcaaggaagaggagttgctcatgatcaatgggctgggagacataatgaacaacaaggtgttttaccagcatcccaacctcatgagagtcctgggcatgcacgagacggtgatggaggtgatggtgaacgtgttgggtacagagaaatctcagattgcatttccaaagatggttgctagctgctgccgtttcctttgctatttctgtcgaattagccggcaaaatcagaaggccatgtttgagcatctgagttatcttctggagaatagcagtgttggcctagcctccccgtcgatgaggggatccaccccgctggatgtggcagcttcctctgtgatggacaacaatgagttagcgctgagcttagaggaaccagacctcgagaaggtggtgacctacttggcaggctgtggcctacagagctgccccatgcttctggccaaaggataccctgatgtcggctggaaccccattgaaggggaacgctacctgtccttcctgaggtttgctgtcttcgtgaacagtgagagtgtggaagaaaacgccagcgttgtggtcaagctgctcatcagacgcccagagtgcttcggcccggccctgcggggtgaggggggaaacgggctcttggcagccatgcagggtgccattaagatctctgagaacccagcgctcgacctcccctctcaaggatacaaaagagaagtcagcacgggggacgatgaagaggaagaagaaatcgtgcatatgggcaatgcaattatgtcattttattcggcccttatagatctactgggccgctgtgctcctgaaatgcacctcatccagacaggaaagggggaagccatccgcatcaggtccatcctgcgctccctggtccccacagaagacctggttgggatcatcagcatccccttgaaactgccctccctcaacaaagatgggtcggtcagtgagccagatatggcggccaatttctgccctgaccacaaggcacctatggtgctgttcttggaccgcgtttatggcattaaggatcaaacttttctgctccacttgctggaggttggatttttacctgacctaagagcttctgcctctctagatacagtttccctaagcaccacagaggctgcgcttgcactaaataggtatatatgttctgctgtgctcccgctcctcacaagatgtgcccctctctttgccggaacagaacactgcacctctctgattgattccacactgcagacaatatacaggctatccaagggacgttccctcaccaaagcacaaagggacactatagaagaatgtttgcttgccatttgcaatcacttgaggccttccatgttacagcaactcctgcgacgcctcgtttttgatgtgccgcaactcaatgaatactgcaaaatgcctctcaagcttctgacgaatcactatgaacagtgttggaagtattactgcctgccttcaggatgggggagctacgggctagctgtggaagaagagctgcacctaacggagaagcttttctgggggatttttgactcgctctcccataagaaatatgacccagatcttttccgaatggccctgccttgtctcagtgctatagctggggccttgccaccagattatttagataccagaatcacagccacgttggagaaacagatctcagtggatgcggatggcaactttgacccaaaacctattaacaccatgaatttttccttgcctgaaaaattggaatacatcgtcaccaagtatgctgagcattcacatgataaatgggcctgtgacaagagtcagagtggatggaaatatgggatttccctggatgaaaatgtgaagacccacccactgataaggcctttcaagacattaacggagaaggagaaggaaatttatcgctggcctgcgcgagagtccctgaaaaccatgctggctgtgggctggactgtggagaggaccaaagagggagaagctttggttcaacagcgggaaaatgagaagcttcgaagtgtgtcccaggccaaccagggcaacagctacagtcctgctcccctcgacctctcaaacgttgtgctctccagagagctccagggaatggtggaggtcgtggctgagaactatcacaatatctgggccaagaagaagaagctggagctggagagcaaaggtggtggcagccaccctcttctggtaccatatgacaccttgactgccaaggaaaagttcaaggaccgggagaaggcacaggacctgtttaagttcctccaagtgaatggcatcatagtttccaggggtatgaaggatatggagctggatgcctcctccatggagaagaggtttgcctataagttcttgaagaagatcctgaaatacgttgattctgctcaagaatttattgcccatttagaagccattgtcagcagtgggaaaactgaaaagtctccccgtgaccaggagatcaaattctttgccaaagttctcctcccgctggttgaccagtacttcaccagtcattgcctctacttcttgtcatcccctctgaagccccttagcagcagcggatatgcctcccataaggagaaagaaatggtggccggcctgttctgcaaacttgccgctctcgttagacacagaatttccctctttggtagtgattctactacaatggtgagctgtcttcacatcttagctcagacacttgacacaaggactgtcatgaagtcaggctcagagctggtgaaggctgggttacgagcattctttgaaaatgctgcagaagatttggagaagacttcagaaaacctgaaacttgggaagttcacccattcccgaacgcagattaaaggcgtttctcagaatattaactacactacagtggctctgctccccatcctgacgtccatctttgagcacgtcactcagcatcagtttggaatggatctactcttgggtgatgtgcagatttcatgctaccacatactgtgcagcctctactcccttgggacgggaaagaacatttatgttgaaaggcaacgccctgcccttggagaatgtctggcctcgctggcagctgccataccagtggcattcctggagcccacccttaatcgctacaatccactctcggtcttcaacaccaaaacccccagggagaggtctattctggggatgccagacacggtagaagacatgtgtcctgacatcccccagctggaaggcctgatgaaggaaatcaacgacctggccgagtcaggggcccggtacacagagatgccccatgtcatcgaggtgatcttacccatgctctgcaactacttgtcctactggtgggagcggggtcctgagaacctgccccccagcacagggccatgctgcaccaaggtcacctctgaacacctcagtctcatcctgggcaacattctgaaaatcatcaacaacaacctgggcatcgatgaggcctcctggatgaagcgcattgcagtgtatgcacagcccatcatcagcaaagccaggcccgacctgctgagaagccacttcatcccaactctggagaagctgaagaaaaaggctgtcaagacggtgcaggaggaggagcagttgaaagccgatggcaaaggggacacccaggaggcagaactcctcatcctggacgagttcgcggtcctctgcagagatctctatgccttctaccccatgctgatccgctacgtggacaacaacagatctaactggctgaaaagtcctgatgctgattctgaccagctcttccgcatggtggcagaagtcttcattctgtggtgtaaatctcataacttcaagagagaagagcaaaattttgtgattcagaatgaaattaataatttggcatttttaactggagacagcaaaagcaagatgtcaaaagccatgcaagtaaagtctggaggacaagaccaggagcggaagaagacaaagcggcggggagacttgtattccatccagacctccctcatcgtggctgcactcaagaaaatgctgcccattggtttgaatatgtgtactccaggcgaccaggagctgatctccctcgcaaaatcgcgatacagccatagggacacagatgaagaggtcagagaacatctgcggaacaacttgcacttgcaggaaaagtctgatgacccagctgtaaaatggcaactgaacctctacaaggatgttctgaagagtgaagaacctttcaatccggaaaagacagtggagcgtgtgcagagaatttcagcagctgtcttccacctggaacaggtggaacagcctttgaggtccaagaaggccgtctggcacaaactgttatcaaagcaacggaaacgggcagtggtggcctgtttcaggatggcccctctctacaacctgcccaggcaccgctctattaacctcttcctccatggctatcagagattttggatagaaacagaggagtattcctttgaagagaaactagtacaggatttggctaaatctccaaaggtggaagaggaggaggaggaagagacagaaaaacaacctgacccactacatcagatcattctctattttagccgcaacgctctcacggagaggagcaaattggaagacgaccctttgtacacctcctattccagcatgatggccaagagttgtcaaagtggtgaggatgaagaagaagatgaagacaaggaaaaaacattcgaagagaaagagatggagaagcaaaaaaccctctatcagcaagctcggctgcatgagcgtggtgctgcagagatggtccttcagatgataagcgctagcaaaggtgagatgagccccatggtggttgagacgctgaagctggggatcgccattctgaacggaggcaatgctggtgtgcaacagaaaatgctagattacctaaaggagaaaaaggatgctggattctttcaaagcctttctggtcttatgcagtcttgcagtgtccttgatttgaatgcatttgagaggcagaataaagctgaaggcctggggatggtgactgaagaaggaacactcattgttcgggaacgtggtgaaaaagtactccagaatgacgagttcacgcgtgatctctttagattcctacagttactttgtgagggacataacagtgactttcagaacttcctgcggactcagatgggcaacaccaccaccgtgaatgtcatcatcagcactgtggactaccttctgcgtctgcaggaatcaatcagtgatttctactggtattattcagggaaggacatcattgatgaatctggacagcacaatttttccaaagctctggcagtcaccaagcagattttcaattctcttacagaatacatccagggcccttgcattggtaatcaacagagcctggctcacagcaggctgtgggacgcagtggttggcttcctccatgtctttgctaatatgcagatgaaactctctcaggattccagtcagatcgagctgctgaaggaactcttggatctccttcaggacatggtggtgatgcttctgtccctcctggaagggaatgtggtaaatggcaccattggcaagcagatggttgacacactggtagaatcatctaccaatgtagaaatgatcttgaaattctttgacatgttcttgaaacttaaagacttaaccagctcagacaccttcaaagaatatgacccagatggtaaaggaattatctccaaaaaagaattccagaaggccatggaagggcaaaaacagtacacgcagtcagagattgactttctcctgtcgtgtgcagaagctgatgagaatgacatgtttaattacgttgattttgtagaccggttccatgagccagccaaggacatagggtttaatgtggctgtgttattgacaaatctttctgaacacatgccaaacgattcccgcctgaagtgtctgttggacccagcagaaagtgtgctaaattacttcgaaccctacctaggacgcatcgagatcatgggtggggccaagaagattgagcgtgtttattttgagatcagtgaatccagtcgcactcagtgggagaagccccaggtgaaggaatctaagcgacagttcatttttgatgttgtcaatgaaggtggggagcaggaaaagatggagctgtttgtgaacttctgtgaggacaccatctttgaaatgcagttagcatctcagatctctgaatccgattcagctgacaggccagaagaggaggaagaagatgaagattcttcttacgtgttagaaattgcgggtgaagaggaagaagacgggtctcttgagccggcctctgcatttgctatggcctgtgcctctgtgaagaggaatgtcaccgacttcctgaagagagcaaccctgaagaacctcaggaagcagtacaggaacgtgaaaaagatgactgcgaaggagctggtgaaggtgctcttctcctttttctggatgctgttcgtggggctattccagttgctcttcaccatcctgggaggaatctttcagatcctctggagcacagtgtttggagggggcctggtagaaggggcaaagaacatcagagtgaccaagatcctgggtgacatgcctgacccaacccaatttggtatccatgatgacactatggaggctgagagggcagaggtgatggagccaggtatcaccactgaactagtacacttcataaagggggagaagggagatacagatatcatgtcagacctctttggactccacccaaagaaagagggcagcttaaagcatgggcctgaagtgggtttgggtgacctctcagaaattattggcaaggatgaaccccctacattagagagtactgtacagaagaagaggaaagctcaggcagcagaaatgaaagcagcaaatgaagcagaaggaaaagtagaatccgagaaggcagacatggaagatggagagaaggaagacaaagacaaagaagaggagcaagctgagtacctgtggacagaagtgacaaaaaagaagaagcggcggtgtggtcagaaggttgagaagccggaagctttcacagccaatttctttaaagggctggaaatctatcagaccaagttactgcattacctggccaggaatttctacaacctgaggttccttgctctgtttgtagccttcgctatcaacttcatcctgcttttttataaggtcactgaagaacctttagaagaagagacagaggatgttgcaaacctatggaattcctttaatgacgaggaagaggaagaagcgatggtattctttgtccttcaggagagcaccgggtatatggcaccaaccctgcgtgccctggccatcatccataccatcatctctctagtctgtgtggtgggctactactgcctgaaggtgcctttggtggttttcaaaagggaaaaagaaatcgccaggaagctggagtttgatggcctatatatcaccgaacagccatctgaagatgacatcaaggggcagtgggaccgcttggtgatcaacacaccatcttttcctaataactactgggacaagtttgtaaagagaaaggtgatcaacaagtatggagatctctacggagcagaacgcattgctgaacttctgggtttggacaaaaatgctcttgactttagcccagtagaagagaccaaagcagaagcggcttctctggtgtcatggctaagttccatagacatgaagtaccatatctggaagcttggagttgtttttactgacaactcctttctctaccttgcctggtatacaaccatgtcagtcctgggccactacaataacttcttctttgctgctcacctattggacatcgcaatgggcttcaagacactgaggaccattctgtcatctgtaactcacaatggcaaacagttggttctgactgtcggtctcctggccgtggtggtttatctctatactgtggtggctttcaacttcttccgcaagttctacaacaaaagcgaagacgatgacgagcccgatatgaagtgcgacgacatgatgacgtgttaccttttccacatgtacgtgggagtgagagcaggaggtggcattggtgatgaaattgaagaccctgctggtgatccttatgaaatgtatcgcattgtctttgacattacctttttcttcttcgtcattgtcatcttgctggccatcattcaaggtcttattattgatgctttcggagagctaagagaccagcaggaacaagtacgagaagatatggagactaaatgtttcatctgtgggattggcaatgactactttgacacaacccctcatggttttgaaacacatacattacaagagcacaacttagccaactacttgttctttctgatgtatttgattaataaagatgaaacagagcacacgggtcaggaatcttatgtctggaagatgtaccaagaaaggtgttgggatttcttcccagccggtgactgctttcgtaaacaatatgaagatcagcttggataaatctgaatcaaagaagcgcgacaattctggacagtcaacttcccatgaaataaagtcccctttttacagttctgcaacatatctgaaatgtgacattttctaaatgcctcccttaaaaaaaaaactgctgaaaatctgtgctattttgaaattgatttggctttttgtgcctaatggacatacactgtgggagagaacctgtcaaaatgtcgaagaaggaaggcgaagaatcaagtaatctctaggcaaatgccttcaagttttccagttctgaggtaactagttcagtttgttgggatggaagcatgaaggaaagggctagagaagtatgaaatctcgaatgtgtaatacctgaaaatttaaacacttgaatgtcatcatggtatccaacttgtgactcatagggtctgaactcactccaaaagataataactgcagtctaatttttcccatggtacttgctagtgactgtatccagaaaagctttaagcagttaaagaaacagaaaaaaaccgacactttgtcgacactgaaatatcgattaagtgccttaaaacctctttagacatagctatgcaagttttttatgtttgtgttccagaaggacagttccattcattagttgtgatcttccgtcttactttatgaaactgcacttgaaggttattcatacaagtttttttagtaacagctgtcagtcaactgctgttattagaagaaaagtactgtactgaaaattcagaaaaaaaatctcaaccttatgccaaaatggagtaatgctttatggtcccttgtaagtagtggagctgctctgtttaggtgaatctcctcaaatacaatgaagtgcccactgcaataaagtaatacgtaccaatac

SEQ ID NO: 178694 - DNA, 137 bp, Homo sapiens
  Payload ID: 15212
  Gene Symbol: RYR3
  Gene Name: ryanodine receptor 3
  ENST ID: ENST00000634750
  CDS Start-End: 1-137
gcgaggacgagatccagtttctgaggacttacattcctccagatctctgcgtctgcaattttgtgctggaacagtccctatctgtcagagccctgcaggaaatgcttgccaacacaggtgaaaatggcggcgaaggg

SEQ ID NO: 178695 - DNA, 2743 bp, Homo sapiens
  Payload ID: 15212
  Gene Symbol: RYR3
  Gene Name: ryanodine receptor 3
  ENST ID: ENST00000634730
  CDS Start-End: 1-1848
agagtgaccaagatcctgggtgacatgcctgacccaacccaatttggtatccatgatgacactatggaggctgagagggcagaggtgatggagccaggtatcaccactgaactagtacacttcataaagggggagaagggagatacagatatcatgtcagacctctttggactccacccaaagaaagagggcagcttaaagcatgggcctgaagtgggtttgggtgacctctcagaaattattggcaaggatgaaccccctacattagagagtactgtacagaagaagaggaaagctcaggcagcagaaatgaaagcagcaaatgaagcagaaggaaaagtagaatccgagaaggcagacatggaagatggagagaaggaagacaaagacaaagaagaggagcaagctgagtacctgtggacagaagtgacaaaaaagaagaagcggcggtgtggtcagaaggttgagaagccggaagctttcacagccaatttctttaaagggctggaaatctatcagaccaagttactggtcactgaagaacctttagaagaagagacagaggatgttgcaaacctatggaattcctttaatgacgaggaagaggaagaagcgatggtattctttgtccttcaggagagcaccgggtatatggcaccaaccctgcgtgccctggccatcatccataccatcatctctctagtctgtgtggtgggctactactgcctgaaggtgcctttggtggttttcaaaagggaaaaagaaatcgccaggaagctggagtttgatggcctatatatcaccgaacagccatctgaagatgacatcaaggggcagtgggaccgcttggtgatcaacacaccatcttttcctaataactactgggacaagtttgtaaagagaaaggtgatcaacaagtatggagatctctacggagcagaacgcattgctgaacttctgggtttggacaaaaatgctcttgactttagcccagtagaagagaccaaagcagaagcggcttctctggtgtcatggctaagttccatagacatgaagtaccatatctggaagcttggagttgtttttactgacaactcctttctctaccttgcctggtatacaaccatgtcagtcctgggccactacaataacttcttctttgctgctcacctattggacatcgcaatgggcttcaagacactgaggaccattctgtcatctgtaactcacaatggcaaacagttggttctgactgtcggtctcctggccgtggtggtttatctctatactgtggtggctttcaacttcttccgcaagttctacaacaaaagcgaagacgatgacgagcccgatatgaagtgcgacgacatgatgacgtgttaccttttccacatgtacgtgggagtgagagcaggaggtggcattggtgatgaaattgaagaccctgctggtgatccttatgaaatgtatcgcattgtctttgacattacctttttcttcttcgtcattgtcatcttgctggccatcattcaaggtcttattattgatgctttcggagagctaagagaccagcaggaacaagtacgagaagatatggagactaaatgtttcatctgtgggattggcaatgactactttgacacaacccctcatggttttgaaacacatacattacaagagcacaacttagccaactacttgttctttctgatgtatttgattaataaagatgaaacagagcacacgggtcaggaatcttatgtctggaagatgtaccaagaaaggtgttgggatttcttcccagccggtgactgctttcgtaaacaatatgaagatcagcttggataaatctgaatcaaagaagcgcgacaattctggacagtcaacttcccatgaaataaagtcccctttttacagttctgcaacatatctgaaatgtgacattttctaaatgcctcccttaaaaaaaaaactgctgaaaatctgtgctattttgaaattgatttggctttttgtgcctaatggacatacactgtgggagagaacctgtcaaaatgtcgaagaaggaaggcgaagaatcaagtaatctctaggcaaatgccttcaagttttccagttctgaggtaactagttcagtttgttgggatggaagcatgaaggaaagggctagagaagtatgaaatctcgaatgtgtaatacctgaaaatttaaacacttgaatgtcatcatggtatccaacttgtgactcatagggtctgaactcactccaaaagataataactgcagtctaatttttcccatggtacttgctagtgactgtatccagaaaagctttaagcagttaaagaaacagaaaaaaaccgacactttgtcgacactgaaatatcgattaagtgccttaaaacctctttagacatagctatgcaagttttttatgtttgtgttccagaaggacagttccattcattagttgtgatcttccgtcttactttatgaaactgcacttgaaggttattcatacaagtttttttagtaacagctgtcagtcaactgctgttattagaagaaaagtactgtactgaaaattcagaaaaaaaatctcaaccttatgccaaaatggagtaatgctttatggtcccttgtaagtagtggagctgctctgtttaggtgaatctcctcaaatacaatgaagtgcccactgcaataaagtaatacgtaccaatacctccagggtctggactct

SEQ ID NO: 178696 - DNA, 15078 bp, Homo sapiens
  Payload ID: 15212
  Gene Symbol: RYR3
  Gene Name: ryanodine receptor 3
  ENST ID: ENST00000634418
  CDS Start-End: 1-14580
atggccgaagggggagaaggaggcgaggacgagatccagtttctgaggactgaggatgaagtggtactccagtgcatcgccaccattcataaggagcagaggaagttctgcctggcagccgagggacttgggaatcgcctgtgcttcttggaacccacttcagaagccaagtacattcctccagatctctgcgtctgcaattttgtgctggaacagtccctatctgtcagagccctgcaggaaatgcttgccaacacaggtgaaaatggcggcgaaggggcagcacaaggaggtggccacaggaccctgttatacggccatgcagttctcctgaggcactctttcagcggaatgtatctaacatgcttgactacatcaagatcccagacagacaaacttgcctttgatgtaggtctacgggaacatgccacaggagaagcctgttggtggactatacatcctgcttccaaacagaggtccgaaggagagaaagttcgaattggcgatgacctcatcctcgtcagcgtgtcctctgaaagataccttcatctctcagtatcaaatggtaacatacaagtggatgcctcctttatgcaaacactctggaatgtacatcctacgtgctcaggaagtagcatcgaagaaggatacctacttggtgggcatgtagtacgtcttttccatggtcatgatgaatgtttgacgataccatctacagaccagaatgattcccagcacaggaggatattctacgaagctgggggagctgggactcgagccaggtctctttggagagtggaaccccttcggataagctggagtggcagtaacatcagatggggccaggctttccgactccggcatctcaccacaggccactacctggccttgacagaagaccaaggccttatactgcaagaccgggcaaagtcagacaccaagtccacagctttctctttccgggcatcaaaggaactcaaggagaaattagactccagtcacaagcgagacatagaaggcatgggagttccagaaatcaagtatggagattctgtctgctttgtgcagcatatagccagtggtctgtgggtgacctacaaagcacaagacgccaaaacttcccgcctgggacctctaaaaagaaaggtcatactccatcaggaaggccacatggatgatggattaacactgcagagatgccagcgtgaggagtcccaggctgctcggatcatccggaacactacagccttattcagccagtttgtcagcggaaacaatcgcacagctgcccccatcaccctgcctatagaagaagtcctgcagaccctacaggacttgatcgcctacttccagcccccagaggaggagatgcgacatgaagacaagcagaacaagctccgctcactcaaaaacagacaaaatcttttcaaggaagagggaatgttggcccttgtcttaaattgcattgaccgcttaaatgtctacaatagcgtagcacactttgcagggattgcaagggaagagagtggcatggcctggaaagaaattctgaacctcctctacaaattgctggctgctctcattcgcggaaacagaaacaattgcgctcaattctccaataaccttgattggctcatcagtaaattggacagactagaatcttcctcaggtatcttggaagttttgcactgcatcttaactgaaagcccagaagccttaaatctgatagcggagggccacatcaagtcgatcatctccctgttggataagcacgggcggaatcacaaggttctggatatcctgtgctccctctgtctctgcaatggggttgcagtgagagccaaccagaatctgatctgtgacaacttgctgccccggagaaacctactcctgcagacacgactgattaacgatgtaaccagtatccggccaaacatcttcctgggagtcgcggagggctcagcccagtacaagaagtggtacttcgagctgattatcgaccaggtggaccccttcctaacagcagagcccacacatctgcgggtgggctgggcctcttcttcaggctatgccccatacccaggaggtggagaaggatggggaggcaatggtgttggtgacgacctgtactcctatggctttgatggacttcacctttggtcaggccggatacccagagctgtggcttccatcaaccagcacctcctgagatcggatgacgtggtaagctgctgcctggacctcggggtgcccagcatctcattccgcatcaatgggcagcccgtgcaggggatgtttgagaacttcaacacagacgggctcttcttccctgtgatgagcttttcagcaggtgtcaaagtacgtttcctgatgggtggacgtcatggagagtttaagttcctgcctccctctggctatgccccttgctatgaagccttacttccaaaagagaagatgagattggagcctgtcaaagaatataaacgtgatgctgatggcattagagatctcttgggtaccacccagttcctctcccaagcctctttcatcccatgccccgtagacaccagtcaggttattttgccacctcacctagaaaagatccgagacagactagctgaaaacatccatgagctttggggaatgaataaaatagaacttggctggactttcggcaagatacgagatgacaataaaagacaacacccttgccttgtggagttttcaaagctcccagaaactgagaagaactataacctgcaaatgtcaactgaaaccttaaaaaccctcttggccctggggtgccacattgctcatgttaacccagctgctgaggaggatctcaagaaggtcaaactgcccaaaaactatatgatgtccaacggctataagccagcccctttggatttgtctgatgtgaagctgttacctcctcaagaaattttagtggataagcttgcagaaaatgcacacaatgtttgggcaaaagacagaataaaacaaggatggacctatggcatccaacaggatttgaagaacaaaagaaatccccgtctggtgccatatgcattactggatgagcgtaccaagaagtcaaacagggacagcctgcgggaagctgtgcgcacttttgttggttacgggtataacattgagccatcagaccaagaactagctgactcggctgtggagaaggtcagcatagacaagatccgatttttccgggtagagcgatcttatgcagtgagatctggaaagtggtattttgagtttgaagtggtgactggaggagacatgcgagtcggctgggcgaggccaggctgtcgacctgatgtcgagctgggggccgatgaccaagcctttgtgtttgaaggcaacaggggccagcgttggcatcaaggaagtgggtattttgggcgtacctggcagccaggggatgtggtcggatgtatgattaacctggatgatgcttcaatgatcttcacactgaatggggagctgctgatcaccaacaaaggctctgaacttgccttcgctgactacgagattgagaatggcttcgtgcccatctgctgtctgggtctatctcagatcggccgcatgaatctcgggacagatgccagtaccttcaagttttataccatgtgcggtctccaagagggctttgagccttttgctgtcaacatgaacagagatgttgctatgtggttcagcaagcgcctcccgacgtttgtcaacgtgccaaaggatcatccacacatagaggtcatgaggattgatggcaccatggacagccctccgtgtctcaaggtgacgcataagacatttggcacacagaatagcaatgccgacatgatctattgccgcttgagcatgcctgtcgagtgccactcctccttcagccacagcccctgtctggacagtgaagctttccagaaaaggaaacagatgcaagaaatactctctcatacaacaacacagtgctactacgccatccgcatctttgctggacaggatccatcctgtgtctgggtcggatgggtgactccagactatcacttgtacagtgaaaagtttgacctgaataaaaactgcacagtgactgtcaccctaggggatgaaagaggccgggtccatgaaagtgtgaaacgcagcaactgctacatggtctggggtggagacattgtagccagttcccagagatcaaatcggagcaacgtggacctggagatcggctgtctcgtggatctggccatgggcatgttgtccttctcagccaatggaaaggaactgggcacctgctaccaggtggagcctaataccaaagtgtttccagcagtcttcctgcagcctacaagtacttctttgtttcagtttgaacttggaaagctgaagaacgcaatgcccctgtcagcggccatattcaggagtgaagagaagaacccagtcccacagtgtccacctcggctggacgtccaaaccatccagcccgtgctctggagccgcatgcccaacagcttcctgaaggtggagaccgagcgtgtgagcgagcgccacggctgggtggtgcagtgcctggagcccctgcagatgatggcgctccacatccccgaggagaacaggtgtgtggatatcctggagctctgtgagcaggaggacctgatgcggttccattaccacacgctgaggctctacagcgcggtgtgcgccctgggaaacagccgcgtggcctacgccctgtgcagccacgtggacctctcccagctcttctatgccattgacaacaagtacctccccggcctccttcgatctggtttctatgacctgctcatcagcatccacctggccagcgccaaggagaggaagctgatgatgaagaacgagtacatcatccccattaccagcaccaccaggaatatccgcctcttcccggacgagtccaagaggcatggactgcctggggtgggcctgagaacatgtctcaagcccgggttcaggttctccaccccttgctttgttgtgactggtgaggatcaccaaaagcagagccccgagattcccttggagagtctcaggacgaaggctctgagtatgctgacagaggcagtgcagtgcagcggggcccacatccgagaccctgtaggggggtctgtggagttccagtttgtgcctgtgctgaaactcattggaaccctgctggtcatgggcgtgtttgatgatgatgatgttcggcagatcctcctcctgattgatccctctgtgtttggggagcatagtgcggggacagaggagggagcagaaaaggaggaagtgacccaggtggaggagaaggctgtggaggctggggagaaggccggcaaggaggctcctgtcaaaggcttgttgcagactcgattacccgaatccgtcaagctgcagatgtgtgagctcctcagctatctctgcgactgtgagctgcagcaccgagtggaggccattgtggcatttggtgacatttatgtctccaagctgcaggcaaatcagaagttccgctacaatgagctcatgcaggccctgaacatgtctgcggccctgactgcccggaagaccaaggagttccgctcacccccacaggagcagatcaacatgctgcttaactttcaactgggagagaactgcccctgcccagaggagattcgggaggagctgtatgatttccatgaggaccttctccttcactgtggggttcctttggaagaagaggaagaggaggaggaggacacctcctggacaggaaaactctgtgccttggtttacaaaatcaaaggcccacccaagccagagaaggagcagccgacggaggaggaggagagatgccccacaacattgaaggaactcatctcacagacgatgatctgctgggcccaggaggaccagatccaggattcagagctggtccgaatgatgttcaacctcctccggaggcagtatgacagcattggggagctgctgcaggcgctgcggaagacctacaccatcagccacacctctgtaagcgacaccatcaacctgctggctgccctgggccaaatccgctccctcctcagtgtcaggatgggcaaggaagaggagttgctcatgatcaatgggctgggagacataatgaacaacaaggtgttttaccagcatcccaacctcatgagagtcctgggcatgcacgagacggtgatggaggtgatggtgaacgtgttgggtacagagaaatctcagattgcatttccaaagatggttgctagctgctgccgtttcctttgctatttctgtcgaattagccggcaaaatcagaaggccatgtttgagcatctgagttatcttctggagaatagcagtgttggcctagcctccccgtcgatgaggggatccaccccgctggatgtggcagcttcctctgtgatggacaacaatgagttagcgctgagcttagaggaaccagacctcgagaaggtggtgacctacttggcaggctgtggcctacagagctgccccatgcttctggccaaaggataccctgatgtcggctggaaccccattgaaggggaacgctacctgtccttcctgaggtttgctgtcttcgtgaacagtgagagtgtggaagaaaacgccagcgttgtggtcaagctgctcatcagacgcccagagtgcttcggcccggccctgcggggtgaggggggaaacgggctcttggcagccatgcagggtgccattaagatctctgagaacccagcgctcgacctcccctctcaaggatacaaaagagaagtcacgggggacgatgaagaggaagaagaaatcgtgcatatgggcaatgcaattatgtcattttattcggcccttatagatctactgggccgctgtgctcctgaaatgcacctcatccagacaggaaagggggaagccatccgcatcaggtccatcctgcgctccctggtccccacagaagacctggttgggatcatcagcatccccttgaaactgccctccctcaacaaagatgggtcggtcagtgagccagatatggcggccaatttctgccctgaccacaaggcacctatggtgctgttcttggaccgcgtttatggcattaaggatcaaacttttctgctccacttgctggaggttggatttttacctgacctaagagcttctgcctctctagatacagtttccctaagcaccacagaggctgcgcttgcactaaataggtatatatgttctgctgtgctcccgctcctcacaagatgtgcccctctctttgccggaacagaacactgcacctctctgattgattccacactgcagacaatatacaggctatccaagggacgttccctcaccaaagcacaaagggacactatagaagaatgtttgcttgccatttgcaatcacttgaggccttccatgttacagcaactcctgcgacgcctcgtttttgatgtgccgcaactcaatgaatactgcaaaatgcctctcaagcttctgacgaatcactatgaacagtgttggaagtattactgcctgccttcaggatgggggagctacgggctagctgtggaagaagagctgcacctaacggagaagcttttctgggggatttttgactcgctctcccataagaaatatgacccagatcttttccgaatggccctgccttgtctcagtgctatagctggggccttgccaccagattatttagataccagaatcacagccacgttggagaaacagatctcagtggatgcggatggcaactttgacccaaaacctattaacaccatgaatttttccttgcctgaaaaattggaatacatcgtcaccaagtatgctgagcattcacatgataaatgggcctgtgacaagagtcagagtggatggaaatatgggatttccctggatgaaaatgtgaagacccacccactgataaggcctttcaagacattaacggagaaggagaaggaaatttatcgctggcctgcgcgagagtccctgaaaaccatgctggctgtgggctggactgtggagaggaccaaagagggagaagctttggttcaacagcgggaaaatgagaagcttcgaagtgtgtcccaggccaaccagggcaacagctacagtcctgctcccctcgacctctcaaacgttgtgctctccagagagctccagggaatggtggaggtcgtggctgagaactatcacaatatctgggccaagaagaagaagctggagctggagagcaaaggtggtggcagccaccctcttctggtaccatatgacaccttgactgccaaggaaaagttcaaggaccgggagaaggcacaggacctgtttaagttcctccaagtgaatggcatcatagtttccaggggtatgaaggatatggagctggatgcctcctccatggagaagaggtttgcctataagttcttgaagaagatcctgaaatacgttgattctgctcaagaatttattgcccatttagaagccattgtcagcagtgggaaaactgaaaagtctccccgtgaccaggagatcaaattctttgccaaagttctcctcccgctggttgaccagtacttcaccagtcattgcctctacttcttgtcatcccctctgaagccccttagcagcagcggatatgcctcccataaggagaaagaaatggtggccggcctgttctgcaaacttgccgctctcgttagacacagaatttccctctttggtagtgattctactacaatggtgagctgtcttcacatcttagctcagacacttgacacaaggactgtcatgaagtcaggctcagagctggtgaaggctgggttacgagcattctttgaaaatgctgcagaagatttggagaagacttcagaaaacctgaaacttgggaagttcacccattcccgaacgcagattaaaggcgtttctcagaatattaactacactacagtggctctgctccccatcctgacgtccatctttgagcacgtcactcagcatcagtttggaatggatctactcttgggtgatgtgcagatttcatgctaccacatactgtgcagcctctactcccttgggacgggaaagaacatttatgttgaaaggcaacgccctgcccttggagaatgtctggcctcgctggcagctgccataccagtggcattcctggagcccacccttaatcgctacaatccactctcggtcttcaacaccaaaacccccagggagaggtctattctggggatgccagacacggtagaagacatgtgtcctgacatcccccagctggaaggcctgatgaaggaaatcaacgacctggccgagtcaggggcccggtacacagagatgccccatgtcatcgaggtgatcttacccatgctctgcaactacttgtcctactggtgggagcggggtcctgagaacctgccccccagcacagggccatgctgcaccaaggtcacctctgaacacctcagtctcatcctgggcaacattctgaaaatcatcaacaacaacctgggcatcgatgaggcctcctggatgaagcgcattgcagtgtatgcacagcccatcatcagcaaagccaggcccgacctgctgagaagccacttcatcccaactctggagaagctgaagaaaaaggctgtcaagacggtgcaggaggaggagcagttgaaagccgatggcaaaggggacacccaggaggcagaactcctcatcctggacgagttcgcggtcctctgcagagatctctatgccttctaccccatgctgatccgctacgtggacaacaacagatctaactggctgaaaagtcctgatgctgattctgaccagctcttccgcatggtggcagaagtcttcattctgtggtgtaaatctcataacttcaagagagaagagcaaaattttgtgattcagaatgaaattaataatttggcatttttaactggagacagcaaaagcaagatgtcaaaatctggaggacaagaccaggagcggaagaagacaaagcggcggggagacttgtattccatccagacctccctcatcgtggctgcactcaagaaaatgctgcccattggtttgaatatgtgtactccaggcgaccaggagctgatctccctcgcaaaatcgcgatacagccatagggacacagatgaagaggtcagagaacatctgcggaacaacttgcacttgcaggaaaagtctgatgacccagctgtaaaatggcaactgaacctctacaaggatgttctgaagagtgaagaacctttcaatccggaaaagacagtggagcgtgtgcagagaatttcagcagctgtcttccacctggaacaggtggaacagcctttgaggtccaagaaggccgtctggcacaaactgttatcaaagcaacggaaacgggcagtggtggcctgtttcaggatggcccctctctacaacctgcccagacacaaaattaataatttcttcctgagcacctttcaacaagtttggctggaaaaggttaatgaaaaaactcagtatgacaggcttatacccattttaatgaaatctccaaaggtggaagaggaggaggaggaagagacagaaaaacaacctgacccactacatcagatcattctctattttagccgcaacgctctcacggagaggagcaaattggaagacgaccctttgtacacctcctattccagcatgatggccaagagttgtcaaagtggtgaggatgaagaagaagatgaagacaaggaaaaaacattcgaagagaaagagatggagaagcaaaaaaccctctatcagcaagctcggctgcatgagcgtggtgctgcagagatggtccttcagatgataagcgctagcaaaggtgagatgagccccatggtggttgagacgctgaagctggggatcgccattctgaacggaggcaatgctggtgtgcaacagaaaatgctagattacctaaaggagaaaaaggatgctggattctttcaaagcctttctggtcttatgcagtcttgcagtgtccttgatttgaatgcatttgagaggcagaataaagctgaaggcctggggatggtgactgaagaaggaacacgtgaaaaagtactccagaatgacgagttcacgcgtgatctctttagattcctacagttactttgtgagggacataacagtgactttcagaacttcctgcggactcagatgggcaacaccaccaccgtgaatgtcatcatcagcactgtggactaccttctgcgtctgcaggaatcaatcagtgatttctactggtattattcagggaaggacatcattgatgaatctggacagcacaatttttccaaagctctggcagtcaccaagcagattttcaattctcttacagaatacatccagggcccttgcattggtaatcaacagagcctggctcacagcaggctgtgggacgcagtggttggcttcctccatgtctttgctaatatgcagatgaaactctctcaggattccagtcagatcgagctgctgaaggaactcttggatctccttcaggacatggtggtgatgcttctgtccctcctggaagggaatgtggtaaatggcaccattggcaagcagatggttgacacactggtagaatcatctaccaatgtagaaatgatcttgaaattctttgacatgttcttgaaacttaaagacttaaccagctcagacaccttcaaagaatatgacccagatggtaaaggaattatctccaaaaaagaattccagaaggccatggaagggcaaaaacagtacacgcagtcagagattgactttctcctgtcgtgtgcagaagctgatgagaatgacatgtttaattacgttgattttgtagaccggttccatgagccagccaaggacatagggtttaatgtggctgtgttattgacaaatctttctgaacacatgccaaacgattcccgcctgaagtgtctgttggacccagcagaaagtgtgctaaattacttcgaaccctacctaggacgcatcgagatcatgggtggggccaagaagattgagcgtgtttattttgagatcagtgaatccagtcgcactcagtgggagaagccccaggtgaaggaatctaagcgacagttcatttttgatgttgtcaatgaaggtggggagcaggaaaagatggagctgtttgtgaacttctgtgaggacaccatctttgaaatgcagttagcatctcagatctctgaatccgattcagctgacaggccagaagaggaggaagaagatgaagattcttcttacgtgttagaaattgcgggtgaagaggaagaagacgggtctcttgagccggcctctgcatttgctatggcctgtgcctctgtgaagaggaatgtcaccgacttcctgaagagagcaaccctgaagaacctcaggaagcagtacaggaacgtgaaaaagatgactgcgaaggagctggtgaaggtgctcttctcctttttctggatgctgttcgtggggctattccagttgctcttcaccatcctgggaggaatctttcagatcctctggagcacagtgtttggagggggcctggtagaaggggcaaagaacatcagagtgaccaagatcctgggtgacatgcctgacccaacccaatttggtatccatgatgacactatggaggctgagagggcagaggtgatggagccaggtatcaccactgaactagtacacttcataaagggggagaagggagatacagatatcatgtcagacctctttggactccacccaaagaaagagggcagcttaaagcatgggcctgaagtgggtttgggtgacctctcagaaattattggcaaggatgaaccccctacattagagagtactgtacagaagaagaggaaagctcaggcagcagaaatgaaagcagcaaatgaagcagaaggaaaagtagaatccgagaaggcagacatggaagatggagagaaggaagacaaagacaaagaagaggagcaagctgagtacctgtggacagaagtgacaaaaaagaagaagcggcggtgtggtcagaaggttgagaagccggaagctttcacagccaatttctttaaagggctggaaatctatcagaccaagttactgcattacctggccaggaatttctacaacctgaggttccttgctctgtttgtagccttcgctatcaacttcatcctgcttttttataaggtcactgaagaacctttagaagaagagacagaggatgttgcaaacctatggaattcctttaatgacgaggaagaggaagaagcgatggtattctttgtccttcaggagagcaccgggtatatggcaccaaccctgcgtgccctggccatcatccataccatcatctctctagtctgtgtggtgggctactactgcctgaaggtgcctttggtggttttcaaaagggaaaaagaaatcgccaggaagctggagtttgatggcctatatatcaccgaacagccatctgaagatgacatcaaggggcagtgggaccgcttggtgatcaacacaccatcttttcctaataactactgggacaagtttgtaaagagaaaggtgatcaacaagtatggagatctctacggagcagaacgcattgctgaacttctgggtttggacaaaaatgctcttgactttagcccagtagaagagaccaaagcagaagcggcttctctggtgtcatggctaagttccatagacatgaagtaccatatctggaagcttggagttgtttttactgacaactcctttctctaccttgcctggtatacaaccatgtcagtcctgggccactacaataacttcttctttgctgctcacctattggacatcgcaatgggcttcaagacactgaggaccattctgtcatctgtaactcacaatggcaaacagttggttctgactgtcggtctcctggccgtggtggtttatctctatactgtggtggctttcaacttcttccgcaagttctacaacaaaagcgaagacgatgacgagcccgatatgaagtgcgacgacatgatgacgtgttaccttttccacatgtacgtgggagtgagagcaggaggtggcattggtgatgaaattgaagaccctgctggtgatccttatgaaatgtatcgcattgtctttgacattacctttttcttcttcgtcattgtcatcttgctggccatcattcaaggtcttattattgatgctttcggagagctaagagaccagcaggaacaagtacgagaagatatggagactaaatgtttcatctgtgggattggcaatgactactttgacacaacccctcatggttttgaaacacatacattacaagagcacaacttagccaactacttgttctttctgatgtatttgattaataaagatgaaacagagcacacgggtcaggaatcttatgtctggaagatgtaccaagaaaggtgttgggatttcttcccagccggtgactgctttcgtaaacaatatgaagatcagcttggataaatctgaatcaaagaagcgcgacaattctggacagtcaacttcccatgaaataaagtcccctttttacagttctgcaacatatctgaaatgtgacattttctaaatgcctcccttaaaaaaaaaactgctgaaaatctgtgctattttgaaattgatttggctttttgtgcctaatggacatacactgtgggagagaacctgtcaaaatgtcgaagaaggaaggcgaagaatcaagtaatctctaggcaaatgccttcaagttttccagttctgaggtaactagttcagtttgttgggatggaagcatgaaggaaagggctagagaagtatgaaatctcgaatgtgtaatacctgaaaatttaaacacttgaatgtcatcatggtatccaacttgtgactcatagggtctgaactcactccaaaagataataactgcagtctaatttttcccatggtacttgctagtgactgtatccagaaaagctttaagcagttaaa

SEQ ID NO: 178697 - DNA, 3681 bp, Homo sapiens
  Payload ID: 15213
  Gene Symbol: SRBD1
  Gene Name: S1 RNA binding domain 1
  Uniprot ID: Q8N5C6
  ENST ID: ENST00000263736
  CDS Start-End: 64-3051
gggaaccggaaggtgcggtggcactcacggaatctcgggtcttctgacgtgccgggcgggaagatgtcatcattgccaagaagagcgaaagtacaggtccaggatgtggtactgaaagatgaattttcttcattctctgagttatcatctgcctctgaagaagatgacaaggaagatagtgcctgggagccccaaaagaaagttcccagaagccgtaaacagccccctcccaaggaatccaaaccaaagaggatgcctcgggtgaagaagaatgccccacagatcagtgatggctcagaagtcgttgttgttaaggaggagctgaatagctctgtggctattgctgatactgctttagaagacagaaaaaataaattggatactgtacagactctgaaaacagccaagacaaaacagaaatgtgcagcgcagccacatacagttcgaaggactaaaaagctgaaagttgaagaagaaaccagcaaagccagcaacttagagggtgagagtaatagttcagagacaccatccacaagcactgtgtggggaggtacatgcaagaaggaagagaatgacgatgactttacatttggtcagtccgctttaaagaaaatcaagactgagacatatcctcaggggcagcctgtcaagtttccagcaaatgccaatagtactaaagaggaggtggaaatgaattgggacatggtacaggttttatctgagagaactaatattgaaccttgggtttgtgccaacatcattcgtctctttaatgatgataacacaattcccttcattatacgttatagaaaagagctcattaataaccttgatgctgattccttgagagaagttcagcaaaccctagaagagctacgggctgttgcaaagaaagttcatagtacaatccagaaaattaagaaggaagggaagatgtctgagtgcttgttaaaagccatgctgaattgtaaaacttttgaagaactagaacacgtgtctgctccatataaaactggaagcaaagggactaaagcccagagagcaagacagttgggcttagaaggagcagccagggcactgcttgagaaaccaggggagctcagtctgctatcgtacattaggcctgacgttaaagggctttcaacgcttcaggatattgaaataggagtgcagcatattttagcagatatgattgctaaagacaaagacacgcttgacttcattcggaacttgtgccagaagagacatgtttgtatccagtcatctctggcaaaagtatcctcaaaaaaggtaaatgagaaagatgttgataagtttctgctctaccagcatttttcctgcaacataagaaacattcaccatcatcagattctggcaattaaccgtggagaaaatttgaaggtactgacggttaaggtcaatatttctgatggagtgaaggatgaattctgtaggtggtgcatccaaaacaggtggagaccacgtagctttgcaaggccagagttaatgaagatcttatataattcactgaatgattcctttaaacgccttatttatcctcttctctgtagagaattcagagccaaactaacatcagatgcagagaaggaatcagtaatgatgtttggacggaaccttcgtcagctccttttaacaagccctgttccagggcgcaccttaatgggagtggatcctggttataaacatggttgcaaattagctataatttctcctactagtcagatacttcatactgatgtggtttacttgcattgtggacaaggcttccgagaggcggagaaaataaagacacttttgctgaatttcaactgcagcacagtagtgattggaaatggaactgcctgcagggaaacagaagcttactttgctgacctgataatgaagaattattttgcaccactggatgttgtttactgtatcgtcagtgaagcaggagcatcaatctacagtgtcagccctgaagctaacaaagagatgccagggctggaccctaatttgagaagtgcagtttccatagcaaggcgtgtacaagatccattagctgagctagtgaaaattgagccaaagcacattggagttggaatgtatcagcatgacgtatcccagactttactcaaggcaacactggacagtgttgtagaagaatgtgtcagctttgtgggagtggatattaacatctgttcagaagttttgttaaggcatattgcaggactcaatgccaacagggccaaaaatattattgaatggcgagagaaaaatggaccctttatcaaccgagaacagctgaagaaagtgaaagggctgggcccaaaatccttccaacagtgtgctggcttcatcagaatcaaccaggattatatccgaacgttttgcagtcagcaaactgaaacttcaggccaaattcaaggagttgctgtgacatcttcagcagacgttgaggtcacaaatgagaagcagggcaaaaagaagagcaaaactgcagtgaatgttttactgaagccaaatcctttggaccaaacttgtattcatccagaatcatatgacatagcaatgaggtttttgtcatccattggagggacactgtatgaggttggaaagcctgaaatgcaacaaaaaataaattcattccttgaaaaggaaggaatggagaaaattgcagaaagattgcaaacaacagtacacaccttacaggtcatcatagatggtctcagccagcctgaaagctttgactttcgaacagattttgataaacctgatttcaagagaagcatagtatgcctggaagatctgcagattgggacagttcttacaggcaaagttgagaatgccactctctttggaatttttgtggatataggagtggggaaatctgggctgattcccatacgaaatgtaacagaagcaaaactttcaaaaacaaagaagagaagaagccttggactgggccccggagaaagagtggaagtccaagtactcaacattgacatcccccgatctaggattactctggacctcattcgggtgttatgagtatcccacgaaggccagacgctgattttattttctcatttccacagattgacaaggataagtcagttgtttgtaaactctaggtagcagatgagaaataattcacttaatatcagaaatattttccaaacactttcctttattttttcttctgaataaatagaaaaccaacagtttgatttccttttcccttaaaggaaacaactaatacacattcttatatggctttatgtagtaatagttttctgactaaaattttgttttttattttttgtaatttatctttaactccttttgcattttgtataacagattgcttaacttctacttgccaacatctgccttgctggacttgtatgggattgtcttcttgatttgaattgtaccgtctttgttgacacagtagggctgggcagtgtttaatccttccattttatagatttttttttaatcaggccttttggacttcattcataattttgcaataatctcttttcccttgtcatgcaagccaaaaatataccagtaaaacagattctgacgtgtttgtagttatcaaatgaatggctcgaaacacttctcaaaaggatatacgtattgaccccaacaataaatgtttgtggctagtga

SEQ ID NO: 178698 - DNA, 594 bp, Homo sapiens
  Payload ID: 15214
  Gene Symbol: S100A1
  Gene Name: S100 calcium binding protein A1
  Uniprot ID: P23297
  ENST ID: ENST00000292169
  CDS Start-End: 114-398
ggactgttgaagacaggtctccacacacagctccagcagccacatttgcaaccttggccatctgtccagaacctgctcccacctcaggcccaggccaaccgtgcactgctgcaatgggctctgagctggagacggcgatggagaccctcatcaacgtgttccacgcccactcgggcaaagagggggacaagtacaagctgagcaagaaggagctgaaagagctgctgcagacggagctctctggcttcctggatgcccagaaggatgtggatgctgtggacaaggtgatgaaggagctagacgagaatggagacggggaggtggacttccaggagtatgtggtgcttgtggctgctctcacagtggcctgtaacaatttcttctgggagaacagttgagcagacagccacattgggcagcgcccttcctctccaccctcccagacctgcctcttccccctgcttccacctcaccccacttatccctctccataaccccacccttgcccaccccacccccacccccaccaagggcgcaagagtagcggtccaagcctgcaactcatctttcattaaaggcttctctctcaccagc

SEQ ID NO: 178699 - DNA, 522 bp, Homo sapiens
  Payload ID: 15214
  Gene Symbol: S100A1
  Gene Name: S100 calcium binding protein A1
  ENST ID: ENST00000368696
  CDS Start-End: 89-250
cacagctccagcagccacatttgcaaccttggccatctgtccagaacctgctcccacctcaggcccaggccaaccgtgcactgctgcaatgggctctgagctggagacggcgatggagaccctcatcaacgtgttccacgcccactcgggcaaagagggggacaagtacaagctgagcaagaaggagctgaaagagctgctgcagacggagctctctggcttcctggatgtgaaagagcttatgctgtaggcaacagaagccctcaagacctttgaggaggcctagaagagtcccataattcaatgcagttcctctcgctcatctttgcctcctgctcctcaaccacccccttgcctctgactcagtgctgtacccttccctatacacctccctcttcctctcctcccaccacaggcccagaaggatgtggatgctgtggacaaggtgatgaaggagctagacgagaatggagacggggaggtggacttccaggagtatgtggtgcttgtggctgctctcac

SEQ ID NO: 178700 - DNA, 784 bp, Homo sapiens
  Payload ID: 15214
  Gene Symbol: S100A1
  Gene Name: S100 calcium binding protein A1
  ENST ID: ENST00000368698
  CDS Start-End: 148-591
cctcagagaaccccaggctgaggccccacacacagagggggatccaggttgagacccccagagaagagtcctggattgaaatccctctgtgggttctcagactcccaagactaagtttctcactgagggtcctctcagtgaggccccatggaggagccacagactaagaccccctcagcagaattccccccttaccgggctcaaccagcacagccagccacagctccagcagccacatttgcaaccttggccatctgtccagaacctgctcccacctcaggcccaggccaaccgtgcactgctgcaatgggctctgagctggagacggcgatggagaccctcatcaacgtgttccacgcccactcgggcaaagagggggacaagtacaagctgagcaagaaggagctgaaagagctgctgcagacggagctctctggcttcctggatgcccagaaggatgtggatgctgtggacaaggtgatgaaggagctagacgagaatggagacggggaggtggacttccaggagtatgtggtgcttgtggctgctctcacagtggcctgtaacaatttcttctgggagaacagttgagcagacagccacattgggcagcgcccttcctctccaccctcccagacctgcctcttccccctgcttccacctcaccccacttatccctctccataaccccacccttgcccaccccacccccacccccaccaagggcgcaagagtagcggtccaagcctgcaactcatctttcattaaaggcttctctctcacc

SEQ ID NO: 178701 - DNA, 236 bp, Homo sapiens
  Payload ID: 15214
  Gene Symbol: S100A1
  Gene Name: S100 calcium binding protein A1
  ENST ID: ENST00000436839
  CDS Start-End: 133-236
agaacctgctcccacctcaggcccaggccaaccggagccctcaagtccctgccaaggccccctctgtctcccaggtgttgggaagggtcccagccctcccctgcctcgcctcctgtggggtgcactgctgcaatgggctctgagctggagacggcgatggagaccctcatcaacgtgttccacgcccactcgggcaaagagggggacaagtacaagctgagcaagaaggagctgaa

SEQ ID NO: 178702 - DNA, 616 bp, Homo sapiens
  Payload ID: 15215
  Gene Symbol: S100A10
  Gene Name: S100 calcium binding protein A10
  Uniprot ID: P60903
  ENST ID: ENST00000368809
  CDS Start-End: 78-371
actccctgaaggaaaaggagaactgtgccatctcagagggcattttccaagaggaagcttcaacggaccacaccaaaatgccatctcaaatggaacacgccatggaaaccatgatgtttacatttcacaaattcgctggggataaaggctacttaacaaaggaggacctgagagtactcatggaaaaggagttccctggatttttggaaaatcaaaaagaccctctggctgtggacaaaataatgaaggacctggaccagtgtagagatggcaaagtgggcttccagagcttcttttccctaattgcgggcctcaccattgcatgcaatgactattttgtagtacacatgaagcagaagggaaagaagtaggcagaaatgagcagttcgctcctccctgataagagttgtcccaaagggtcgcttaaggaatctgccccacagcttcccccatagaaggatttcatgagcagatcaggacacttagcaaatgtaaaaataaaatctaactctcatttgacaagcagagaaagaaaagttaaataccagataagcttttgatttttgtattgtttgcatccccttgccctcaataaataaagttcttttttagttcc

SEQ ID NO: 178703 - DNA, 1202 bp, Homo sapiens
  Payload ID: 15215
  Gene Symbol: S100A10
  Gene Name: S100 calcium binding protein A10
  Uniprot ID: P60903
  ENST ID: ENST00000368811
  CDS Start-End: 661-954
ccggtggggcgggaagcccggcttctggggaggtgccgcccctccactggcgcaggccgccgagacccccagacggacctcctagggctaatctgatagtgcctctgaggtcgataggactccacgtgccactccctgcagggtcatccagcaagtaattcctagacccgtaggtggccgcagagccggttacctctggttctgcgccagcgtgccccacccgcaggacggccgggttctttgatttgtacactttctaaaaccaaacccgagaggaagggcaggctcagggtggggatgccctgaaatattcgagagcaggaccgtttctactgaagagaagtttacaagaacgctctgtctggggcgggcgaggcctctgcgaggcgggtccgggagcgagggcagggcgtgggccgcgcgcccggggtcgggggagtcgggggcaggaagagggggaggagacagggctgggggagcgccctgccgagcgcccgccaggctcctcccgctcccgcgccgcctccctctacccacccgccgcacgtactaaggaaggcgcacagcccgccgcgctcgcctctccgccccgcgtccagctcgcccagctcgcccagcgtccgccgcgcctcggccaaggcttcaacggaccacaccaaaatgccatctcaaatggaacacgccatggaaaccatgatgtttacatttcacaaattcgctggggataaaggctacttaacaaaggaggacctgagagtactcatggaaaaggagttccctggatttttggaaaatcaaaaagaccctctggctgtggacaaaataatgaaggacctggaccagtgtagagatggcaaagtgggcttccagagcttcttttccctaattgcgggcctcaccattgcatgcaatgactattttgtagtacacatgaagcagaagggaaagaagtaggcagaaatgagcagttcgctcctccctgataagagttgtcccaaagggtcgcttaaggaatctgccccacagcttcccccatagaaggatttcatgagcagatcaggacacttagcaaatgtaaaaataaaatctaactctcatttgacaagcagagaaagaaaagttaaataccagataagcttttgatttttgtattgtttgcatccccttgccctcaataaataaagttcttttttagttccaaa

SEQ ID NO: 178704 - DNA, 594 bp, Homo sapiens
  Payload ID: 15216
  Gene Symbol: S100A11
  Gene Name: S100 calcium binding protein A11
  Uniprot ID: P31949
  ENST ID: ENST00000271638
  CDS Start-End: 121-438
gggcaaggctgggccgggaagggcgtgggttgaggagaggctccagacccgcacgccgcgcgcacagagctctcagcgccgctcccagccacagcctcccgcgcctcgctcagctccaacatggcaaaaatctccagccctacagagactgagcggtgcatcgagtccctgattgctgtcttccagaagtatgctggaaaggatggttataactacactctctccaagacagagttcctaagcttcatgaatacagaactagctgccttcacaaagaaccagaaggaccctggtgtccttgaccgcatgatgaagaaactggacaccaacagtgatggtcagctagatttctcagaatttcttaatctgattggtggcctagctatggcttgccatgactccttcctcaaggctgtcccttcccagaagcggacctgaggaccccttggccctggccttcaaacccaccccctttccttccagcctttctgtcatcatctccacagcccacccatcccctgagcacactaaccacctcatgcaggccccacctgccaatagtaataaagcaatgtcacttttttaaaacatgaa

SEQ ID NO: 178705 - DNA, 518 bp, Homo sapiens
  Payload ID: 15217
  Gene Symbol: S100A12
  Gene Name: S100 calcium binding protein A12
  Uniprot ID: P80511
  ENST ID: ENST00000368737
  CDS Start-End: 119-397
aagatgaagcctgaactgattataaaaccttccttggctcagtgcccttcaccactgctggctttttgctgtagctccacattcctgtgcattgaggggttaacattaggctgggaagatgacaaaacttgaagagcatctggagggaattgtcaatatcttccaccaatactcagttcggaaggggcattttgacaccctctctaagggtgagctgaagcagctgcttacaaaggagcttgcaaacaccatcaagaatatcaaagataaagctgtcattgatgaaatattccaaggcctggatgctaatcaagatgaacaggtcgactttcaagaattcatatccctggtagccattgcgctgaaggctgcccattaccacacccacaaagagtaggtagctctctgaaggctttttacccagcaatgtcctcaatgagggtcttttctttccctcaccaaaacccagccttgcccgtggggagtaagagttaataaacacactcacgaaaagttct

SEQ ID NO: 178706 - DNA, 514 bp, Homo sapiens
  Payload ID: 15218
  Gene Symbol: S100A13
  Gene Name: S100 calcium binding protein A13
  Uniprot ID: Q99584
  ENST ID: ENST00000339556
  CDS Start-End: 122-418
gatgtcttaccccaagctgggccttgcagtacctgtggctggctgtgctggttgagcccggtcagccctgacaaaggtcagctagccccttgaggacatcagctttggcctcagggtcctaatggcagcagaaccactgacagagctagaggagtccattgagaccgtggtcaccaccttcttcacctttgcaaggcaggagggccggaaggatagcctcagcgtcaacgagttcaaagagctggttacccagcagttgccccatctgctcaaggatgtgggctctcttgatgagaagatgaagagcttggatgtgaatcaggactcggagctcaagttcaatgagtactggagattgattggggagctggccaaggaaatcaggaagaagaaagacctgaagatcaggaagaagtaaagccgcctggctgagatggggtgggcagggcagagctgatcagggccgagcagaaccgcactcttcccaaataaagcttcctccttgaaacacaaa

SEQ ID NO: 178707 - DNA, 547 bp, Homo sapiens
  Payload ID: 15218
  Gene Symbol: S100A13
  Gene Name: S100 calcium binding protein A13
  Uniprot ID: Q99584
  ENST ID: ENST00000392622
  CDS Start-End: 160-456
gctgggaggagcggttagagtgtgtgtgggcggatgcgagtggccggagaccagggcccaacataaacaagctttggagacaaacaaccttatgacctgtcagccctgacaaaggtcagctagccccttgaggacatcagctttggcctcagggtcctaatggcagcagaaccactgacagagctagaggagtccattgagaccgtggtcaccaccttcttcacctttgcaaggcaggagggccggaaggatagcctcagcgtcaacgagttcaaagagctggttacccagcagttgccccatctgctcaaggatgtgggctctcttgatgagaagatgaagagcttggatgtgaatcaggactcggagctcaagttcaatgagtactggagattgattggggagctggccaaggaaatcaggaagaagaaagacctgaagatcaggaagaagtaaagccgcctggctgagatggggtgggcagggcagagctgatcagggccgagcagaaccgcactcttcccaaataaagcttcctccttgaaac

SEQ ID NO: 178708 - DNA, 579 bp, Homo sapiens
  Payload ID: 15218
  Gene Symbol: S100A13
  Gene Name: S100 calcium binding protein A13
  Uniprot ID: Q99584
  ENST ID: ENST00000392623
  CDS Start-End: 192-488
gtactaaacccgtcctggagcagggagtcagagacgccccgttccaggacccttgtcaccgggagacaggagcggggaggatctgtggggtcctgggttcagcactctgccctgctgccgctgaggagaggtcagccctgacaaaggtcagctagccccttgaggacatcagctttggcctcagggtcctaatggcagcagaaccactgacagagctagaggagtccattgagaccgtggtcaccaccttcttcacctttgcaaggcaggagggccggaaggatagcctcagcgtcaacgagttcaaagagctggttacccagcagttgccccatctgctcaaggatgtgggctctcttgatgagaagatgaagagcttggatgtgaatcaggactcggagctcaagttcaatgagtactggagattgattggggagctggccaaggaaatcaggaagaagaaagacctgaagatcaggaagaagtaaagccgcctggctgagatggggtgggcagggcagagctgatcagggccgagcagaaccgcactcttcccaaataaagcttcctccttgaaac

SEQ ID NO: 178709 - DNA, 686 bp, Homo sapiens
  Payload ID: 15218
  Gene Symbol: S100A13
  Gene Name: S100 calcium binding protein A13
  Uniprot ID: Q99584
  ENST ID: ENST00000440685
  CDS Start-End: 297-593
aggcagcagtggatggtgcaggggaaagaggtgggaaggaggtcctgggagggacactggatgtcttaccccaagctgggccttgcagtacctgtggctggctgtgctggttgagcccgaatcgaccacggaaatttgacacctccgggcttggaagcagctctctcctccttccccgctgcttataaacctcagccctgaggctccagctcactctaccccatctccttgccgggtcagccctgacaaaggtcagctagccccttgaggacatcagctttggcctcagggtcctaatggcagcagaaccactgacagagctagaggagtccattgagaccgtggtcaccaccttcttcacctttgcaaggcaggagggccggaaggatagcctcagcgtcaacgagttcaaagagctggttacccagcagttgccccatctgctcaaggatgtgggctctcttgatgagaagatgaagagcttggatgtgaatcaggactcggagctcaagttcaatgagtactggagattgattggggagctggccaaggaaatcaggaagaagaaagacctgaagatcaggaagaagtaaagccgcctggctgagatggggtgggcagggcagagctgatcagggccgagcagaaccgcactcttcccaaataaagcttcctccttgaaacac

SEQ ID NO: 178710 - DNA, 1058 bp, Homo sapiens
  Payload ID: 15219
  Gene Symbol: S100A14
  Gene Name: S100 calcium binding protein A14
  Uniprot ID: Q9HCY8
  ENST ID: ENST00000344616
  CDS Start-End: 117-431
gctggctcctcctgtcttgtctcagcggctgccaacagatcatgagccatcagctcctctggggccagctataggacaacagaactctcaccaaaggaccagacacagtgggcaccatgggacagtgtcggtcagccaacgcagaggatgctcaggaattcagtgatgtggagagggccattgagaccctcatcaagaactttcaccagtactccgtggagggtgggaaggagacgctgaccccttctgagctacgggacctggtcacccagcagctgccccatctcatgccgagcaactgtggcctggaagagaaaattgccaacctgggcagctgcaatgactctaaactggagttcaggagtttctgggagctgattggagaagcggccaagagtgtgaagctggagaggcctgtccgggggcactgagaactccctctggaattcttggggggtgttggggagagactgtgggcctggagataaaacttgtctcctctaccaccaccctgtaccctagcctgcacctgtcctcatctctgcaaagttcagcttccttccccaggtctctgtgcactctgtcttggatgctctggggagctcatgggtggaggagtctccaccagagggaggctcaggggactggttgggccagggatgaatatttgagggataaaaattgtgtaagagccaaagaattggtagtagggggagaacagagaggagctgggctatgggaaatgatttgaataatggagctgggaatatggctggatatctggtactaaaaaagggtctttaagaacctacttcctaatctcttccccaatccaaaccatagctgtctgtccagtgctctcttcctgcctccagctctgccccaggctcctcctagactctgtccctgggctagggcaggggaggagggagagcagggttgggggagaggctgaggagagtgtgacatgtggggagaggaccagctgggtgcttgggcattgacagaatgatggttgttttgtatcatttgattaataaaaaaaaatgaaaaaagtg

SEQ ID NO: 178711 - DNA, 1080 bp, Homo sapiens
  Payload ID: 15219
  Gene Symbol: S100A14
  Gene Name: S100 calcium binding protein A14
  Uniprot ID: Q9HCY8
  ENST ID: ENST00000368701
  CDS Start-End: 136-450
gaaacccaaggcttttcacccaaatatactgcctgctgtccagagggcacacttaggatcatgagccatcagctcctctggggccagctataggacaacagaactctcaccaaaggaccagacacagtgggcaccatgggacagtgtcggtcagccaacgcagaggatgctcaggaattcagtgatgtggagagggccattgagaccctcatcaagaactttcaccagtactccgtggagggtgggaaggagacgctgaccccttctgagctacgggacctggtcacccagcagctgccccatctcatgccgagcaactgtggcctggaagagaaaattgccaacctgggcagctgcaatgactctaaactggagttcaggagtttctgggagctgattggagaagcggccaagagtgtgaagctggagaggcctgtccgggggcactgagaactccctctggaattcttggggggtgttggggagagactgtgggcctggagataaaacttgtctcctctaccaccaccctgtaccctagcctgcacctgtcctcatctctgcaaagttcagcttccttccccaggtctctgtgcactctgtcttggatgctctggggagctcatgggtggaggagtctccaccagagggaggctcaggggactggttgggccagggatgaatatttgagggataaaaattgtgtaagagccaaagaattggtagtagggggagaacagagaggagctgggctatgggaaatgatttgaataatggagctgggaatatggctggatatctggtactaaaaaagggtctttaagaacctacttcctaatctcttccccaatccaaaccatagctgtctgtccagtgctctcttcctgcctccagctctgccccaggctcctcctagactctgtccctgggctagggcaggggaggagggagagcagggttgggggagaggctgaggagagtgtgacatgtggggagaggaccagctgggtgcttgggcattgacagaatgatggttgttttgtatcatttgattaataaaaaaaaatgaaaaaagtgaaa

SEQ ID NO: 178712 - DNA, 1218 bp, Homo sapiens
  Payload ID: 15219
  Gene Symbol: S100A14
  Gene Name: S100 calcium binding protein A14
  Uniprot ID: Q9HCY8
  ENST ID: ENST00000368702
  CDS Start-End: 274-588
ctctgggccgctgaggggagctgaagggaggtcaggcaaacactcactcaatctgcctccctccatcaggctgcccttctctggcttcctcctgatccaagttctctacattcatctctctgcctccaggactggtataagagctgagctcaggtgagctggctcctcctgtcttgtctcagcggctgccaacagatcatgagccatcagctcctctggggccagctataggacaacagaactctcaccaaaggaccagacacagtgggcaccatgggacagtgtcggtcagccaacgcagaggatgctcaggaattcagtgatgtggagagggccattgagaccctcatcaagaactttcaccagtactccgtggagggtgggaaggagacgctgaccccttctgagctacgggacctggtcacccagcagctgccccatctcatgccgagcaactgtggcctggaagagaaaattgccaacctgggcagctgcaatgactctaaactggagttcaggagtttctgggagctgattggagaagcggccaagagtgtgaagctggagaggcctgtccgggggcactgagaactccctctggaattcttggggggtgttggggagagactgtgggcctggagataaaacttgtctcctctaccaccaccctgtaccctagcctgcacctgtcctcatctctgcaaagttcagcttccttccccaggtctctgtgcactctgtcttggatgctctggggagctcatgggtggaggagtctccaccagagggaggctcaggggactggttgggccagggatgaatatttgagggataaaaattgtgtaagagccaaagaattggtagtagggggagaacagagaggagctgggctatgggaaatgatttgaataatggagctgggaatatggctggatatctggtactaaaaaagggtctttaagaacctacttcctaatctcttccccaatccaaaccatagctgtctgtccagtgctctcttcctgcctccagctctgccccaggctcctcctagactctgtccctgggctagggcaggggaggagggagagcagggttgggggagaggctgaggagagtgtgacatgtggggagaggaccagctgggtgcttgggcattgacagaatgatggttgttttgtatcatttgattaataaaaaaaaatgaaaaaagtgaaa

SEQ ID NO: 178713 - DNA, 1025 bp, Homo sapiens
  Payload ID: 15219
  Gene Symbol: S100A14
  Gene Name: S100 calcium binding protein A14
  Uniprot ID: Q9HCY8
  ENST ID: ENST00000476873
  CDS Start-End: 81-395
agatcatgagccatcagctcctctggggccagctataggacaacagaactctcaccaaaggaccagacacagtgggcaccatgggacagtgtcggtcagccaacgcagaggatgctcaggaattcagtgatgtggagagggccattgagaccctcatcaagaactttcaccagtactccgtggagggtgggaaggagacgctgaccccttctgagctacgggacctggtcacccagcagctgccccatctcatgccgagcaactgtggcctggaagagaaaattgccaacctgggcagctgcaatgactctaaactggagttcaggagtttctgggagctgattggagaagcggccaagagtgtgaagctggagaggcctgtccgggggcactgagaactccctctggaattcttggggggtgttggggagagactgtgggcctggagataaaacttgtctcctctaccaccaccctgtaccctagcctgcacctgtcctcatctctgcaaagttcagcttccttccccaggtctctgtgcactctgtcttggatgctctggggagctcatgggtggaggagtctccaccagagggaggctcaggggactggttgggccagggatgaatatttgagggataaaaattgtgtaagagccaaagaattggtagtagggggagaacagagaggagctgggctatgggaaatgatttgaataatggagctgggaatatggctggatatctggtactaaaaaagggtctttaagaacctacttcctaatctcttccccaatccaaaccatagctgtctgtccagtgctctcttcctgcctccagctctgccccaggctcctcctagactctgtccctgggctagggcaggggaggagggagagcagggttgggggagaggctgaggagagtgtgacatgtggggagaggaccagctgggtgcttgggcattgacagaatgatggttgttttgtatcatttgattaataaaaaaaaatgaaaaaagtgaaa

SEQ ID NO: 178714 - DNA, 946 bp, Homo sapiens
  Payload ID: 15220
  Gene Symbol: S100A16
  Gene Name: S100 calcium binding protein A16
  Uniprot ID: Q96FQ6
  ENST ID: ENST00000368703
  CDS Start-End: 76-387
ctctgttccccttttcctgccaccttcttctccagggaccagaaacaaggccccgccagcaggcgaagcagggagatgtcagactgctacacggagctggagaaggcagtcattgtcctggtggaaaacttctacaaatatgtgtctaagtacagcctggtcaagaacaagatcagcaagagcagcttccgcgagatgctccagaaagagctgaaccacatgctgtcggacacagggaaccggaaggctgcggataagctcatccagaacctggatgccaatcatgatgggcgcatcagcttcgatgagtactggaccttgataggcggcatcaccggccccatcgccaaactcatccatgagcaggagcagcagagcagcagctagagacccctttggccacaccttccaggcactggcctgatgccccgccctggtgctctccccaggctccctcctcagcctcctgcccacccagggccctttactctcttctccctccagaccttcctctgacccttgctgaactggggtccctttgtgagtgtctcagtctagaggtacctccctccctggggggtctcagctcctggagtcgcaggcccttggggcccctctgtgagatctcaatgctgtctggggaccctaagagttttctcacctgttcagtctcatctaaccttccaatgtctgatgttcctgccaaattcctgcctgattctgggtccgtcctgacctccaaaggtcagcttggtgcttgaggtctccctgctcttggtggcagtggtagcagcaacagcagcagcagcagcagcagcagcagcagagacctctccactttcccttagcccctctgctgggtagagaggcactttcagggacttccctccagctgcctcttcatctgggaatgagctaagcaaggctgagcctcctcctgttgctt

SEQ ID NO: 178715 - DNA, 1146 bp, Homo sapiens
  Payload ID: 15220
  Gene Symbol: S100A16
  Gene Name: S100 calcium binding protein A16
  Uniprot ID: Q96FQ6
  ENST ID: ENST00000368704
  CDS Start-End: 187-498
aatggccacaagtggccaacggaaagcaggtggcaggacaggaggctgtggtggggcctgaccgagcagcctttccttccaaatctgactgtggcttgctcaggcccctatggtggctgtgaccctgttttgtccatctcctttcaccaggacccgccgggccccgccagcaggcgaagcagggagatgtcagactgctacacggagctggagaaggcagtcattgtcctggtggaaaacttctacaaatatgtgtctaagtacagcctggtcaagaacaagatcagcaagagcagcttccgcgagatgctccagaaagagctgaaccacatgctgtcggacacagggaaccggaaggctgcggataagctcatccagaacctggatgccaatcatgatgggcgcatcagcttcgatgagtactggaccttgataggcggcatcaccggccccatcgccaaactcatccatgagcaggagcagcagagcagcagctagagacccctttggccacaccttccaggcactggcctgatgccccgccctggtgctctccccaggctccctcctcagcctcctgcccacccagggccctttactctcttctccctccagaccttcctctgacccttgctgaactggggtccctttgtgagtgtctcagtctagaggtacctccctccctggggggtctcagctcctggagtcgcaggcccttggggcccctctgtgagatctcaatgctgtctggggaccctaagagttttctcacctgttcagtctcatctaaccttccaatgtctgatgttcctgccaaattcctgcctgattctgggtccgtcctgacctccaaaggtcagcttggtgcttgaggtctccctgctcttggtggcagtggtagcagcaacagcagcagcagcagcagcagcagcagcagagacctctccactttcccttagcccctctgctgggtagagaggcactttcagggacttccctccagctgcctcttcatctgggaatgagctaagcaaggctgagcctcctcctgttgcttgaaataatgatgatataaaggctggatttggagtttgtatcccctggtccctctgggatgctcattaaaaccttcccactccttggaaa

SEQ ID NO: 178716 - DNA, 956 bp, Homo sapiens
  Payload ID: 15220
  Gene Symbol: S100A16
  Gene Name: S100 calcium binding protein A16
  Uniprot ID: Q96FQ6
  ENST ID: ENST00000368705
  CDS Start-End: 473-784
gagtaggaatggccacaagtggccaacggaaagcaggtggcaggacaggaggctgtggtggggcctgaccgagcagcctttccttccaaatctgactgtggcttgctcaggcccctatggtggctgtgaccctgttttgtccatctcctttcaccaggacccgccgggtgagggtgactggagcacattcctgggcttgggggtgggaagggagtctgatttgcctggggttgatgtgggggggttttgggcatgggccgtgactcacagagtagatccagatccgcctgctcccctcatatcctgttattcagaaggctgtatccgcttagaaagtgtcttttgtcctggggtgagagggtgacgcatgtgccctctggcagtctgctgctgtgtccagagtccgactccagctgggctgtaactgggcttggcccccgccttaggccccgccagcaggcgaagcagggagatgtcagactgctacacggagctggagaaggcagtcattgtcctggtggaaaacttctacaaatatgtgtctaagtacagcctggtcaagaacaagatcagcaagagcagcttccgcgagatgctccagaaagagctgaaccacatgctgtcggacacagggaaccggaaggctgcggataagctcatccagaacctggatgccaatcatgatgggcgcatcagcttcgatgagtactggaccttgataggcggcatcaccggccccatcgccaaactcatccatgagcaggagcagcagagcagcagctagagacccctttggccacaccttccaggcactggcctgatgccccgccctggtgctctccccaggctccctcctcagcctcctgcccacccagggccctttactctcttctccctccagaccttcctctgacccttgctgaactggggtccctttgtgagtgtctcagtctaga

SEQ ID NO: 178717 - DNA, 1118 bp, Homo sapiens
  Payload ID: 15220
  Gene Symbol: S100A16
  Gene Name: S100 calcium binding protein A16
  Uniprot ID: Q96FQ6
  ENST ID: ENST00000368706
  CDS Start-End: 159-470
ggagggagtgggacagattctgggagtgcagcggggaggagtcccggctgggctgagcgcagggagctgcttggcagtgccagagcccaggccccagagccctgctggagaggaggcagactgaggcagcaggccccgccagcaggcgaagcagggagatgtcagactgctacacggagctggagaaggcagtcattgtcctggtggaaaacttctacaaatatgtgtctaagtacagcctggtcaagaacaagatcagcaagagcagcttccgcgagatgctccagaaagagctgaaccacatgctgtcggacacagggaaccggaaggctgcggataagctcatccagaacctggatgccaatcatgatgggcgcatcagcttcgatgagtactggaccttgataggcggcatcaccggccccatcgccaaactcatccatgagcaggagcagcagagcagcagctagagacccctttggccacaccttccaggcactggcctgatgccccgccctggtgctctccccaggctccctcctcagcctcctgcccacccagggccctttactctcttctccctccagaccttcctctgacccttgctgaactggggtccctttgtgagtgtctcagtctagaggtacctccctccctggggggtctcagctcctggagtcgcaggcccttggggcccctctgtgagatctcaatgctgtctggggaccctaagagttttctcacctgttcagtctcatctaaccttccaatgtctgatgttcctgccaaattcctgcctgattctgggtccgtcctgacctccaaaggtcagcttggtgcttgaggtctccctgctcttggtggcagtggtagcagcaacagcagcagcagcagcagcagcagcagcagagacctctccactttcccttagcccctctgctgggtagagaggcactttcagggacttccctccagctgcctcttcatctgggaatgagctaagcaaggctgagcctcctcctgttgcttgaaataatgatgatataaaggctggatttggagtttgtatcccctggtccctctgggatgctcattaaaaccttcccactccttggaaa

SEQ ID NO: 178718 - DNA, 556 bp, Homo sapiens
  Payload ID: 15221
  Gene Symbol: S100A2
  Gene Name: S100 calcium binding protein A2
  ENST ID: ENST00000368707
  CDS Start-End: 51-338
gctctccttcctgggtctgtctctgccacctggtctgccacagatccatgatgtgcagttctctggagcaggcgctggctgtgctggtcactaccttccacaagtactcctgccaagagggcgacaagttcaagctgagtaagggggaaatgaaggaacttctgcacaaggagctgcccagctttgtggggcattccagagaaccatgtgctgtgagggccttccgagtccatctgtttaatcctgtcattggagacttgagaaaccagagcccagaagggaaaagtgattgtcccaagatcacacagcactggagaaagtggatgaggaggggctgaagaagctgatgggcagcctggatgagaacagtgaccagcaggtggacttccaggagtatgctgttttcctggcactcatcactgtcatgtgcaatgacttcttccagggctgcccagaccgaccctgaagcagaactcttgacttcctgccatggatctcttgggcccaggactgttgatgcctttgagttttgtattcaataaactttttttgtctg

SEQ ID NO: 178719 - DNA, 998 bp, Homo sapiens
  Payload ID: 15221
  Gene Symbol: S100A2
  Gene Name: S100 calcium binding protein A2
  Uniprot ID: P29034
  ENST ID: ENST00000368708
  CDS Start-End: 374-667
tggcaccagtctccaggccccagagcaggggttgcctcccctcaccccggtccaggatgcccagtccccacgacacctcccacttcccactgtggcctgggtgggctcaggggctgcccttgacctggcctagagccctcccccagctggtggtggagctggcactctctgggagggagggggctgggagggaatgagtgggaatggcaagaggccagggtttggtgggatcaggttgaggcaggtttggtttccttaaaatgccaagttgggggccagtggggcccacatataaatcctcaccctgggagcctggctgccttgctctccttcctgggtctgtctctgccacctggtctgccacagatccatgatgtgcagttctctggagcaggcgctggctgtgctggtcactaccttccacaagtactcctgccaagagggcgacaagttcaagctgagtaagggggaaatgaaggaacttctgcacaaggagctgcccagctttgtgggggagaaagtggatgaggaggggctgaagaagctgatgggcagcctggatgagaacagtgaccagcaggtggacttccaggagtatgctgttttcctggcactcatcactgtcatgtgcaatgacttcttccagggctgcccagaccgaccctgaagcagaactcttgacttcctgccatggatctcttgggcccaggactgttgatgcctttgagttttgtattcaataaactttttttgtctgttgataatattttaattgctcagtgatgttccataacccggctggctcagctggagtgctgggagatgagggcctcctggatcctgctcccttctgggctctgactctcctggaaatctctccaaggccagagctatgctttaggtctcaattttggaatttcaaacaccagcaaaaaattggaaatcgagataggttgctgacttttattttgtcaaataaagatattaaaaaaggcaaa

SEQ ID NO: 178720 - DNA, 457 bp, Homo sapiens
  Payload ID: 15221
  Gene Symbol: S100A2
  Gene Name: S100 calcium binding protein A2
  Uniprot ID: P29034
  ENST ID: ENST00000368709
  CDS Start-End: 68-361
ggaggagggtgtgccgctgagtcactgcctgggcatctgggcctggaacctcggccacagatccatgatgtgcagttctctggagcaggcgctggctgtgctggtcactaccttccacaagtactcctgccaagagggcgacaagttcaagctgagtaagggggaaatgaaggaacttctgcacaaggagctgcccagctttgtgggggagaaagtggatgaggaggggctgaagaagctgatgggcagcctggatgagaacagtgaccagcaggtggacttccaggagtatgctgttttcctggcactcatcactgtcatgtgcaatgacttcttccagggctgcccagaccgaccctgaagcagaactcttgacttcctgccatggatctcttgggcccaggactgttgatgcctttgagttttgtattcaataaactttttttgtctgttgata

SEQ ID NO: 178721 - DNA, 453 bp, Homo sapiens
  Payload ID: 15221
  Gene Symbol: S100A2
  Gene Name: S100 calcium binding protein A2
  Uniprot ID: P29034
  ENST ID: ENST00000368710
  CDS Start-End: 61-354
gtgagctcaccatgtgggggtgaggctgagagaaaacaagtacacagccacagatccatgatgtgcagttctctggagcaggcgctggctgtgctggtcactaccttccacaagtactcctgccaagagggcgacaagttcaagctgagtaagggggaaatgaaggaacttctgcacaaggagctgcccagctttgtgggggagaaagtggatgaggaggggctgaagaagctgatgggcagcctggatgagaacagtgaccagcaggtggacttccaggagtatgctgttttcctggcactcatcactgtcatgtgcaatgacttcttccagggctgcccagaccgaccctgaagcagaactcttgacttcctgccatggatctcttgggcccaggactgttgatgcctttgagttttgtattcaataaactttttttgtctgttgataata

SEQ ID NO: 178722 - DNA, 752 bp, Homo sapiens
  Payload ID: 15221
  Gene Symbol: S100A2
  Gene Name: S100 calcium binding protein A2
  Uniprot ID: P29034
  ENST ID: ENST00000487430
  CDS Start-End: 360-653
gcgcagatgccatcaaaatgggactctggtcaccctgtcatttcccttctggcagacactaaaatggggagccctgccctcaggggggtgtcccaagtgccatcagaggaggcttggtgactcccagacacaagggaagctttagcgtctgccctcagggtgagatggaggtatcgcctccggcctcagggaaccacagtctgagggggagatgcagcccctgccttcccattcagagaggggttttgtgaggtggcttgggggcatagggcagaagtggatcctacaggctgagctaaggccccaagagcctcagcagtgtacccatcacctggcacctctgcagccacagatccatgatgtgcagttctctggagcaggcgctggctgtgctggtcactaccttccacaagtactcctgccaagagggcgacaagttcaagctgagtaagggggaaatgaaggaacttctgcacaaggagctgcccagctttgtgggggagaaagtggatgaggaggggctgaagaagctgatgggcagcctggatgagaacagtgaccagcaggtggacttccaggagtatgctgttttcctggcactcatcactgtcatgtgcaatgacttcttccagggctgcccagaccgaccctgaagcagaactcttgacttcctgccatggatctcttgggcccaggactgttgatgcctttgagttttgtattcaataaactttttttgtctgttgataata

SEQ ID NO: 178723 - DNA, 697 bp, Homo sapiens
  Payload ID: 15221
  Gene Symbol: S100A2
  Gene Name: S100 calcium binding protein A2
  ENST ID: ENST00000497140
  CDS Start-End: 404-598
ctcccctcaccccggtccaggatgcccagtccccacgacacctcccacttcccactgtggcctgggtgggctcaggggctgcccttgacctggcctagagccctcccccagctggtggtggagctggcactctctgggagggagggggctgggagggaatgagtgggaatggcaagaggccagggtttggtgggatcaggttgaggcaggtttggtttccttaaaatgccaagttgggggccagtggggcccacatataaatcctcaccctgggagcctggctgccttgctctccttcctgggtctgtctctgccacctggtctggcgctggctgtgctggtcactaccttccacaagtactcctgccaagagggcgacaagttcaagctgagtaagggggaaatgaaggaacttctgcacaaggagctgcccagctttgtgggggagaaagtggatgaggaggggctgaagaagctgatgggcagcctggatgagaacagtgaccagcaggtggacttccaggagtatgctgttttcctggcactcatcactgtcatgtgcaatgacttcttccagggctgcccagaccgaccctgaagcagaactcttgacttcctgccatggatctcttgggcccaggactgttgatgcctttgagttttgtattcaataaactttttttgtctgttgataata

SEQ ID NO: 178724 - DNA, 579 bp, Homo sapiens
  Payload ID: 15222
  Gene Symbol: S100A3
  Gene Name: S100 calcium binding protein A3
  Uniprot ID: P33764
  ENST ID: ENST00000368712
  CDS Start-End: 105-410
aaatggctcaccaaggttgcacagctggcgacaggcagagaggatcccacaagtttttcttctgggtgcagcttcctcgagttcagggcaggaggcaggtgaggatggccaggcctctggagcaggcggtagctgccatcgtgtgcaccttccaggaatacgcagggcgctgtggggacaaatacaagctctgccaggcggagctcaaggagctgctgcagaaggagctggccacctggaccccgactgagtttcgggaatgtgactacaacaaattcatgagtgttctggacaccaacaaggactgcgaggtggactttgtggagtatgtgcgctcacttgcctgcctctgtctctactgccacgagtacttcaaggactgcccctcagagcccccctgctcccagtagcctctgctccagggggtgcgctggctgtcgggggctgggcatgtctcccacaccccctcctaccctctctcctgtacccctttcaatctggacttgcccaggtcttctgcgatcagttaacccattttacctaggaggcccagagatgtgagggctccttcctcaggat

SEQ ID NO: 178725 - DNA, 856 bp, Homo sapiens
  Payload ID: 15222
  Gene Symbol: S100A3
  Gene Name: S100 calcium binding protein A3
  Uniprot ID: P33764
  ENST ID: ENST00000368713
  CDS Start-End: 198-503
ggggaggtgagcaattccaggaagggcttcccctccaatagaacagagtatccctatacagaacctccctgctcaaaacccccaggggtcgggagggtaacctcaggggaggccagtctcagattggtaaacacccgaactggtcaactctcaagagaccatctggttcaggttcctgactgggccagcgagtgaggatggccaggcctctggagcaggcggtagctgccatcgtgtgcaccttccaggaatacgcagggcgctgtggggacaaatacaagctctgccaggcggagctcaaggagctgctgcagaaggagctggccacctggaccccgactgagtttcgggaatgtgactacaacaaattcatgagtgttctggacaccaacaaggactgcgaggtggactttgtggagtatgtgcgctcacttgcctgcctctgtctctactgccacgagtacttcaaggactgcccctcagagcccccctgctcccagtagcctctgctccagggggtgcgctggctgtcgggggctgggcatgtctcccacaccccctcctaccctctctcctgtacccctttcaatctggacttgcccaggtcttctgcgatcagttaacccattttacctaggaggcccagagatgtgagggctccttcctcaggatgcccagcgaatgaggggtagagccactctggggcccagcctgcctgccgcacccctgtggcctcccttgtggatgggaggaggcgggatctgctctgaggccctcgaggctcagcagagcgtgcaccaatgagaccacgatgggaaagggcctatttaactcctaataaaaaactggcatcagc

SEQ ID NO: 178726 - DNA, 566 bp, Homo sapiens
  Payload ID: 15223
  Gene Symbol: S100A4
  Gene Name: S100 calcium binding protein A4
  Uniprot ID: P26447
  ENST ID: ENST00000354332
  CDS Start-End: 115-420
ttcccctctctacaaccctctctcctcagcgcttcttctttcttggtttggtgcttctgagatgtgggcttgcacacgctgttgctatagtacgtgttgatcctgactgctgtcatggcgtgccctctggagaaggccctggatgtgatggtgtccaccttccacaagtactcgggcaaagagggtgacaagttcaagctcaacaagtcagaactaaaggagctgctgacccgggagctgcccagcttcttggggaaaaggacagatgaagctgctttccagaagctgatgagcaacttggacagcaacagggacaacgaggtggacttccaagagtactgtgtcttcctgtcctgcatcgccatgatgtgtaacgaattctttgaaggcttcccagataagcagcccaggaagaaatgaaaactcctctgatgtggttggggggtctgccagctggggccctccctgtcgccagtgggcacttttttttttccaccctggctccttcagacacgtgcttgatgctgagcaagttcaataaagattcttggaagttttgaggctga

SEQ ID NO: 178727 - DNA, 531 bp, Homo sapiens
  Payload ID: 15223
  Gene Symbol: S100A4
  Gene Name: S100 calcium binding protein A4
  Uniprot ID: P26447
  ENST ID: ENST00000368714
  CDS Start-End: 88-393
tcctttcttgggaggctacaaatagtgacgccctgtctctaagctcctacagctgaaacgccagcaccagtgatcctgactgctgtcatggcgtgccctctggagaaggccctggatgtgatggtgtccaccttccacaagtactcgggcaaagagggtgacaagttcaagctcaacaagtcagaactaaaggagctgctgacccgggagctgcccagcttcttggggaaaaggacagatgaagctgctttccagaagctgatgagcaacttggacagcaacagggacaacgaggtggacttccaagagtactgtgtcttcctgtcctgcatcgccatgatgtgtaacgaattctttgaaggcttcccagataagcagcccaggaagaaatgaaaactcctctgatgtggttggggggtctgccagctggggccctccctgtcgccagtgggcacttttttttttccaccctggctccttcagacacgtgcttgatgctgagcaagttcaataaagattcttggaagtttt

SEQ ID NO: 178728 - DNA, 573 bp, Homo sapiens
  Payload ID: 15223
  Gene Symbol: S100A4
  Gene Name: S100 calcium binding protein A4
  Uniprot ID: P26447
  ENST ID: ENST00000368715
  CDS Start-End: 122-427
ggccctgggagtttgctgcccgaatctccagagcttgcgcagcggatcttgcaaatgttcactgcccagagcatgtgttccccactgtgcacaccctcccagccagatcctgactgctgtcatggcgtgccctctggagaaggccctggatgtgatggtgtccaccttccacaagtactcgggcaaagagggtgacaagttcaagctcaacaagtcagaactaaaggagctgctgacccgggagctgcccagcttcttggggaaaaggacagatgaagctgctttccagaagctgatgagcaacttggacagcaacagggacaacgaggtggacttccaagagtactgtgtcttcctgtcctgcatcgccatgatgtgtaacgaattctttgaaggcttcccagataagcagcccaggaagaaatgaaaactcctctgatgtggttggggggtctgccagctggggccctccctgtcgccagtgggcacttttttttttccaccctggctccttcagacacgtgcttgatgctgagcaagttcaataaagattcttggaagttttgaggctga

SEQ ID NO: 178729 - DNA, 600 bp, Homo sapiens
  Payload ID: 15223
  Gene Symbol: S100A4
  Gene Name: S100 calcium binding protein A4
  Uniprot ID: P26447
  ENST ID: ENST00000368716
  CDS Start-End: 149-454
agtatccgctctcccctgtcccctgctatgggcagggcctggctggggtataaataggtcagacctctgggccgtccccattcttcccctctctacaaccctctctcctcagcgcttcttctttcttggtttgatcctgactgctgtcatggcgtgccctctggagaaggccctggatgtgatggtgtccaccttccacaagtactcgggcaaagagggtgacaagttcaagctcaacaagtcagaactaaaggagctgctgacccgggagctgcccagcttcttggggaaaaggacagatgaagctgctttccagaagctgatgagcaacttggacagcaacagggacaacgaggtggacttccaagagtactgtgtcttcctgtcctgcatcgccatgatgtgtaacgaattctttgaaggcttcccagataagcagcccaggaagaaatgaaaactcctctgatgtggttggggggtctgccagctggggccctccctgtcgccagtgggcacttttttttttccaccctggctccttcagacacgtgcttgatgctgagcaagttcaataaagattcttggaagttttgaggctga

SEQ ID NO: 178730 - DNA, 506 bp, Homo sapiens
  Payload ID: 15224
  Gene Symbol: S100A5
  Gene Name: S100 calcium binding protein A5
  Uniprot ID: P33763
  ENST ID: ENST00000368717
  CDS Start-End: 89-367
cagccccctctcagccctggactctctctttgccctgtccccgactttaataatgggacactcctcgatatcagagctgcacactgtgatggagactcctctggagaaggccctgaccactatggtgaccacgtttcacaaatattcggggagagagggtagcaaactgaccctgagtaggaaggaactcaaggagctgatcaagaaagagctgtgtcttggggagatgaaggagagcagcatcgatgacttgatgaagagcctggacaagaacagcgaccaggagatcgacttcaaggagtactcggtgttcctgaccatgctgtgcatggcctacaacgacttctttctagaggacaacaagtgaccagggctgccctccaccctcaccctccaccctttgctgctgacctcggctgctcctctcacagaccctctttggccccctgccctcctctccctcccagatggacccttccatgggaggaaataaagtttccatcgca

SEQ ID NO: 178731 - DNA, 710 bp, Homo sapiens
  Payload ID: 15224
  Gene Symbol: S100A5
  Gene Name: S100 calcium binding protein A5
  Uniprot ID: P33763
  ENST ID: ENST00000368718
  CDS Start-End: 283-561
tcccacacttctgaggttttctttccaggacagcctggtttcccttcttcggcttattgttccatcagatttcagattttgagttctgatttttggtcagaagagtaaagtttctgggattggggacgtgtgtgctatgggaactcagtgtgtccccagcccttgtttgtaaacaaggaagggacagagatcagggaaataaaggcagaaggcagtgagagggaggctatgcctgctgcttggattctctgggctcactcccacagtgagctgcacactgtgatggagactcctctggagaaggccctgaccactatggtgaccacgtttcacaaatattcggggagagagggtagcaaactgaccctgagtaggaaggaactcaaggagctgatcaagaaagagctgtgtcttggggagatgaaggagagcagcatcgatgacttgatgaagagcctggacaagaacagcgaccaggagatcgacttcaaggagtactcggtgttcctgaccatgctgtgcatggcctacaacgacttctttctagaggacaacaagtgaccagggctgccctccaccctcaccctccaccctttgctgctgacctcggctgctcctctcacagaccctctttggccccctgccctcctctccctcccagatggacccttccatgggaggaaataaagtttccatcgcaggtgctggga

SEQ ID NO: 178732 - DNA, 665 bp, Homo sapiens
  Payload ID: 15225
  Gene Symbol: S100A6
  Gene Name: S100 calcium binding protein A6
  Uniprot ID: P06703
  ENST ID: ENST00000368719
  CDS Start-End: 296-568
ctcgtcaccaggcgtgcagtgggcactgctgggctcccccatcccgtcctaacccggaacagccccgggcaggaggcgtggaaagtcgagggggtaaaccgcgaatgtgcgttgtgtaagccacggcgcagggtggggcgcgggcgggacttgggcgggcggggtgggcttggccgagctggcctccggggcaccgaccgctataaggccagtcggactgcgacacagcccatcccctcgaccgctcgcgtcgcatttggccgcctccctaccgctccaagcccagccctcagccatggcatgccccctggatcaggccattggcctcctcgtggccatcttccacaagtactccggcagggagggtgacaagcacaccctgagcaagaaggagctgaaggagctgatccagaaggagctcaccattggctcgaagctgcaggatgctgaaattgcaaggctgatggaagacttggaccggaacaaggaccaggaggtgaacttccaggagtatgtcaccttcctgggggccttggctttgatctacaatgaagccctcaagggctgaaaataaatagggaagatggagacaccctctgggggtcctctctgagtcaaatccagtggtgggtaattgtacaataaattttttttggtcaaattta

SEQ ID NO: 178733 - DNA, 673 bp, Homo sapiens
  Payload ID: 15225
  Gene Symbol: S100A6
  Gene Name: S100 calcium binding protein A6
  Uniprot ID: P06703
  ENST ID: ENST00000368720
  CDS Start-End: 304-576
gagctgcgcagatgaggggagactcgtcaccaggcgtgcagtgggcactgctgggctcccccatcccgtcctaacccggaacagccccgggcaggaggcgtggaaagtcgagggggtaaaccgcgaatgtgcgttgtgagccctgggtactttccagggccagctgccctcacgctgggggtccagccatcccctgcccagttcagccgctggatccagactggggccatctgtggcgctcccccgctggagggatagtcaggagcagcagtgctgtgccagctccaagcccagccctcagccatggcatgccccctggatcaggccattggcctcctcgtggccatcttccacaagtactccggcagggagggtgacaagcacaccctgagcaagaaggagctgaaggagctgatccagaaggagctcaccattggctcgaagctgcaggatgctgaaattgcaaggctgatggaagacttggaccggaacaaggaccaggaggtgaacttccaggagtatgtcaccttcctgggggccttggctttgatctacaatgaagccctcaagggctgaaaataaatagggaagatggagacaccctctgggggtcctctctgagtcaaatccagtggtgggtaattgtacaataaattttttttggtcaaattta

SEQ ID NO: 178734 - DNA, 479 bp, Homo sapiens
  Payload ID: 15225
  Gene Symbol: S100A6
  Gene Name: S100 calcium binding protein A6
  ENST ID: ENST00000462776
  CDS Start-End: 225-479
atcccctcgaccgctcgcgtcgcatttggccgcctccctaccggtgagttctctccaggagccctgggtactttccagggccagctgccctcacgctgggggtccagccatcccctgcccagttcagccgctggatccagactggggccatctgtggcgctcccccgctggagggatagtcaggagcagcagtgctgtgccagctccaagcccagccctcagccatggcatgccccctggatcaggccattggcctcctcgtggccatcttccacaagtactccggcagggagggtgacaagcacaccctgagcaagaaggagctgaaggagctgatccagaaggagctcaccattggctcgaagctgcaggatgctgaaattgcaaggctgatggaagacttggaccggaacaaggaccaggaggtgaacttccaggagtatgtcaccttcctgggggccttggctttgatctacaat

SEQ ID NO: 178735 - DNA, 673 bp, Homo sapiens
  Payload ID: 15225
  Gene Symbol: S100A6
  Gene Name: S100 calcium binding protein A6
  Uniprot ID: P06703
  ENST ID: ENST00000496817
  CDS Start-End: 304-576
ccaggcgtgcagtgggcactgctgggctcccccatcccgtcctaacccggaacagccccgggcaggaggcgtggaaagtcgagggggtaaaccgcgaatgtgcgttgtgtaagccacggcgcagggtggggcgcgggcgggacttgggcgggcggggtgggcttggccgagctggcctccggggcaccgaccgctataaggccagtcggactgcgacacagcccatcccctcgaccgctcgcgtcgcatttggccgcctccctaccggccctctgctgccagctccaagcccagccctcagccatggcatgccccctggatcaggccattggcctcctcgtggccatcttccacaagtactccggcagggagggtgacaagcacaccctgagcaagaaggagctgaaggagctgatccagaaggagctcaccattggctcgaagctgcaggatgctgaaattgcaaggctgatggaagacttggaccggaacaaggaccaggaggtgaacttccaggagtatgtcaccttcctgggggccttggctttgatctacaatgaagccctcaagggctgaaaataaatagggaagatggagacaccctctgggggtcctctctgagtcaaatccagtggtgggtaattgtacaataaattttttttggtcaaattta

SEQ ID NO: 178736 - DNA, 442 bp, Homo sapiens
  Payload ID: 15226
  Gene Symbol: S100A7
  Gene Name: S100 calcium binding protein A7
  Uniprot ID: P31151
  ENST ID: ENST00000368722
  CDS Start-End: 75-380
ggcttggggtgcaggccagcccagactgactactggctgaaagatctgctttgggaagctttttgaaagcaaagatgagcaacactcaagctgagaggtccataataggcatgatcgacatgtttcacaaatacaccagacgtgatgacaagattgagaagccaagcctgctgacgatgatgaaggagaacttccccaacttccttagtgcctgtgacaaaaagggcacaaattacctcgccgatgtctttgagaaaaaggacaagaatgaggataagaagattgatttttctgagtttctgtccttgctgggagacatagccacagactaccacaagcagagccatggagcagcgccctgttccgggggcagccagtgacccagccccaccaatgggcctccagagaccccaggaacaataaaatgtcttctcccaccaga

SEQ ID NO: 178737 - DNA, 479 bp, Homo sapiens
  Payload ID: 15226
  Gene Symbol: S100A7
  Gene Name: S100 calcium binding protein A7
  Uniprot ID: P31151
  ENST ID: ENST00000368723
  CDS Start-End: 112-417
tgggaagagccaggctgagccttataaaggactgctctttgtccaaacacacacatctcactcatccttctactcgtgacgcttcccagctctggctttttgaaagcaaagatgagcaacactcaagctgagaggtccataataggcatgatcgacatgtttcacaaatacaccagacgtgatgacaagattgagaagccaagcctgctgacgatgatgaaggagaacttccccaacttccttagtgcctgtgacaaaaagggcacaaattacctcgccgatgtctttgagaaaaaggacaagaatgaggataagaagattgatttttctgagtttctgtccttgctgggagacatagccacagactaccacaagcagagccatggagcagcgccctgttccgggggcagccagtgacccagccccaccaatgggcctccagagaccccaggaacaataaaatgtcttctcccaccaga

SEQ ID NO: 178738 - DNA, 491 bp, Homo sapiens
  Payload ID: 15227
  Gene Symbol: S100A7A
  Gene Name: S100 calcium binding protein A7A
  Uniprot ID: Q86SG5
  ENST ID: ENST00000329256
  CDS Start-End: 140-445
caagttccttctgctccatcttagggctgtttttactctgtcctcagccctccttctaacacccccacatagagaccttaattcaaactaaggtaagaaatgattgtctttatttcctgaaggctttttgaaagcaaagatgagcaacactcaagctgagaggtccataataggcatgatcgacatgtttcacaaatacaccggacgtgatggcaagattgagaagccaagcctgctgacgatgatgaaggagaacttccccaatttcctcagtgcctgtgacaaaaagggcatacattacctcgccactgtctttgagaaaaaggacaagaatgaggataagaagattgatttttctgagtttctgtccttgctgggagacatagccgcagactaccacaagcagagccatggagcggcgccctgttctgggggaagccagtgatccagccccaccaaggggcctccagagaccccaggaacaataagtg

SEQ ID NO: 178739 - DNA, 440 bp, Homo sapiens
  Payload ID: 15227
  Gene Symbol: S100A7A
  Gene Name: S100 calcium binding protein A7A
  Uniprot ID: Q86SG5
  ENST ID: ENST00000368728
  CDS Start-End: 74-379
gcttggggtgcagggcagcccaggctggctactggctggaagatctgctttggaaagctttttgaaagcaaagatgagcaacactcaagctgagaggtccataataggcatgatcgacatgtttcacaaatacaccggacgtgatggcaagattgagaagccaagcctgctgacgatgatgaaggagaacttccccaatttcctcagtgcctgtgacaaaaagggcatacattacctcgccactgtctttgagaaaaaggacaagaatgaggataagaagattgatttttctgagtttctgtccttgctgggagacatagccgcagactaccacaagcagagccatggagcggcgccctgttctgggggaagccagtgatccagccccaccaaggggcctccagagaccccaggaacaataagtgtctcctcccaccaga

SEQ ID NO: 178740 - DNA, 4279 bp, Homo sapiens
  Payload ID: 15227
  Gene Symbol: S100A7A
  Gene Name: S100 calcium binding protein A7A
  Uniprot ID: Q86SG5
  ENST ID: ENST00000368729
  CDS Start-End: 58-363
atctcactcatccttctactcgtgacacttcccagttctggctttttgaaagcaaagatgagcaacactcaagctgagaggtccataataggcatgatcgacatgtttcacaaatacaccggacgtgatggcaagattgagaagccaagcctgctgacgatgatgaaggagaacttccccaatttcctcagtgcctgtgacaaaaagggcatacattacctcgccactgtctttgagaaaaaggacaagaatgaggataagaagattgatttttctgagtttctgtccttgctgggagacatagccgcagactaccacaagcagagccatggagcggcgccctgttctgggggaagccagtgatccagccccaccaaggggcctccagagaccccaggaacaataagtgtctcctcccaccagacacttgccttatttcttcttctctttggtgacctacattgtcaaaactaccaattccaggttaactttgttggagaatttcccccacccccatccagtgggtcacccaggagtaatgtccctccagcaacgttccccctatggcctccagcagagctgatctgcctctcacacaggtcctggtgtctgcctctgcaccgttccctaaatgcagccaccttggcaggttccaggtggaagttggtagaaggcccctgccaggtcacagcaatgctctccttgtcaaggcatggaccagggtcattcagacacattcagatactgcactgagaaggagctggcatctctcagtgtgctcctgccctcccactcctgccccagctgttctccagggcttggggaaacagaaaccactcacatagggattcctggatggcttcaggttcagcgcccttggggctatgaatgggaggctcagcagtgccctgaggatgggcttccttgtcctgtggcctctgctccaggggcagtgtcctttccctgtgctgtgtgcttgtgtgcatgtgcctatgtgggtgaccctgtggaagtgagaaggagtcactgtgatgcttagctgtcctaaatgatggtttgctcaatgccaggactgggtttctggtgatgaatgaatattccagattttgaggagctctaagtggtccaggagtccaagtaagcagtctggctggaataaggcagcatcacggaaattctgtaaggactgacacagagagctcatgctgactgtgatgagaaattgcagcacctctatctcgcaggtaatggagtagtttgttattggtagtctactccaggccaggcagtgtgttatgggctgaggatgcagaaacaggcaggacacagtgctgtcctagcagtgcactggcgggtctctccatgcaggccacaacacagggtcagtgttcacctggtgtcacttccaggcaatgttctgtgcagccgctcttagtattcttccttgaggctcacatcatgtgtccctatcactcttactactctggtcagtctccagctaacctctcaatcaggcaaacattcttcttggaggaatcaggcaaacatctcaaaaattctctttccatcctaccagcagcagtgtgtaagatgggctatttgttctttggaatgactgctccactccacactcacacctctattcacagaccagcatctcctctccttatcaggaacattccttcctgaacatattctgcacctcgtcagccttcaggactgatctgccattttcacctctaaatccccatgtctgaccattagttttcttctctttccttctctccctttctcattctcattccacctgttcttggaactcacggagacctacagtccctgggctttcattttctcctcccagccccctgctgccttctctatgcagcctgccctccatcatccaccccagaattgctctctttcctctcttagctctgttgcccactttccttgggccataccttccctgcagatctccagcccagaaccatcttcccctgttgtcctcctctctcctccaccgggactgctggtcactgcttagaaccgtcatgccagggtcccaaaagtgtgggtgcctgacttcctctctgtgcagcactctctgaatccctcctattcaccttgctgctgttattccccgaatgcgcaacataccccccatcaatatatctcagtatttcatgtctcaataccaatcttttaaactactgcctctaccagaaatgtcttttaatacttcttctgtctcattaacattacatttcaaggctgagctttaatgtcagtgtctcttagacattcagagggtgaaccaccatcccttcaccccaaagaaatgatctctgcttcatttgtgcctccctcaccatgaccccactcttaccatagtggctacattacttcagattcccctaatgtctttccagccagacttggaatcatggagggaaaacattgttacctcggatctcctggttacccagcacatagtagtactggattccagctcataataagtactctatatcatttttcaatataaaatgtatttgtgcaaattctagtcaatactactttatgtaaacagcagtgtaaaatccaaaaacttccagtcctggaggcaggttgtgcagcttaggggaggaccccagaatctggaccccagagtctggaagcaggccagaaaggataaggcaaatgactgaacagttccctcaggactcacgtactgatctcccaaaagaagagagggtctccctggggtggggttgctggaccttcaatccatcgctacagtccagaaggcaattggccactcctaatgtgggcctgccctccctttatttttccagttcttatttcacctgataatattccgtccaattggcaatggcacataaaaattaggatggagtgtgtggacaaatacttcttcatcttcttgtctaggttttagaaatcaccttctcaagggagccttgtctaatgttcctgagactatttcacactctccatgcttatgtcaatgcaggactcatcacatctattcggatattctgtttacacacccatgtcatcccagagaggtgatcacagggcagggacacatgtgtggcatacagttcctagttaagatcccaaatcctgagatattgctgatttgctatggcaggtcgtcaagagaactgtgtcattccaaactcaccaaggtggcttatagaacagaagcagatggatatgaagaggagaggggaccagaccatctccgcaaccacagcccagagctccagtcaccagatagaaaattgatttgatttcatccaatattccttcgaaagagtgtcaaggaatagggtggggcaatgtgtcattctgcattggaaggaggacattttagagcaaggcctaagggcacaggtattagtgtcatattgatcagaattcaacctttgttctaacacatactagagcaagaatttacttgatttggaataattaatagctactggacattatattggtactaaagagaaagaatacttgacagctctatgcccacactcacattacagctgatgtgaaagagattctggaaatccaaatgttccccagaaattctgatatcaaaacattccaataacttttttttttcaggcgcagtctcactctgtcgcccgggctggagtgctgtgagctgtccgtggtgctgaattcactgtgacgtcactcctgtctctctttgctttcttctgactgacatttattcagccttctctacaggaatctcttatgttcccccacatgcaggtggtttttcagtaggctcctgaagagtgatctcaactttccaggaagaaaagagggcaaagggaacaatgtgaaaagaagcagaaaatcataaaagaccatgtgtttgataaacaaccagattgtttctggttccctgccactataaaaacaccatgagagcatactcatacatgttcccttataaatctgcgaggtagtttctttggtattcttgcccaggaaatgggttgattcatcacagattttatatatatacttttttttaactaagtgtgagataatatcttattgtttttgtaacttgcattttacaagagttctgaccagcaccagataagcttcagtgctctcctttctttggccttaatattattggattaaagaattactgcctctcactaggagcatcatttatttaccattattttcaatttcatattaaaactcaatttctagtagagtc

SEQ ID NO: 178741 - DNA, 339 bp, Homo sapiens
  Payload ID: 15228
  Gene Symbol: S100A7L2
  Gene Name: S100 calcium binding protein A7-like 2
  Uniprot ID: Q5SY68
  ENST ID: ENST00000368725
  CDS Start-End: 1-339
atgcttcccagctctggctttttgaaagcaaagatgaatatccctctaggtgagaaagtcatgttggacatagtcgcgatgtttcgccaatacagtggagatgatggtaggatggacatgccaggtctggtgaacttgatgaaggagaacttccccaacttcctcagtggctgtgaaaaaagcgacatggattacttgtccaatgcccttgagaaaaaagatgataataaggataagaaggttaattattctgagtttctttccttgctgggggatataaccatagaccaccacaagataatgcatggagtggcaccctgttccgggggaagccagtga

SEQ ID NO: 178742 - DNA, 495 bp, Homo sapiens
  Payload ID: 15229
  Gene Symbol: S100A8
  Gene Name: S100 calcium binding protein A8
  Uniprot ID: P05109
  ENST ID: ENST00000368732
  CDS Start-End: 143-424
gagcagccttcctgagagaggagagagaaagctcagggaggtctggagcaaagatactcctggaggtggggagtgaggcagggataaggaaggagagtatcctccagcaccttccagtgggtggggcaagtccgtgggcatcatgttgaccgagctggagaaagccttgaactctatcatcgacgtctaccacaagtactccctgataaaggggaatttccatgccgtctacagggatgacctgaagaaattgctagagaccgagtgtcctcagtatatcaggaaaaagggtgcagacgtctggttcaaagagttggatatcaacactgatggtgcagttaacttccaggagttcctcattctggtgataaagatgggcgtggcagcccacaaaaaaagccatgaagaaagccacaaagagtagctgagttactgggcccagaggctgggcccctggacatgtacctgcagaataataaagtcatcaatacctca

SEQ ID NO: 178743 - DNA, 523 bp, Homo sapiens
  Payload ID: 15229
  Gene Symbol: S100A8
  Gene Name: S100 calcium binding protein A8
  Uniprot ID: P05109
  ENST ID: ENST00000368733
  CDS Start-End: 171-452
gagaaaccagagactgtagcaactctggcagggagaagctgtctctgatggcctgaagctgtgggcagctggccaagcctaaccgctataaaaaggagctgcctctcagccctgcatgtctcttgtcagctgtctttcagaagacctggtggggcaagtccgtgggcatcatgttgaccgagctggagaaagccttgaactctatcatcgacgtctaccacaagtactccctgataaaggggaatttccatgccgtctacagggatgacctgaagaaattgctagagaccgagtgtcctcagtatatcaggaaaaagggtgcagacgtctggttcaaagagttggatatcaacactgatggtgcagttaacttccaggagttcctcattctggtgataaagatgggcgtggcagcccacaaaaaaagccatgaagaaagccacaaagagtagctgagttactgggcccagaggctgggcccctggacatgtacctgcagaataataaagtcatcaatacctca

SEQ ID NO: 178744 - DNA, 577 bp, Homo sapiens
  Payload ID: 15230
  Gene Symbol: S100A9
  Gene Name: S100 calcium binding protein A9
  Uniprot ID: P06702
  ENST ID: ENST00000368738
  CDS Start-End: 44-388
aaacactctgtgtggctcctcggctttgacagagtgcaagacgatgacttgcaaaatgtcgcagctggaacgcaacatagagaccatcatcaacaccttccaccaatactctgtgaagctggggcacccagacaccctgaaccagggggaattcaaagagctggtgcgaaaagatctgcaaaattttctcaagaaggagaataagaatgaaaaggtcatagaacacatcatggaggacctggacacaaatgcagacaagcagctgagcttcgaggagttcatcatgctgatggcgaggctaacctgggcctcccacgagaagatgcacgagggtgacgagggccctggccaccaccataagccaggcctcggggagggcaccccctaagaccacagtggccaagatcacagtggccacggccacggccacagtcatggtggccacggccacagccactaatcaggaggccaggccaccctgcctctacccaaccagggccccggggcctgttatgtcaaactgtcttggctgtggggctaggggctggggccaaataaagtctcttcctccaagtca

SEQ ID NO: 178745 - DNA, 877 bp, Homo sapiens
  Payload ID: 15231
  Gene Symbol: S100B
  Gene Name: S100 calcium binding protein B
  Uniprot ID: P04271
  ENST ID: ENST00000291700
  CDS Start-End: 198-476
cctggcagccctgccacccccgccttcggctcccattggctgccacggcctgcagtgggctgcaccagggttcatccatcctccctgggcagagggaataagaggctgcctctgcccaccagtcctgccgcccaggacccgcagcagagacgacgcctgcagcaaggagaccaggaaggggtgagacaaggaagaggatgtctgagctggagaaggccatggtggccctcatcgacgttttccaccaatattctggaagggagggagacaagcacaagctgaagaaatccgaactgaaggagctcatcaacaatgagctttcccatttcttagaggaaatcaaagagcaggaggttgtggacaaagtcatggaaacactggacaatgatggagacggcgaatgtgacttccaggaattcatggcctttgttgccatggttactactgcctgccacgagttctttgaacatgagtgagattagaaagcagccaaacctttcctgtaacagagacggtcatgcaagaaagcagacagcaagggcttgcagcctagtaggagctgagctttccagccgtgttgtagctaattaggaagcttgatttgctttgtgattgaaaaattgaaaacctctttccaaaggctgttttaacggcctgcatcattctttctgctatattaggcctgtgtgtaagctgactggccccagggactcttgttaacagtaacttaggagtcaggtctcagtgataaagcgtgcaccgtgcagcccgccatggccgtgtagaccctaacccggagggaaccctgactacagaaattaccccggggcacccttaaaacttccactacctttaaaaaacaaagccttatccagca

SEQ ID NO: 178746 - DNA, 971 bp, Homo sapiens
  Payload ID: 15231
  Gene Symbol: S100B
  Gene Name: S100 calcium binding protein B
  ENST ID: ENST00000367071
  CDS Start-End: 198-482
cctggcagccctgccacccccgccttcggctcccattggctgccacggcctgcagtgggctgcaccagggttcatccatcctccctgggcagagggaataagaggctgcctctgcccaccagtcctgccgcccaggacccgcagcagagacgacgcctgcagcaaggagaccaggaaggggtgagacaaggaagaggatgtctgagctggagaaggccatggtggccctcatcgacgttttccaccaatattctggaagggagggagacaagcacaagctgaagaaatccgaactgaaggagctcatcaacaatgagctttcccatttcttagagagatggagtctccctatgttgcccaggctggtctcaaacttcctgtgctcaagttatcctcctgccttagcttcccaaagtgctgggattacaggaaatcaaagagcaggaggttgtggacaaagtcatggaaacactggacaatgatggagacggcgaatgtgacttccaggaattcatggcctttgttgccatggttactactgcctgccacgagttctttgaacatgagtgagattagaaagcagccaaacctttcctgtaacagagacggtcatgcaagaaagcagacagcaagggcttgcagcctagtaggagctgagctttccagccgtgttgtagctaattaggaagcttgatttgctttgtgattgaaaaattgaaaacctctttccaaaggctgttttaacggcctgcatcattctttctgctatattaggcctgtgtgtaagctgactggccccagggactcttgttaacagtaacttaggagtcaggtctcagtgataaagcgtgcaccgtgcagcccgccatggccgtgtagaccctaacccggagggaaccctgactacagaaattaccccggggcacccttaaaacttccactacctttaaaaaacaaagccttatccagca

SEQ ID NO: 178747 - DNA, 839 bp, Homo sapiens
  Payload ID: 15231
  Gene Symbol: S100B
  Gene Name: S100 calcium binding protein B
  Uniprot ID: P04271
  ENST ID: ENST00000397648
  CDS Start-End: 479-757
ttgctcctagtcactgtctcactttcagattgattttaacagcttgcagttgatggtttgctcacctgcactctaccacctcatcttggagccttgcaggaacagagagggaccctgtggggattaattcaggggaaattaatccctgaattcccttgctgctctgcctctgtatttttgccagtttccctgttggcccaacccagccagaattcagagggcatgggaatatatccccgtggcccacacggacagagaaggcaggcccacagctgtctaagaggccggtggaaggattatgataaaagtgcaaattcccagaatgcccctccaggccatgcctgctgctctgagcttgaaaagagtgccaaggccattccatcccccttgtctgggttgaggtctgtattgataacatatgaaatgttttaggatgaggtatagatgagaaggcaactttcctttgcgagcccctaggatgtctgagctggagaaggccatggtggccctcatcgacgttttccaccaatattctggaagggagggagacaagcacaagctgaagaaatccgaactgaaggagctcatcaacaatgagctttcccatttcttagaggaaatcaaagagcaggaggttgtggacaaagtcatggaaacactggacaatgatggagacggcgaatgtgacttccaggaattcatggcctttgttgccatggttactactgcctgccacgagttctttgaacatgagtgagattagaaagcagccaaacctttcctgtaacagagacggtcatgcaagaaagcagacagcaagggcttgcagcctagtagga

SEQ ID NO: 178748 - DNA, 455 bp, Homo sapiens
  Payload ID: 15232
  Gene Symbol: S100G
  Gene Name: S100 calcium binding protein G
  Uniprot ID: P29377
  ENST ID: ENST00000380200
  CDS Start-End: 55-294
aaactcctctttgattcttctagctgtttcactattgggcaaccagacaccagaatgagtactaaaaagtctcctgaggaactgaagaggatttttgaaaaatatgcagccaaagaaggtgatccagaccagttgtcaaaggatgaactgaagctattgattcaggctgaattccccagtttactcaaaggtccaaacaccctagatgatctctttcaagaactggacaagaatggagatggagaagttagttttgaagaattccaagtattagtaaaaaagatatcccagtgaaggagaaaacaaaatagaaccctgagcactggaggaagagcgcctgtgctgtggtcttatcctatgtggaatcccccaaagtctctggtttaattctttgcaattataataacctggctgtgaggttcagttattattaataaagaaattattagacatac

SEQ ID NO: 178749 - DNA, 1279 bp, Homo sapiens
  Payload ID: 15233
  Gene Symbol: S100P
  Gene Name: S100 calcium binding protein P
  Uniprot ID: P25815
  ENST ID: ENST00000296370
  CDS Start-End: 865-1152
cacctagaaggaaggagagctgctcagagaggccccagggaatctgactcaacaggccctaccaggctctcctcttggtctgtgagcatccagccttacttttgtatccaatcatatttccatacttcgctgaactgtgtttatggatagtttccaccagatctttggatcttcatcttgaaggctgccgtgccacataagctatgatcaaatacatctgttatgctcttctcctattcatctgccttctgcccgttgattttcagcaaactcccagaggatgaaggggagttttctgtttggccccacaggggaggagcgagcgagattgacgtggaagctgggcctctgaaggacacagagtgctctaagaaagggacgatggggcagatccatgttcacaaacacgcccatgtgaattcactctcagatgtctcctcgtgtcagcacgctgggtgccagcacgctctgatattgacacaaagggccacggagtcaccactcactccacacacactcaccccgtgcccacttacccagggagggccaggaatgaggatgccactgtggctcagtgatggcgccgagacacaggtgaacactgtaaaatgtggatgcctggaggcagcccacaccctgggccttggctgggggaaaggttccagaaacgtcatcacaacgatgcatttcatcagaactgagcacatgaatggggaggggcaggacttcctgaatgtcccaaccccactgtcccaccctctgtgtcaatatgaggctgccttataaagcaccaagaggctgccagtgggacattttctcggccctgccagcccccaggaggaaggtgggtctgaatctagcaccatgacggaactagagacagccatgggcatgatcatagacgtcttttcccgatattcgggcagcgagggcagcacgcagaccctgaccaagggggagctcaaggtgctgatggagaaggagctaccaggcttcctgcagagtggaaaagacaaggatgccgtggataaattgctcaaggacctggacgccaatggagatgcccaggtggacttcagtgagttcatagtgttcgtggctgcaatcacgtctgcctgtcacaagtactttgagaaggcaggactcaaatgatgccctggagatgtcacagattcctggcagagccatggtcccaggcttcccaaaagtgtttgttggcaattattcccctaggctgagcctgctcatgtacctctgattaataaatgcttatgaaatg

SEQ ID NO: 178750 - DNA, 1468 bp, Homo sapiens
  Payload ID: 15234
  Gene Symbol: S100Z
  Gene Name: S100 calcium binding protein Z
  Uniprot ID: Q8WXG8
  ENST ID: ENST00000317593
  CDS Start-End: 233-532
cagaaattcagacaagagcattctccttatctcatctgcacaggaagcaggtctaagtgtaatttcacaagcccctgactctgtgtagacacccagctctccagaaaaatgctttgaagacaaaggatacagcatacagtcccgtgtctcggctgagtcatcgcattccttaatagtgtcttctccccgggtttggtggcctgcttctggagtggtcagttctgctgccgacatgcccacccagctcgagatggccatggacaccatgattagaatcttccaccgctattctggcaaggaaaggaagagattcaagctcagcaagggggaactgaaactgctcctgcagcgagagctcacggaattcctctcgtgccaaaaggaaacccagttggttgataagatagtgcaggacctggatgccaataaggacaacgaagtggattttaatgaattcgtggtcatggtggcagctctgacagttgcttgtaatgattactttgtagaacaattgaagaagaaaggaaaataaaggaagttcgtgaatgctaatcaagggctaaataaagtggaaagcagcatccttgaaaatcatcgctctcaggacggggtctgcctggaatagcactgaatgtgtttagtagtgcctttggcttgggggctttggagaaagctgcttgagcccttcccatgctcataaattaggtaaggagcagtgaggaagtgtctacagcaacctcagccaatgtgatgtgcctctacagctgtatgaagtagattctctgattttatcttgaaatccacaacttccacaaaaaagaaaaatcttttaccatttctcattaaaaaagtaatataagtttattgtagggggaaataatcaaatgtaatctcattacccagatataatcactgttaacttcttcattcgaattttccctaggtccatgtatctatatatctatggttcataaaaatgagattacaccaaaaaatatcttttgttatctatatagttccagcttaataaatatacaactgtattattatttttgtctgaatagtattttcattgatatatcacaatatatttactccaattccctattgcatatagattatttctaatttttctattaataatactaagggagcttttaagtcaatacatctgaatcttgaataaaattcttgttccttctctttggatgggtattcagactcttaattttacaaatgaagaaataaagtcccagaaggtaacagagatagaactaggcacgattttctattcttctttccttcctttctttgtgagagttaacgattatttaaaagtattcataattttctgataataaaagtaagacatggcattatgacactggatattcaaaaaccacgatgtccttttacttgaagattttaaaaggaaatgattacaataaatacccagagtcaacaatta

SEQ ID NO: 178751 - DNA, 1017 bp, Homo sapiens
  Payload ID: 15234
  Gene Symbol: S100Z
  Gene Name: S100 calcium binding protein Z
  Uniprot ID: Q8WXG8
  ENST ID: ENST00000513010
  CDS Start-End: 331-630
gagtctggaccacgcagactcagaacagcactactcacagcagggcctcttgctcgctctagctgctgggaggaaaacggcttgctaatctccacgcccagaaattcagacaagagcattctccttatctcatctgcacaggaagcaggtctaagtgtaatttcacaagcccctgactctgtgtagacacccagctctccagaaaaatgctttgaagacaaaggatacagcatacagtcccgtgtctcggctgagtcatcgcattccttaatagtgtcttctccccgggtttggtggcctgcttctggagtggtcagttctgctgccgacatgcccacccagctcgagatggccatggacaccatgattagaatcttccaccgctattctggcaaggaaaggaagagattcaagctcagcaagggggaactgaaactgctcctgcagcgagagctcacggaattcctctcgtgccaaaaggaaacccagttggttgataagatagtgcaggacctggatgccaataaggacaacgaagtggattttaatgaattcgtggtcatggtggcagctctgacagttgcttgtaatgattactttgtagaacaattgaagaagaaaggaaaataaaggtaagtaataagctcatctaaaggcagaaatatatccaaagttatgtacttaatgttcatttataccgttcagatctatagacccagtaatgtcatttatagctataatatccagtgcatatattaataattaattgctactattgaattatgtgccccttaaaatattgactttatgtagatattctaaatctcatatgccctacttgaaacttgcctgtattattaagaggctatatgcatctttttggtttgtcaaaacgagggcattacaaaaatttagctactttcaaatgagacttgaatttggcaaatttctaagatggacattcatatccttaaattgtattttgaacttcttaccctattaaaaaaaattaactgg

SEQ ID NO: 178752 - DNA, 671 bp, Homo sapiens
  Payload ID: 15234
  Gene Symbol: S100Z
  Gene Name: S100 calcium binding protein Z
  Uniprot ID: Q8WXG8
  ENST ID: ENST00000613039
  CDS Start-End: 60-359
aagtgtcttctccccgggtttggtggcctgcttctggagtggtcagttctgctgccgacatgcccacccagctcgagatggccatggacaccatgattagaatcttccaccgctattctggcaaggaaaggaagagattcaagctcagcaagggggaactgaaactgctcctgcagcgagagctcacggaattcctctcgtgccaaaaggaaacccagttggttgataagatagtgcaggacctggatgccaataaggacaacgaagtggattttaatgaattcgtggtcatggtggcagctctgacagttgcttgtaatgattactttgtagaacaattgaagaagaaaggaaaataaaggaagttcgtgaatgctaatcaagggctaaataaagtggaaagcagcatccttgaaaatcatcgctctcaggacggggtctgcctggaatagcactgaatgtgtttagtagtgcctttggcttgggggctttggagaaagctgcttgagcccttcccatgctcataaattaggtaaggagcagtgaggaagtgtctacagcaacctcagccaatgtgatgtgcctctacagctgtatgaagtagattctctgattttatcttgaaatccacaacttccacaaaaaagaaaaatcttttaccatttctcatt

SEQ ID NO: 178753 - DNA, 4322 bp, Homo sapiens
  Payload ID: 15235
  Gene Symbol: S100PBP
  Gene Name: S100P binding protein
  Uniprot ID: Q96BU1
  ENST ID: ENST00000373475
  CDS Start-End: 255-1481
actgctggtttgccctccccctggtgttggcccggctgactcggggtaggggaggtcggggagggggcgataaaatggcgcagggggcggagtgaggcgcagtcgttcgcccaggctttggcccggcttccggaggaaggtgggagtcaatcattttgacaagtctcctgaaaggaacagctagcaggaactgaaacctttttccatttggtctcgtggcaaaggcagagattgctccagcagctccacacaaaatgatgtgctcacgggtgccctctgaacagtcttctggtacctctctcttgcctaaagacggtgccccattttcttgggattccttggatgaggatggattggatgactccttgctggagctgtcagagggagaagaagatgatggtgatgtaaattacacagaggaagagattgatgcactgttgaaggaagatgacccatcatatgagcagtcttctggggaagatgatggtgggcatgttgagaagggagaaagagggagtcaaattctacttgatactccccgagagaaaaattcatcgtacagcctgggaccagtagctgagactcctgacctcttcaaactacctcagctaagtacatcaagtggtcatggaccagctcatactaaaccattaaacagacgctctgtactagaaaagaatcttataaaagtaactgttgcaccatttaatccaacagtttgtgatgctctgcttgataaggacgagactgattcgtccaaagatactgaaaaactctcttcccttggagaagagatgagagaagatggtcttagcccaaatgaaagcaaactttgtactgaatctgaagggatcagccccaataactctgcctggaatgggccccagctctcttcttcaaacaataactttcaacagactgtctctgataaaaatatgcctgacagtgagaaccctacgtctgtattctctcggatctcagaccattcagagactcctaatatggagttatcctgcagaaatggtggttcacacaagtcaagttgtgaaatgagatctctggttgtttccacctcatcaaacaaacaggatgttcttaacaaggattctgggaagatgaaaggccatgagagaagactaggcaaagtcattcctgttctacaaactaagaccaggactaatgttccgacgttttcacagtcaaatctagaacagcagaagcagctttatctcaggagtgtcattgctcatatagaagacccagaggacactaaccaaggtatctcgggggagctttgtgccttgatggatcaagttcatcatatgcagcactcaaaatggcagcatccttcggacctcaccacgcgaaactacgcccgccgacagaaacatctgcaaagatacagtctgactcagtgggttgacaggaacatgcgaagccaccatcggttccagcgtctcccagacttctcgtacagttaatttgtgtcatcccatcagcaatgaaggtccctatccagggtcctgcttggagcagcatttcatgttcttttgctgttttgtgctttgccgattttggattttatttttcacaaaatttttatttaaaaaactcgtcaccttttggaaatgcccattgccgacttgaatttttttgtatgaagtccctcctgattttgtgtgtgtgtgtctgtgtttaagcaagcgttcggttggtatagtttttttttgtttttttaatttaaattgaaggtagctgcctcctgaaagccagcattaagccagaacacccaggttcaagcaaaagacccacctctctgcagaggcaaagtctactttctggtacctcaaagaaatcattgttcaatcttccataaggaagagattctttaccaggctgtgagccagtgttagataacttgtgaatggatataagttacttttaacaacccctcttacttttttatttgaatcctctgaatacctgtcagtattttaaagttggcaatccaggacattataagtaggatggagcaggagaagaatcctattgaaaggacaaattaaaatagtaaatcctctcctctcccttctgtaggtactagctgccttgatttttttttgtgggtgggggggattttttcattccttattgaacttattttgcacaatagtgtttacaaatcttatacatcttactttgacagaagacttataataccttgtggtcttgagactggttgtctcctttgcctttcttcaaggattttcctttttctttttaccccccagtgaccactctgctctttaggattctagtggcagtattcttgtaacctgttagacgtggatatacctcttcaggatggcctccttgctgtctttattgaagagctgcccacccagagtcttgactctagggcaggctagtgctattgtggtgtcagttgatatttagtttcatttgctgaaccccaaatttgagtgttagttagggagcctccattctgtgggagagtgtggaaaggcactcttttttctccatattagttaacaagaggtgtctttaggccctggatgttaccatctcatttggtcaagcccctgatacctagtttcacatggatgctaacgtggatgtaatatagttgtgacagcctatgcacaaaagcattacctgatcttaaggtttggtattctaaccaaagttgacagactgtgcgtctgtcttaatggatgtcttaggagttggttattctctcttttttttttgagacggagtttcgctgttgttgcccaggctggagtgcaatggcgtatctccactcaccacaacctccgcctcctgggttcaagggattctcctgtcttagcctcctgagtagctgtgattacaggcatgcgccaccatgcctggctaatttcatattttttagtagagacaggatttctccatgttggtcaggctggtcttgaactcctgacctcaggtgatctgcccacctcggcctcctaaagtgctgggattacaggcatgagccactgcacctggccggttattctctctttacagatagctatagacatcattttaggaagtgttgcagtctggcatttgtgctattgttcattctctgtgaaggctgttcatagttgctatagcctgtgtttagttttgtgatttcatcaatcccatctttctgtgtgagtaatgcattctaaacatcctaccccactttagaaacggacgtggggaacgcttggtcatttaagccaacaataaatttaggtgaatgtccctaagtgtttactgtttttatccagtcaaggatttgcttttccttgaacatttgttttaaattctggggccaaaatgcaaaggagaagttctattcaaaggcagtagttgaaatctattattttagttagcctacttggcatttactacatcggtcacttctccaggctgccctaaattaggttgatggagtgagacatgccaaacatccacctttgggaccatagcatagttaaaattaaatgtagttggaatagctagcattgcagctacagtagggaactgtagtctagttccctacagaaaacccaaggagtgaagggacaggattttgcctaggcaaaaatctaagactcgtgccctcctggtacatggggttttaagactgaatgtgtaataggagcactgcctttgccaaatcaaatgagtgacaggttaactagaaaatgtgacaatcacatttcctcttagctcaaataattctgtttttccaaagctttagcagcttaattaaatctgttggactgggggaggagagagctgttctctagtggttaacatggtattctttaagaagaaaaaacaaagccaaagaaaactcattatctggcatgttcgccttaaagatggtactgggtagaatctggagttttcatctcttttcaaagctgcatatctcttatatttggtattggcctctaagtctaatattgcagttggaattcttgctgtattattttttaagcaagtgttaggtgcatttaactgctttcttcatccatgacgacattcccaccatgggggtcttgacaaagcagagtaaaaatatgctgtttacattgtttacttacaagtaaggagcctgaaataacctgtagtttcgaatgcaggccctgatttactggcgttgtcagtttcaattatgaaactgaagtttggtgcctcctctttatcatgttttttcccttgtagcagttgtgtttaatgtcattaaaaagaaataaaagttctttgtcagtgacata

SEQ ID NO: 178754 - DNA, 3320 bp, Homo sapiens
  Payload ID: 15235
  Gene Symbol: S100PBP
  Gene Name: S100P binding protein
  Uniprot ID: Q96BU1
  ENST ID: ENST00000373476
  CDS Start-End: 278-1504
gatgagacgggaaaaggtggagccagtgggcacggtgggcggtgcggagggcggggctgaggcgcctgagcggggcacaaccctcctagaggcgggacggtttcctgccaatcactgctggtttgccctccccctggtgttggcccggctgactcggggaaggtgggagtcaatcattttgacaagtctcctgaaaggaacagctagcaggaactgaaacctttttccatttggtctcgtggcaaaggcagagattgctccagcagctccacacaaaatgatgtgctcacgggtgccctctgaacagtcttctggtacctctctcttgcctaaagacggtgccccattttcttgggattccttggatgaggatggattggatgactccttgctggagctgtcagagggagaagaagatgatggtgatgtaaattacacagaggaagagattgatgcactgttgaaggaagatgacccatcatatgagcagtcttctggggaagatgatggtgggcatgttgagaagggagaaagagggagtcaaattctacttgatactccccgagagaaaaattcatcgtacagcctgggaccagtagctgagactcctgacctcttcaaactacctcagctaagtacatcaagtggtcatggaccagctcatactaaaccattaaacagacgctctgtactagaaaagaatcttataaaagtaactgttgcaccatttaatccaacagtttgtgatgctctgcttgataaggacgagactgattcgtccaaagatactgaaaaactctcttcccttggagaagagatgagagaagatggtcttagcccaaatgaaagcaaactttgtactgaatctgaagggatcagccccaataactctgcctggaatgggccccagctctcttcttcaaacaataactttcaacagactgtctctgataaaaatatgcctgacagtgagaaccctacgtctgtattctctcggatctcagaccattcagagactcctaatatggagttatcctgcagaaatggtggttcacacaagtcaagttgtgaaatgagatctctggttgtttccacctcatcaaacaaacaggatgttcttaacaaggattctgggaagatgaaaggccatgagagaagactaggcaaagtcattcctgttctacaaactaagaccaggactaatgttccgacgttttcacagtcaaatctagaacagcagaagcagctttatctcaggagtgtcattgctcatatagaagacccagaggacactaaccaaggtatctcgggggagctttgtgccttgatggatcaagttcatcatatgcagcactcaaaatggcagcatccttcggacctcaccacgcgaaactacgcccgccgacagaaacatctgcaaagatacagtctgactcagtgggttgacaggaacatgcgaagccaccatcggttccagcgtctcccagacttctcgtacagttaatttgtgtcatcccatcagcaatgaaggtccctatccagggtcctgcttggagcagcatttcatgttcttttgctgttttgtgctttgccgattttggattttatttttcacaaaatttttatttaaaaaactcgtcaccttttggaaatgcccattgccgacttgaatttttttgtatgaagtccctcctgattttgtgtgtgtgtgtctgtgtttaagcaagcgttcggttggtatagtttttttttgtttttttaatttaaattgaaggtagctgcctcctgaaagccagcattaagccagaacacccaggttcaagcaaaagacccacctctctgcagaggcaaagtctactttctggtacctcaaagaaatcattgttcaatcttccataaggaagagattctttaccaggctgtgagccagtgttagataacttgtgaatggatataagttacttttaacaacccctcttacttttttatttgaatcctctgaatacctgtcagtattttaaagttggcaatccaggacattataagtaggatggagcaggagaagaatcctattgaaaggacaaattaaaatagtaaatcctctcctctcccttctgtaggtactagctgccttgatttttttttgtgggtgggggggattttttcattccttattgaacttattttgcacaatagtgtttacaaatcttatacatcttactttgacagaagacttataataccttgtggtcttgagactggttgtctcctttgcctttcttcaaggattttcctttttctttttaccccccagtgaccactctgctctttaggattctagtggcagtattcttgtaacctgttagacgtggatatacctcttcaggatggcctccttgctgtctttattgaagagctgcccacccagagtcttgactctagggcaggctagtgctattgtggtgtcagttgatatttagtttcatttgctgaaccccaaatttgagtgttagttagggagcctccattctgtgggagagtgtggaaaggcactcttttttctccatattagttaacaagaggtgtctttaggccctggatgttaccatctcatttggtcaagcccctgatacctagtttcacatggatgctaacgtggatgtaatatagttgtgacagcctatgcacaaaagcattacctgatcttaaggtttggtattctaaccaaagttgacagactgtgcgtctgtcttaatggatgtcttaggagttggttattctctcttttttttttgagacggagtttcgctgttgttgcccaggctggagtgcaatggcgtatctccactcaccacaacctccgcctcctgggttcaagggattctcctgtcttagcctcctgagtagctgtgattacaggcatgcgccaccatgcctggctaatttcatattttttagtagagacaggatttctccatgttggtcaggctggtcttgaactcctgacctcaggtgatctgcccacctcggcctcctaaagtgctgggattacaggcatgagccactgcacctggccggttattctctctttacagatagctatagacatcattttaggaagtgttgcagtctggcatttgtgctattgttcattctctgtgaaggctgttcatagttgctatagcctgtgtttagttttgtgatttcatcaatcccatctttctgtgtgagtaatgcattctaaacatcctaccccactttagaaacggacgtggggaacgcttggtcatttaagccaacaataaatttaggtgaatgtc

SEQ ID NO: 178755 - DNA, 706 bp, Homo sapiens
  Payload ID: 15235
  Gene Symbol: S100PBP
  Gene Name: S100P binding protein
  ENST ID: ENST00000482212
  CDS Start-End: 268-706
gggagggacgagggggtcggcgttacccggcttggagggggatgggggcgcctgttgcttctccagggggttgcgcacgccgtccgccccttggagggattgggaggcccacgccctgctgcgagaagggcgcgttctagctcctgaggaaggtgggagtcaatcattttgacaagtctcctgaaaggaacagctagcaggaactgaaacctttttccatttggtctcgtggcaaaggcagagattgctccagcagctccacacaaaatgatgtgctcacgggtgccctctgaacagtcttctggtacctctctcttgcctaaagacggtgccccattttcttgggattccttggatgaggatggattggatgactccttgctggagctgtcagagggagaagaagatgatggtgatgtaaattacacagaggaagagattgatgcactgttgaaggaagatgacccatcatatgagcagtcttctggggaagatgatggtgggcatgttgagaagggagaaagagggagtcaaattctacttgatactccccgagagaaaaattcatcgtacagcctgggaccagtagctgagactcctgacctcttcaaactacctcagctaagtacatcaagtggtcatggaccagctcatactaaaccattaaacagacgctctgtactagaaaagaatcttataaaagtaa

SEQ ID NO: 178756 - DNA, 429 bp, Homo sapiens
  Payload ID: 15235
  Gene Symbol: S100PBP
  Gene Name: S100P binding protein
  ENST ID: ENST00000529027
  CDS Start-End: 306-429
tgctggtttgccctccccctggtgttggcccggctgactcggggtaggggaggtcggggagggggcgataaaatggcgcagggggcggagtgaggcgcagtcgttcgcccaggctttggcccggcttccggagtgtgccacatttatgttcacgatctcatttaattcttgccacaaccctatcaggaaggtgggagtcaatcattttgacaagtctcctgaaaggaacagctagcaggaactgaaacctttttccatttggtctcgtggcaaaggcagagattgctccagcagctccacacaaaatgatgtgctcacgggtgccctctgaacagtcttctggtacctctctcttgcctaaagacggtgccccattttcttgggattccttggatgaggatggattggatgactccttgctggagctgt

SEQ ID NO: 178757 - DNA, 573 bp, Homo sapiens
  Payload ID: 15235
  Gene Symbol: S100PBP
  Gene Name: S100P binding protein
  ENST ID: ENST00000526230
  CDS Start-End: 213-573
gcagtcgttcgcccaggctttggcccggcttccggaggaaggtgggagtcaatcattttgacaagtctcctgaaaggaacagctagcaggaactgaaacctttttccatttggtctcgtggcaaaggcagagattgctccagcagctccacacagtatggaagacagttatttaccttcttgtgttctcgaattttgttttatttcaaaaaaatgatgtgctcacgggtgccctctgaacagtcttctggtacctctctcttgcctaaagacggtgccccattttcttgggattccttggatgaggatggattggatgactccttgctggagctgtcagagggagaagaagatgatggtgatgtaaattacacagaggaagagattgatgcactgttgaaggaagatgacccatcatatgagcagtcttctggggaagatgatggtgggcatgttgagaagggagaaagagggagtcaaattctacttgatactccccgagagaaaaattcatcgtacagcctgggaccagtagctgagactcctgacctcttcaaactacctcagctaagta

SEQ ID NO: 178758 - DNA, 551 bp, Homo sapiens
  Payload ID: 15235
  Gene Symbol: S100PBP
  Gene Name: S100P binding protein
  ENST ID: ENST00000530552
  CDS Start-End: 536-551
cttagacattgcctagcaccccttttccatccctttcccattttgtaaatgaggaaacaagtctaaatggtcaagtggcatacccaagttattggagctggctagtgatacaaccaggactacaccccaggtctttggactcccatgccagtattcatcctactaaagtagatgatagtcttaagaaagtacaaattgttgggaggaacaaaactagtttgcttagttgcataatttttttttctttgaagatttctttggtgtgcttgactcagaaaatccaactttctggtattacaaaaaaaatcaagattaaaattaatacatcgagcaccttaaagcataatacagttgactttgtaattagcagagttgaaagtgatgagaagatcctctaattttctttttgcctgcaggaaggtgggagtcaatcattttgacaagtctcctgaaaggaacagctagcaggaactgaaacctttttccatttggtctcgtggcaaaggcagagattgctccagcagctccacacaaaatgatgtgctcacggg

SEQ ID NO: 178759 - DNA, 725 bp, Homo sapiens
  Payload ID: 15235
  Gene Symbol: S100PBP
  Gene Name: S100P binding protein
  ENST ID: ENST00000530710
  CDS Start-End: 336-725
ctctctttccctttaaagctcccagtatagcatcttccagtacttacttgaaccgtaatgggtcatttttaacgtctgatccccttcagacaagctctggcaggcccttgacgtatccccagcgactaagcaccacgtctggcacttaataggggggtggaatgggagtcctggattcaaagtttggctccaacacaagacaactggacgcaagaggaaggtgggagtcaatcattttgacaagtctcctgaaaggaacagctagcaggaactgaaacctttttccatttggtctcgtggcaaaggcagagattgctccagcagctccacacaaaatgatgtgctcacgggtgccctctgaacagtcttctggtacctctctcttgcctaaagacggtgccccattttcttgggattccttggatgaggatggattggatgactccttgctggagctgtcagagggagaagaagatgatggtgatgtaaattacacagaggaagagattgatgcactgttgaaggaagatgacccatcatatgagcagtcttctggggaagatgatggtgggcatgttgagaagggagaaagagggagtcaaattctacttgatactccccgagagaaaaattcatcgtacagcctgggaccagtagctgagactcctgacctcttcaaactacctcagctaagtacatcaagtggtcatggaccagctcatact

SEQ ID NO: 178760 - DNA, 551 bp, Homo sapiens
  Payload ID: 15235
  Gene Symbol: S100PBP
  Gene Name: S100P binding protein
  ENST ID: ENST00000531256
  CDS Start-End: 38-551
agtcgttcgcccaggctttggcccggcttccggagaaatgatgtgctcacgggtgccctctgaacagtcttctggtacctctctcttgcctaaagacggtgccccattttcttgggattccttggatgaggatggattggatgactccttgctggagctgtcagagggagaagaagatgatggtgatgtaaattacacagaggaagagattgatgcactgttgaaggaagatgacccatcatatgagcagtcttctggggaagatgatggtgggcatgttgagaagggagaaagagggagtcaaattctacttgatactccccgagagaaaaattcatcgtacagcctgggaccagtagctgagactcctgacctcttcaaactacctcagctaagtacatcaagtggtcatggaccagctcatactaaaccattaaacagacgctctgtactagaaaagaatcttataaaagtaactgttgcaccatttaatccaacagtttgtgatgctctgcttgataaggacgagactgattcgtccaaagatactg

SEQ ID NO: 178761 - DNA, 743 bp, Homo sapiens
  Payload ID: 15236
  Gene Symbol: SAA2-SAA4
  Gene Name: SAA2-SAA4 readthrough
  ENST ID: ENST00000524555
  CDS Start-End: 38-664
agggacccgcagctcagctacagcacagatcagcaccatgaagcttctcacgggcctggttttctgctccttggtcctgagtgtcagcagccgaagcttcttttcgttccttggcgaggcttttgatggggctcgggacatgtggagagcctactctgacatgagagaagccaattacatcggctcagacaaatacttccatgctcgggggaactatgatgctgccaaaaggggacctgggggtgcctgggctgcagaagtgatcagcacaatgaggcttttcacaggcattgttttctgctccttggtcatgggagtcaccagtgaaagctggcgttcgtttttcaaggaggctctccaaggggttggggacatgggcagagcctattgggacataatgatatccaatcaccaaaattcaaacagatatctctatgctcggggaaactatgatgctgcccaaagaggacctgggggtgtctgggctgctaaactcatcagccgttccagggtctatcttcagggattaatagactgctatttatttggaaacagcagcactgtattggaggactcgaagtccaacgagaaagctgaggaatggggccggagtggcaaagaccccgaccgcttcagacctgacggcctgcctaagaaatactgagcttcctgctcctctgctctcagggaaactgggctgtgagccacacacttctccccccagacagggacacagggtcact

SEQ ID NO: 178762 - DNA, 3723 bp, Homo sapiens
  Payload ID: 15237
  Gene Symbol: SACM1L
  Gene Name: SAC1 suppressor of actin mutations 1-like (yeast)
  Uniprot ID: Q9NTJ5
  ENST ID: ENST00000389061
  CDS Start-End: 205-1968
ggcatctctcgcgtgctcttgcttgcgcactaatttgtcctccaccgcctcccgttcaggccggctctcctgcggggcggggaaaggggtgggaagaggctgggagctgcggccgctgtgccagggtgaccggtagagttgtagccgaggtggcggcgcggggcggggcgggcggagagagaaggaaggaggtggttgtgcaggatggcgacggcggcctacgagcagctgaagctgcatatcacacctgaaaaattttatgtggaagcttgtgatgatggagcagatgacgtacttaccattgaccgtgtgtccacagaggttacccttgcagtcaagaaagatgttcctccttcagctgtcacaagaccaatatttggtatactgggcacaatccatctggtggcaggtaattatcttatagtcattaccaaaaagataaaagtaggtgaatttttcagtcatgtagtctggaaagcaacagattttgatgtcctttcttataagaagacaatgttgcacttaactgatattcagttacaagataataaaaccttcctagcgatgctaaaccatgtcttgaatgtggatggattttacttttcaacaacatatgatttgacccatactttgcagcggctatccaacactagtcctgaattccaagaaatgagtctcttggaaagggcagatcagcggtttgtatggaatggtcatcttctaagagaactttctgcacagccagaggttcatcggtttgcccttccagtgttacatggctttattaccatgcattcatgttctattaatggaaaatactttgattggattctcatctcgaggaggagctgtttcagagctggtgtgcgctattatgtaagaggaattgattcggaaggccatgcagctaactttgtagaaacagaacaaattgtgcactacaatgggagcaaagcttcgtttgtacagactcgaggatcaatacctgttttctggtcccaaagaccaaacctcaagtacaaaccactgccacagatcagcaaagtagcaaatcacatggacggtttccaaaggcattttgattcccaagtaattatttatggaaaacaagttataatcaatctgattaaccagaagggctcggagaagccacttgagcagacatttgcaacaatggtgtcttccttgggaagtggaatgatgagatacattgcctttgacttccataaggaatgtaaaaatatgagatgggatcgactaagtattttattggatcaggtagcagaaatgcaagatgaattaagttattttctagtggactctgctggccaggtggtggcaaaccaggaaggcgtgttccgaagcaattgcatggattgtctagatagaaccaatgtgatccagagtttgttagctcgtcgttcacttcaggcccaacttcagagactaggagttttgcatgtgggacaaaagcttgaagaacaagatgaatttgagaagatttacaaaaatgcctgggctgacaacgcaaatgcttgtgccaagcaatatgcgggaactggtgccttgaagactgactttaccagaactggaaagagaactcatttgggacttataatggatggctggaactcaatgatacgatattataagaacaacttttccgatggatttagacaagattccatagacttatttcttggaaactattcagtggatgaattagaatctcatagtcctttaagtgttccaagggactggaaattcctggctttgcctattatcatggttgttgccttttcaatgtgcattatctgtttgcttatggctggtgacacttggacagaaacactggcctatgtgctcttctggggagttgcaagcattggaacattttttatcattctttacaatggcaaagattttgtcgatgctcccagactggtccagaaagaaaagatagactgaatttgtatttgtggaaagcggcttggcttggaagattccattgtgcagaactggagtctttactgacccgctttccacatcagcccaaggtctttttaatgcctttatccaaaagcacatcttgtgctccatgcaggatgatgacagaattgatctgatgttactgccttgatggtctctttactattgggacagttagatttataatttgaagctattctgtaattaaaatataacctgaattcagcttgcagaatggaagctgaatctgttcattgtattctattgattgtcaatttaattagctgttgcagaataagtaatatattttaaaaacctagctcctttcattatttaaaacagcaaaattatttttgtagctcagtttcattattgtcattgtagaagcggtcactattagcaggcatacttttccacacatctttggacttttcttaaaagttcagtaataagctaactgtgtttataaaatgtaagtctcttacagacatcaagtagtttgatgagacagtctgtgacttcatgataggaaagaggaggatgaggtctggggttctttaaagtctctggtgggctgcctcatgactttaatcagcttgaactgccagtgcaccagcagtttaggtgtgatgagagaattcagatatactttatctttttaaaaaagtgtaaataaaatcaaagaatgtaaagtctatctcttacgctagaggtccaaagctgcctctgttttaaagattatcccaatgtggaagatgcccatgactggtcagctacttcctcctatacattttggtttctttgagggtcactcattgagacacgcaggcctctgagagggtcttgttctagatttcatattgcacttggagggtaacagctgctttttcacgcatggtactcttgatgtttttcactctgtcaaggattttgttggctatcaatgaatgtgtctaaaacttagtgcttccaggtagttatagtactccaaatcaaggaccaacttaaacgttaatttttgtgcaaaaacaaacctgaaaaatatgcttcggaaactgtgcatagttctaattgtaagtcagattgtatattcaaattgtaattaagagatttaaatattagaacggtatgtaaggtagtataattaccactattttaaataattcagttaaacactgctgcaatatttcagtgttgtgcttgaaaatatgtacagtttttttccaatattaataccttatgttgtccttaaatatttctaaaagcgcctttatttcagcattacctttttttcatcactatcttttataaaacattaatataagtcgttacttttagaaactaaaggaaataatagctggaaaaccctctgtagtttaaaatcagtcattaaactcacaatagggtaagtaaatatagccacctgttaacatgtaaataagcataatttgttccaaagatggaatattgaaacttagttcatgtctgctgtaaaatattatttaaatgctgctgggcatttcacttaaagaacttaatgtcaacagctacaacaaagaccaaatctgaactgctaatgtggctgctttgtagggaatggactaatatcagtgtgttagatcttaaggtatcagtatttcagaatcctgcgacgattttatttctaaattcatgtactgtatgtccataagtgaaaataaaatgtcatattcttttctattattggtatcattc

SEQ ID NO: 178763 - DNA, 4661 bp, Homo sapiens
  Payload ID: 15237
  Gene Symbol: SACM1L
  Gene Name: SAC1 suppressor of actin mutations 1-like (yeast)
  ENST ID: ENST00000455997
  CDS Start-End: 1480-2343
ccccaaaacgcgccccaccaatccgcagcggcttcgtcacggcgctcttcgtcgcactccaacccgccgcgtcggcggcatctctcgcgtgctcttgcttgcgcactaatttgtcctccaccgcctcccgttcaggccggctctcctgcggggcggggaaaggggtgggaagaggctgggagctgcggccgctgtgccagggtgaccggtagagttgtagccgaggtggcggcgcggggcggggcgggcggagagagaaggaaggaggtggttgtgcaggatggcgacggcggcctacgagcagctgaagctgtgagtcccacgggccagaggcctgaggcgcggcgggcggggcggcaggtgcgggccctggcctcggggagggcttctgagtcccggattgcagatagggtgtgggagctcctcgcatttaccggttttcctcagccggcgcggcctctcctaggcctcgcccgagtagccataggccgggaaccagcggctcgccggcctttctccaccgtgctcggccccagcgcccacggctgaagagagaagctgccgactggcccccaccgagccggggtcggcgttatgatgcggcccttcagggcacgcttgtccccactttctatgcagagctaccgactaaatttatctgtatgacttaacagagaaaaagagttttctcttacttaacggacctacagcagcaatttagagtctacgcacaaatcaacaaatctttgttttgcttacagcctatctgggtaccgaagcctgcctgccccctcttcagtgtgcagaaaaaatttaaagtacagtcagtagtcttaaggtcctgaaggagtttactttggtttaaattttaaacagctccagcctaaagcaggttcttaagtcagtgtcgacagccagaggctaatctcggtaattttggtactgcaaattgacttttcggtaaatccaagttcttgagtctttgatacagaggctgtggttgttaagagttataaaataggtgtttttaagggttttggtttgtcttggattaaaaacaacatgtgtttatttcccttagtgttacccattagcatccacacttttcttgtctgtgaataattttgttgtactcacttcgtgtttaatgctttacccctaggctgtttgaaaatctggtggccacagcctgggaatatctggcatatcacacctgaaaaattttatgtggaagcttgtgatgatggagcagatgacgtacttaccattgaccgtgtgtccacagaggttacccttgcagtcaagaaagatgttcctccttcagctgtcacaagaccaatatttggtatactgggcacaatccatctggtggcaggtaattatcttatagtcattaccaaaaagataaaagtaggtgaatttttcagtcatgtagtctggaaagcaacagattttgatgtcctttcttataagaagacaatgttgcacttaactgatattcagttacaagataataaaaccttcctagcgatgctaaaccatgtcttgaatgtggatggattttacttttcaacaacatatgatttgacccatactttgcagcggctatccaacactagtcctgaattccaagaaatgagtctcttggaaagggcagatcagcggtttgtatggaatggtcatcttctaagagaactttctgcacagccagaggttcatcggtttgcccttccagtgttacatggctttattaccatgcattcatgttctattaatggaaaatactttgattggattctcatctcgaggaggagctgtttcagagctggtgtgcgctattatgtaagaggaattgattcggaaggccatgcagctaactttgtagaaacagaacaaattgtgcactacaatgggagcaaagcttcgtttgtacagactcgaggatcaatacctgttttctggtcccaaagaccaaacctcaagtacaaaccactgccacagatcagcaaagtagcaaatcacatggacggtttccaaaggcattttgattcccaagtaattatttatggaaaacaagttataatcaatctgattaaccagaagggctcggagaagccacttgagcagacatttgcaacaatggtgtcttccttgggaagtggaatgatgagatacattgcctttgacttccataaggaatgtaaaaatatgagatgggatcgactaagtattttattggatcaggtagcagaaatgcaagatgaattaagtggactctgctggccaggtggtggcaaaccaggaaggcgtgttccgaagcaattgcatggattgtctagatagaaccaatgtgatccagagtttgttagctcgtcgttcacttcaggcccaacttcagagactaggagttttgcatgtgggacaaaagcttgaagaacaagatgaatttgagaagatttacaaaaatgcctgggctgacaacgcaaatgcttgtgccaagcaatatgcgggaactggtgccttgaagactgactttaccagaactggaaagagaactcatttgggacttataatggatggctggaactcaatgatacgatattataagaacaacttttccgatggatttagacaagattccatagacttatttcttggaaactattcagtggatgaattagaatctcatagtcctttaagtgttccaagggactggaaattcctggctttgcctattatcatggttgttgccttttcaatgtgcattatctgtttgcttatggctggtgacacttggacagaaacactggcctatgtgctcttctggggagttgcaagcattggaacattttttatcattctttacaatggcaaagattttgtcgatgctcccagactggtccagaaagaaaagatagactgaatttgtatttgtggaaagcggcttggcttggaagattccattgtgcagaactggagtctttactgacccgctttccacatcagcccaaggtctttttaatgcctttatccaaaagcacatcttgtgctccatgcaggatgatgacagaattgatctgatgttactgccttgatggtctctttactattgggacagttagatttataatttgaagctattctgtaattaaaatataacctgaattcagcttgcagaatggaagctgaatctgttcattgtattctattgattgtcaatttaattagctgttgcagaataagtaatatattttaaaaacctagctcctttcattatttaaaacagcaaaattatttttgtagctcagtttcattattgtcattgtagaagcggtcactattagcaggcatacttttccacacatctttggacttttcttaaaagttcagtaataagctaactgtgtttataaaatgtaagtctcttacagacatcaagtagtttgatgagacagtctgtgacttcatgataggaaagaggaggatgaggtctggggttctttaaagtctctggtgggctgcctcatgactttaatcagcttgaactgccagtgcaccagcagtttaggtgtgatgagagaattcagatatactttatctttttaaaaaagtgtaaataaaatcaaagaatgtaaagtctatctcttacgctagaggtccaaagctgcctctgttttaaagattatcccaatgtggaagatgcccatgactggtcagctacttcctcctatacattttggtttctttgagggtcactcattgagacacgcaggcctctgagagggtcttgttctagatttcatattgcacttggagggtaacagctgctttttcacgcatggtactcttgatgtttttcactctgtcaaggattttgttggctatcaatgaatgtgtctaaaacttagtgcttccaggtagttatagtactccaaatcaaggaccaacttaaacgttaatttttgtgcaaaaacaaacctgaaaaatatgcttcggaaactgtgcatagttctaattgtaagtcagattgtatattcaaattgtaattaagagatttaaatattagaacggtatgtaaggtagtataattaccactattttaaataattcagttaaacactgctgcaatatttcagtgttgtgcttgaaaatatgtacagtttttttccaatattaataccttatgttgtccttaaatatttctaaaagcgcctttatttcagcattacctttttttcatcactatcttttataaaacattaatataagtcgttacttttagaaactaaaggaaataatagctggaaaaccctctgtagtttaaaatcagtcattaaactcacaatagggtaagtaaatatagccacctgttaacatgtaaataagcataatttgttccaaagatggaatattgaaacttagttcatgtctgctgtaaaatattatttaaatgctgctgggcatttcacttaaagaacttaatgtcaacagctacaacaaagaccaaatctgaactgctaatgtggctgctttgtagggaatggactaatatcagtgtgttagatcttaaggtatcagtatttcagaatcctgcgacgattttatttctaaattcatgtactgtatgtccataagtgaaaataaaatgtcatattcttttc

SEQ ID NO: 178764 - DNA, 2164 bp, Homo sapiens
  Payload ID: 15237
  Gene Symbol: SACM1L
  Gene Name: SAC1 suppressor of actin mutations 1-like (yeast)
  ENST ID: ENST00000418611
  CDS Start-End: 575-2029
actccaacccgccgcgtcggcggcatctctcgcgtgctcttgcttgcgcactaatttgtcctccaccgcctcccgttcaggccggctctcctgcggggcggggaaaggggtgggaagaggctgggagctgcggccgctgtgccagggtgaccggtagagttgtagccgaggtggcggcgcggggcggggcgggcggagagagaaggaaggaggtggttgtgcaggatggcgacggcggcctacgagcagctgaagctgctgtttgaaaatctggtggccacagcctgggaatatctggcatatcacacctgaaaaattttatgtggaagcttgtgatgatggagcagatgacgtacttaccattgaccgtgtgtccacagaggttacccttgcagtcaagaaagatgttcctccttcagctgtcacaagaccaatatttggtatactgggcacaatccatctggtggcaggtaattatcttatagtcattaccaaaaagataaaagtaggtgaatttttcagtcatgtagtctggaaagcaacagattttgatgtcctttcttataagaagacaatgttgcacttaactgatattcagttacaagataataaaaccttcctagcgatgctaaaccatgtcttgaatgtggatggattttacttttcaacaacatatgatttgacccatactttgcagcggctatccaacactagtcctgaattccaagaaatgagtctcttggaaagggcagatcagcggtttgtatggaatggtcatcttctaagagaactttctgcacagccagaggttcatcggtttgcccttccagtgttacatggctttattaccatgcattcatgttctattaatggaaaatactttgattggattctcatctcgaggaggagctgtttcagagctggtgtgcgctattatgtaagaggaattgattcggaaggccatgcagctaactttgtagaaacagaacaaattgtgcactacaatgggagcaaagcttcgtttgtacagactcgaggatcaatacctgttttctggtcccaaagaccaaacctcaagtacaaaccactgccacagatcagcaaagtagcaaatcacatggacggtttccaaaggcattttgattcccaagtaattatttatggaaaacaagttataatcaatctgattaaccagaagggctcggagaagccacttgagcagacatttgcaacaatggtgtcttccttgggaagtggaatgatgagatacattgcctttgacttccataaggaatgtaaaaatatgagatgggatcgactaagtattttattggatcaggtagcagaaatgcaagatgaattaagttattttctagtggactctgctggccaggtggtggcaaaccaggaaggcgtgttccgaagcaattgcatggattgtctagatagaaccaatgtgatccagagtttgttagctcgtcgttcacttcaggcccaacttcagagactaggagttttgcatgtgggacaaaagcttgaagaacaagatgaatttgagaagatttacaaaaatgcctgggctgacaacgcaaatgcttgtgccaagcaatatgcgggaactggtgccttgaagactgactttaccagaactggaaagagaactcatttgggacttataatggatggctggaactcaatgatacgatattataagaacaacttttccgatggatttagacaagattccatagacttatttcttggaaactattcagtggatgaattagaatctcatagtcctttaagtgttccaagggactggaaattcctggctttgcctattatcatggttgttgccttttcaatgtgcattatctgtttgcttatggctggtgacacttggacagaaacactggcctatgtgctcttctggggagttgcaagcattggaacattttttatcattctttacaatggcaaagattttgtcgatgctcccagactggtccagaaagaaaagatagactgaatttgtatttgtggaaagcggcttggcttggaagattccattgtgcagaactggagtctttactgacccgctttccacatcagcccaaggtctttttaatgcctttatccaaaagcacatcttgtgctccatgca

SEQ ID NO: 178765 - DNA, 2013 bp, Homo sapiens
  Payload ID: 15237
  Gene Symbol: SACM1L
  Gene Name: SAC1 suppressor of actin mutations 1-like (yeast)
  ENST ID: ENST00000441228
  CDS Start-End: 112-327
aagaggctgggagctgcggccgctgtgccagggtgaccggtagagttgtagccgaggtggcggcgcggggcggggcgggcggagagagaaggaaggaggtggttgtgcaggatggcgacggcggcctacgagcagctgaagctgcatatcacacctgaaaaattttatgtggaagcttgtgatgatggagcagatgacgtacttaccattgaccgtgtgtccacagaggttacccttgcagtcaagaaagatgttcctccttcagctgtcacaagaccaatatttggtatactgggcacaatccatctggtggcagttacaagataataaaaccttcctagcgatgctaaaccatgtcttgaatgtggatggattttacttttcaacaacatatgatttgacccatactttgcagcggctatccaacactagtcctgaattccaagaaatgagtctcttggaaagggcagatcagcggtttgtatggaatggtcatcttctaagagaactttctgcacagccagaggttcatcggtttgcccttccagtgttacatggctttattaccatgcattcatgttctattaatggaaaatactttgattggattctcatctcgaggaggagctgtttcagagctggtgtgcgctattatgtaagaggaattgattcggaaggccatgcagctaactttgtagaaacagaacaaattgtgcactacaatgggagcaaagcttcgtttgtacagactcgaggatcaatacctgttttctggtcccaaagaccaaacctcaagtacaaaccactgccacagatcagcaaagtagcaaatcacatggacggtttccaaaggcattttgattcccaagtaattatttatggaaaacaagttataatcaatctgattaaccagaagggctcggagaagccacttgagcagacatttgcaacaatggtgtcttccttgggaagtggaatgatgagatacattgcctttgacttccataaggaatgtaaaaatatgagatgggatcgactaagtattttattggatcaggtagcagaaatgcaagatgaattaagttattttctagtggactctgctggccaggtggtggcaaaccaggaaggcgtgttccgaagcaattgcatggattgtctagatagaaccaatgtgatccagagtttgttagctcgtcgttcacttcaggcccaacttcagagactaggagttttgcatgtgggacaaaagcttgaagaacaagatgaatttgagaagatttacaaaaatgcctgggctgacaacgcaaatgcttgtgccaagcaatatgcgggaactggtgccttgaagactgactttaccagaactggaaagagaactcatttgggacttataatggatggctggaactcaatgatacgatattataagaacaacttttccgatggatttagacaagattccatagacttatttcttggaaactattcagtggatgaattagaatctcatagtcctttaagtgttccaagggactggaaattcctggctttgcctattatcatggttgttgccttttcaatgtgcattatctgtttgcttatggctggtgacacttggacagaaacactggcctatgtgctcttctggggagttgcaagcattggaacattttttatcattctttacaatggcaaagattttgtcgatgctcccagactggtccagaaagaaaagatagactgaatttgtatttgtggaaagcggcttggcttggaagattccattgtgcagaactggagtctttactgacccgctttccacatcagcccaaggtctttttaatgcctttatccaaaagcacatcttgtgctccatgcaggatgatgacagaattgatctgatgttactgccttgatggtctctttactattgggacagttagatttataatttgaagctattctgtaattaaaatataacctgaattcagcttgcagaatggaagctga

SEQ ID NO: 178766 - DNA, 542 bp, Homo sapiens
  Payload ID: 15237
  Gene Symbol: SACM1L
  Gene Name: SAC1 suppressor of actin mutations 1-like (yeast)
  ENST ID: ENST00000438671
  CDS Start-End: 205-542
gaggctgggagctgcggccgctgtgccagggtgaccggtagagttgtagccgaggtggcggcgcggggcggggcgggcggagagagaaggaaggaggtggttgtgcaggatggcgacggcggcctacgagcagctgaagctgctgtttgaaaatctggtggccacagcctgggaatatctggcatatcacacctgaaaaattttatgtggaagcttgtgatgatggagcagatgacgtacttaccattgaccgtgtgtccacagaggttacccttgcagtcaagaaagatgttcctccttcagctgtcacaagaccaatatttggtatactgggcacaatccatctggtggcagttacaagataataaaaccttcctagcgatgctaaaccatgtcttgaatgtggatggattttacttttcaacaacatatgatttgacccatactttgcagcggctatccaacactagtcctgaattccaagaaatgagtctcttggaaagggcagatcagcggtttgtatggaatggtcatcttctaag

SEQ ID NO: 178767 - DNA, 678 bp, Homo sapiens
  Payload ID: 15237
  Gene Symbol: SACM1L
  Gene Name: SAC1 suppressor of actin mutations 1-like (yeast)
  ENST ID: ENST00000433336
  CDS Start-End: 117-678
ggatcagtctgtggtaaaggtttaaggtcttctcaggactcttttcagcatgcatcttgcctggttatattaaccagaagggctcggagaagccacttgagcagacatttgcaacaatggtgtcttccttgggaagtggaatgatgagatacattgcctttgacttccataaggaatgtaaaaatatgagatgggatcgactaagtattttattggatcaggtagcagaaatgcaagatgaattaagttattttctagtggactctgctggccaggtggtggcaaaccaggaaggcgtgttccgaagcaattgcatggattgtctagatagaaccaatgtgatccagagtttgttagctcgtcgttcacttcaggcccaacttcagagactaggagttttgcatgtgggacaaaagcttgaagaacaagatgaatttgagaagatttacaaaaatgcctgggctgacaacgcaaatgcttgtgccaagcaatatgcgggaactggtgccttgaagactgactttaccagaactggaaagagaactcatttgggacttataatggatggctggaactcaatgatacgatattataagaacaacttttccgatggatttagacaagattccatagacttatttcttggaaactattcagtggatgaattagaatctcata

SEQ ID NO: 178768 - DNA, 1566 bp, Homo sapiens
  Payload ID: 15238
  Gene Symbol: SAC3D1
  Gene Name: SAC3 domain containing 1
  ENST ID: ENST00000398846
  CDS Start-End: 390-1466
acaaagcggttggttgcggcagggactacaccggtgtatcatgggagcggcccgggctacacgttaaaaacactaaggggagcgcgcgaagctgaacttggcgctcgatgggggccgttagccgccctagagcgcgcggagccgcagaggcgtagctggactacaacgcagtgcatctcgggaggccaactcgactggactgggtgagaggacagaggtggctcgatgggcggcccgaaggccggggatcatggcgggaaggcgggcccagacaggttcagccccgccccgacccgccgctccccaccccccggccggcctcgcgtgccttcccgcagcactgccgtccccgggatgctgagcgcccaccgtctccccgcagccccctcatgcccggctgcgagctgcccgtgggcacctgcccggacatgtgcccggccgccgagcgcgcccagcgcgaaagggagcaccgcctgcaccgcttggaggtggtgccgggttgccgccaggacccgccccgcgcggatccgcagcgcgcggtgaaggagtacagccgacccgccgccggcaagccccggcccccgcccagccagttgcgtccgccctccgtgctgctggccaccgtgcgctacctggccggtgaggtggcggagagcgccgacatcgcccgcgccgaggtggccagcttcgtggcagaccgcttgcgagctgtgctcctggacctggcgctgcagggagcgggcgacgccgaggcagctgtggtgctggaggcggcgctggccacgctgctgaccgtagtggcgcggctcgggcccgacgcggcgcggggacccgcggacccggtgctgctgcaggcccaggtgcaggagggcttcggctcgctgcggcgctgctacgcgcggggcgccgggccgcacccccgccaacccgccttccagggcctctttctgctctataacctgggctcggtggaagccctgcatgaggttctacagctgcctgctgccctgcgcgcctgcccgcccctccgcaaggccttggcggtagatgctgccttccgagagggcaatgctgcccgcctgttccgtctgctccagaccctgccctacctgccaagttgcgctgtgcagtgccatgtgggccatgcccgccgggaagccctggcccgcttcgctcgtgcctttagcacccccaagggccagaccttgcctctgggcttcatggtcaacctcttggccctggatggactcagggaagcacgggacctgtgccaggcccacgggctgcccttggacggagaggagagagttgtgttcctgaggggtcgctacgtggaggaagggctaccgcctgccagtacgtgcaaggtgttagtggagagcaaacttcgaggacgtaccctggaggaggtggtcatggcagaggaggaagatgagggcacggacagacctgggtccccagcctgaggagggagcgtgagcctcccagagccccaggactgggccagagcacttaggtttctttttccatggtttccaggtaataaaaggaacttgttttgttggt

SEQ ID NO: 178769 - DNA, 1362 bp, Homo sapiens
  Payload ID: 15238
  Gene Symbol: SAC3D1
  Gene Name: SAC3 domain containing 1
  ENST ID: ENST00000531072
  CDS Start-End: 214-1290
accacaaagcggttggttgcggcagggactacaccggtgtatcatgggagcggcccgggctacacgttaaaaacactaaggggagcgcgcgaagctgaacttggcgctcgatgggggccgttagccgccctagagcgcgcggagccgcagaggcgtagctggactacaacgcagtgcatctcgggaggccaactcgactggactggccccctcatgcccggctgcgagctgcccgtgggcacctgcccggacatgtgcccggccgccgagcgcgcccagcgcgaaagggagcaccgcctgcaccgcttggaggtggtgccgggttgccgccaggacccgccccgcgcggatccgcagcgcgcggtgaaggagtacagccgacccgccgccggcaagccccggcccccgcccagccagttgcgtccgccctccgtgctgctggccaccgtgcgctacctggccggtgaggtggcggagagcgccgacatcgcccgcgccgaggtggccagcttcgtggcagaccgcttgcgagctgtgctcctggacctggcgctgcagggagcgggcgacgccgaggcagctgtggtgctggaggcggcgctggccacgctgctgaccgtagtggcgcggctcgggcccgacgcggcgcggggacccgcggacccggtgctgctgcaggcccaggtgcaggagggcttcggctcgctgcggcgctgctacgcgcggggcgccgggccgcacccccgccaacccgccttccagggcctctttctgctctataacctgggctcggtggaagccctgcatgaggttctacagctgcctgctgccctgcgcgcctgcccgcccctccgcaaggccttggcggtagatgctgccttccgagagggcaatgctgcccgcctgttccgtctgctccagaccctgccctacctgccaagttgcgctgtgcagtgccatgtgggccatgcccgccgggaagccctggcccgcttcgctcgtgcctttagcacccccaagggccagaccttgcctctgggcttcatggtcaacctcttggccctggatggactcagggaagcacgggacctgtgccaggcccacgggctgcccttggacggagaggagagagttgtgttcctgaggggtcgctacgtggaggaagggctaccgcctgccagtacgtgcaaggtgttagtggagagcaaacttcgaggacgtaccctggaggaggtggtcatggcagaggaggaagatgagggcacggacagacctgggtccccagcctgaggagggagcgtgagcctcccagagccccaggactgggccagagcacttaggtttctttttccatggtttcca

SEQ ID NO: 178770 - DNA, 1366 bp, Homo sapiens
  Payload ID: 15238
  Gene Symbol: SAC3D1
  Gene Name: SAC3 domain containing 1
  ENST ID: ENST00000529996
  CDS Start-End: 1-720
tgccgtccccgggatgctgagcgcccaccgtctccccgcagccccctcatgcccggctgcgagctgcccgtgggcacctgcccggacatgtgcccggccgccgagcgcgcccagcgcgaaagggagcaccgcctgcaccgcttggaggtggtgccgggttgccgccaggacccgccccgcgcggatccgcagcgcgcggtgaaggagtacagccgacccgccgccggcaagccccggcccccgcccagccagttgcgtccgccctccgtgctgctggccaccgtgcgctacctggccggtgaggtggcggagagcgccgacatcgcccgcgccgaggtggccagcttcgtggcagaccgcttgcgagctgtgctcctggacctggcgctgcagggagcgggcgacgccgaggcagctgtggtgctggaggcggcgctggccacgctgctgaccgtagtggcgcggctcgggcccgacgcggcgcggggacccgcggacccggtgctgctgcaggcccaggtgcaggagggcttcggctcgctgcggcgctgctacgcgcggggcgccgggccgcacccccgccaacccgccttccagggcctctttctgctctataacctggagatgggatctcgcatgttgccactcgaattcctgggctcaagtgatcctcctgccccaccctcccaagtagccgggtgtggccatcatgcccagtgaatggtttatttttgtccacactgttcctctgaagaaggcatggctcggtggaagccctgcatgaggttctacagctgcctgctgccctgcgcgcctgcccgcccctccgcaaggccttggcggtagatgctgccttccgagagggcaatgctgcccgcctgttccgtctgctccagaccctgccctacctgccaagttgcgctgtgcagtgccatgtgggccatgcccgccgggaagccctggcccgcttcgctcgtgcctttagcacccccaagggccagaccttgcctctgggcttcatggtcaacctcttggccctggatggactcagggaagcacgggacctgtgccaggcccacgggctgcccttggacggagaggagagagttgtgttcctgaggggtcgctacgtggaggaagggctaccgcctgccagtacgtgcaaggtgttagtggagagcaaacttcgaggacgtaccctggaggaggtggtcatggcagaggaggaagatgagggcacggacagacctgggtccccagcctgaggagggagcgtgagcctcccagagccccaggactgggccagagcacttaggtttctttttccatggtttccaggtaataaaaggaacttgttttgttggta

SEQ ID NO: 178771 - DNA, 1315 bp, Homo sapiens
  Payload ID: 15238
  Gene Symbol: SAC3D1
  Gene Name: SAC3 domain containing 1
  Uniprot ID: A6NKF1
  ENST ID: ENST00000614106
  CDS Start-End: 1-1215
atggcgggaaggcgggcccagacaggttcagccccgccccgacccgccgctccccacccccggccggcctcgcgtgccttcccgcagcactgccgtccccgggatgctgagcgcccaccgtctccccgcagccccctcatgcccggctgcgagctgcccgtgggcacctgcccggacatgtgcccggccgccgagcgcgcccagcgcgaaagggagcaccgcctgcaccgcttggaggtggtgccgggttgccgccaggacccgccccgcgcggatccgcagcgcgcggtgaaggagtacagccgacccgccgccggcaagccccggcccccgcccagccagttgcgtccgccctccgtgctgctggccaccgtgcgctacctggccggtgaggtggcggagagcgccgacatcgcccgcgccgaggtggccagcttcgtggcagaccgcttgcgagctgtgctcctggacctggcgctgcagggagcgggcgacgccgaggcagctgtggtgctggaggcggcgctggccacgctgctgaccgtagtggcgcggctcgggcccgacgcggcgcggggacccgcggacccggtgctgctgcaggcccaggtgcaggagggcttcggctcgctgcggcgctgctacgcgcggggcgccgggccgcacccccgccaacccgccttccagggcctctttctgctctataacctgggctcggtggaagccctgcatgaggttctacagctgcctgctgccctgcgcgcctgcccgcccctccgcaaggccttggcggtagatgctgccttccgagagggcaatgctgcccgcctgttccgtctgctccagaccctgccctacctgccaagttgcgctgtgcagtgccatgtgggccatgcccgccgggaagccctggcccgcttcgctcgtgcctttagcacccccaagggccagaccttgcctctgggcttcatggtcaacctcttggccctggatggactcagggaagcacgggacctgtgccaggcccacgggctgcccttggacggagaggagagagttgtgttcctgaggggtcgctacgtggaggaagggctaccgcctgccagtacgtgcaaggtgttagtggagagcaaacttcgaggacgtaccctggaggaggtggtcatggcagaggaggaagatgagggcacggacagacctgggtccccagcctgaggagggagcgtgagcctcccagagccccaggactgggccagagcacttaggtttctttttccatggtttccaggtaataaaaggaacttgttttgttggt

SEQ ID NO: 178772 - DNA, 2503 bp, Homo sapiens
  Payload ID: 15239
  Gene Symbol: SCCPDH
  Gene Name: saccharopine dehydrogenase (putative)
  Uniprot ID: Q8NBX0
  ENST ID: ENST00000366510
  CDS Start-End: 377-1666
cgcctccagcttccagcagggctagaagatgcgctgcccggggcggccagagccctgcagaacaaaccgccgcacggaattaggggccgccgtccgcgcctgccaggcttggaagcggactcgcccccagggccaccgccctaggaaacctcccgtcggaagcctcccaagcaagccgctcacccgcggctcccgcgcgaggcggcgtgggcgtgggcgcggccctggcgcggcggcgcgcgcggggtgaagggagcccggcgcgctggctgcggcgacggcggccgttgctgcgccgggtactggggtcgctgcctgaggcgcaggcgccgtggactccacccgccccggggcctgggctcgctgtggactcgtcatggcgaccgagcagaggcctttccacctggtggtgttcggcgcgtctggcttcaccggccagttcgtgaccgaggaggtggcccgggagcaggtggacccggagcggagctcccgcctgccctgggccgtggcgggccgctcccgggagaagctgcagcgggtgctggagaaggcggccctgaagctgggaagaccaacactgtcatctgaagttggaatcatcatctgtgatattgctaatccagcctcgcttgatgaaatggctaaacaggcaacagttgtcctcaattgcgtaggaccatatcggttttatggagaacctgtaataaaagcatgtattgaaaatggagccagttgtatcgacatcagtggagaacctcagtttctggaactaatgcaactgaagtatcatgagaaagctgcagacaaaggggtttatatcattggaagcagcggctttgactccattccagcagatctgggagtaatatataccagaaataaaatgaatggtactttgactgctgtggaaagtttcctgactatacattcaggacctgaggggttgagcattcatgatggtacctggaagtcagcaatttatggttttggagatcagagtaatttgagaaaactaagaaatgtatcaaatctgaaacctgtcccgctcattggtccaaaattgaagagaaggtggccaatttcttattgtcgggaactcaaaggttattccattccttttatgggatctgatgtgtctgttgtaaggaggactcaacgttacttgtatgaaaatttagaggaatcaccagttcagtatgctgcgtatgtaactgtgggaggcatcacctctgttattaagctgatgtttgcaggacttttctttttgttctttgtgaggtttggaattggaaggcaacttctcataaaattcccatggttcttctcctttggctatttttcaaaacaaggcccaacacaaaaacagattgatgctgcctcattcacgctgacattctttggtcaaggatacagccaaggcactggtacagataagaacaaaccaaatatcaaaatttgtactcaggtgaaaggaccagaggctggctatgtggctacccccatagctatggttcaggcagccatgactcttctaagtgatgcttctcatctgcctaaggcgggcggggtcttcacacctggagcagctttttccaaaacaaagttgattgacagactcaacaaacacggtattgagtttagtgttattagcagctctgaagtctaaacactggaagaattaactgaagtcataacgtgcgtgaattaacagcttctctatttgatatttgaaattcttctgtaagcctgtctgagtgtatgtggaaacgattgtcaaatctaaaatatctatatattaaaaagtaggaaattgtcctagcttaccctaaatttcaaatctgagttgattttgtgattttattgcttataacagagaactcatatttgacatatttttttcattgatgtgttcctggtagattttcacgaatgagctggcaggtctaatgggggaggcggcgtcccagtctgtgttgcagcagcattctcatcgggggtgcgcacaccatcgttactgtcgggcagtaactgccgcttgccttgccgcagtaggagggaaatctcaccttccttccacatactgtcttgagcctttgctaaattaaactgcactttttgctatttttgcctagtttttcgccaatctacactgattttggactgttacctaagttgaaaaataaaaggttgtcaatcgaatggtggtttaatgtttggacctgccgatgtatttgtatagtggtagaaacatgctgcttaagtggcctaacctgtttcttgccaataagtaggcttatcattttatctttacgtaattctatatctgtgactaggtttttaaggatacagcttataagttgctatcaattttcactacctaagcagaatttttctctaatttactttttgtattttaactaggttttacatggaagccctaaaataaggcaaaagactttttcttttgtaataagcatataataaacacgtatatacatagcaa

SEQ ID NO: 178773 - DNA, 15324 bp, Homo sapiens
  Payload ID: 15240
  Gene Symbol: SACS
  Gene Name: sacsin molecular chaperone
  Uniprot ID: Q9NZJ4
  ENST ID: ENST00000382292
  CDS Start-End: 275-14014
tatcctgagaacttccatgggtcgctggatcagcaggcaaccattatcagactggagagtcatactttaaggaatacaaatgcaacacacgacaatgtttcctgacatcagatgatgaatggacactgaagggaaaaacaggctttttttccacctggcaggaagagctgaacttggagtacacatttaaaggaagcacagagggaagacttaaacagaagaaagaagcgtactttcatggttttcacaaacaaatatcccaggagaagtgatcatggagaccaaggagaacaggtgggtcccggtgaccgtgctccccggctgcgtgggctgcaggaccgtcgcggcgctggcgtcctggaccgtgcgcgatgtgaaggaacgtatcttcgcggagactggcttcccggtgtcggagcagcggctgtggcgcggcggccgcgagttatctgactggatcaagattggagatctgacttccaaaaattgtcatctttttgtaaaccttcaatcaaaaggcttaaaagggggaggtcgatttggtcagacaacgccaccacttgttgattttctcaaggacattttgagaagatatccagaaggaggacagattcttaaggaattaattcagaatgcagaagatgctggggcgacagaagttaaatttttatatgatgaaactcaatacggaacagagactctttggtcaaaagatatggcgccatatcaggggccagctctctatgtgtacaacaacgcggttttcaccccagaggactggcacggcattcaagaaatagcaagaagcaggaaaaaggatgatcctctgaaggtcggaagatttggaattgggtttaattctgtctatcatataacagatgttccttgtatctttagtggtgaccaaatcgggatgctagatcctcatcaaacactttttggcccacatgaatcaggccaatgttggaatctcaaagatgacagcaaagaaattagtgaactttcagaccagtttgcaccatttgttggcatttttggaagcaccaaggaaacatttataaacggcaattttccaggaacatttttccgtttccctcttcgcctacaaccttcacaacttagtagtaacctctacaataagcagaaggttcttgagttgtttgagtcttttagggcagatgcagacacagtgctgctctttctgaaaagtgtgcaggatgtttccttatatgtccgagaggctgacggaacagagaaactggtgtttagagtgacttcgagtgagagtaaggcactgaaacatgagcggccgaattctataaagattctgggaactgctataagtaactattgtaaaaagactccaagcaataacatcacctgtgtaacatatcacgtaaatattgttttagaagaggagagtactaaggatgcacagaaaacatcttggttggtgtgtaacagtgtgggtgggcgagggatcagtagtaagcttgactctttagctgatgaactgaaatttgtcccaatcattggaatagccatgcctttatcaagcagagatgatgaagcaaaaggagcaacgtctgatttctcaggaaaagcattttgtttccttcctttaccacctggtgaggaaagcagcacaggcctcccagttcacatcagtgggttctttggccttactgataaccgcaggagcataaaatggagagagctggaccagtggagagacccggcagccttatggaatgagtttcttgtcatgaatgttgtccccaaagcttatgctactctgatcttagattcaataaaacgtctggagatggaaaagagctctgatttccccttgtcagttgatgttatctataagctttggccggaggcgagcaaagtcaaggtgcactggcaaccggtgttagagcctctattcagcgagctgttgcagaatgcagtgatttattcaattagctgtgactgggtcaggttggagcaggtgtacttctcagaacttgatgaaaatttagaatacacaaaaactgtgctcaactacctccagagctcagggaagcagattgccaaggtaccagggaatgtggatgctgctgttcagctcacagctgcctctggcacaacacctgtgaggaaggtgacgcccgcgtgggtgcggcaggtgctgcggaagtgtgcacacctgggctgtgctgaagaaaagcttcaccttctagaatttgtgctttctgaccaagcctacagtgagctgcttgggctggagctgctccctttacaaaatggcaattttgtccccttctcctcatctgtatcagaccaagatgtcatttatattacctcagcagaatatccaaggtcccttttcccaagtcttgaaggaagatttattttggataacttgaaacctcaccttgtggctgctttaaaggaagctgcccaaacccgaggaagaccatgtactcagctgcagcttctaaatccagaacgatttgcacgtcttatcaaggaagtaatgaatacattctggcctggcagagaattgattgttcaatggtatccatttgatgaaaacagaaatcacccatctgtttcatggcttaagatggtttggaaaaatctttatatacatttttcagaggatttgactttatttgatgagatgccacttatccccagaactatactagaggaaggtcagacatgtgtggaactcattagactcaggattccatcgttagtcattttagacgatgaatctgaagcacagcttccagaatttttagcagacattgtacaaaaacttggagggtttgtccttaaaaaattagatgcatctatacaacatccgcttattaaaaaatatattcattcaccattaccaagtgctgttttgcagataatggagaagatgccattgcagaaattgtgtaatcaaataacttcgctacttccaacacacaaagatgccctgaggaagttcttggctagtttaaccgatagcagtgagaaagagaaaagaattattcaagaattggcaatattcaagcgcattaaccattcttctgatcagggaatttcctcttatacaaaattgaaaggttgtaaagtcttacaccatactgccaaactcccagcagatctgcgactttctatttcagtaatagacagtagtgatgaagctactattcgtctggcaaacatgttgaaaatagaacagttaaagaccactagctgcttaaagcttgttttaaaagatattgaaaatgcattttattcacatgaagaggtaacacagcttatgttatgggtccttgagaatctatcttctcttaaaaatgagaatccaaatgtgcttgagtggttaacaccattaaaattcatccagatatcacaggaacagatggtatcagctggtgaactctttgaccctgatatagaagtactaaaggatctcttttgtaatgaagaaggaacctatttcccaccctcagtttttacctcaccagatattcttcactccttaagacagattggtttaaaaaacgaagccagtctcaaagaaaaggatgttgtgcaagtggcaaaaaaaattgaagccttacaggtcggtgcttgtcctgatcaagatgttcttctgaagaaagccaaaaccctcttactggttttaaataagaatcacacactgttgcaatcatctgaaggaaagatgacattgaagaaaataaaatgggttccagcctgcaaggaaaggcctccaaattatccaggctctttggtctggaaaggagatctctgtaatctctgtgcaccaccagatatgtgtgatgtaggccatgcaattctcattggctcctcacttcctcttgttgaaagtatccatgtaaacctggaaaaagcattagggatcttcacaaaacctagccttagtgctgtcttaaaacactttaaaattgttgttgattggtattcttcaaaaacctttagtgatgaagactactatcaattccagcatattttgcttgagatttacggattcatgcatgatcatctaaatgaagggaaagattcttttagagccttaaaatttccatgggtttggactggcaaaaagttttgtccacttgcccaggctgtgattaaaccaatccatgatcttgaccttcagccttatttgcataatgtacctaaaaccatggcaaaattccaccaactatttaaggtctgtggttcaatagaggagttgacatcagatcatatttccatggttattcagaagatatatctcaaaagtgaccaagatctcagtgaacaagaaagcaaacaaaatcttcatcttatgttgaatattatcagatggctgtatagcaatcagattccagcaagccccaacacaccagttcctatacatcatagcaaaaatccttctaaacttatcatgaagccaattcacgaatgctgttattgtgacattaaagttgatgaccttaatgacttacttgaagattctgtggaaccaatcattttggtgcatgaggacatacccatgaaaactgcagaatggctaaaagttccatgccttagtacaagactgataaatcctgaaaacatgggatttgagcagtcaggacaaagagagccacttactgtaagaattaaaaatattctggaagaatacccttcagtgtcagatatttttaaagaactacttcaaaacgctgatgatgcaaatgcaacagaatgcagtttcttgattgatatgagaagaaatatggacataagagagaatctcctagacccagggatggcagcttgtcatggacctgctttgtggtcattcaacaattctcaattctcagattcagattttgtgaacataactaggttaggagaatctttaaaaaggggagaagttgacaaagttggaaaatttggtcttggatttaattctgtgtaccatatcactgacattcccatcattatgagtcgggaattcatgataatgttcgatccaaacataaatcatatcagtaaacacattaaagacaaatccaatcctgggatcaaaattaattggagtaaacaacagaaaagacttagaaaatttcctaatcagttcaaaccatttatagatgtatttggctgtcagttacctttgactgtagaagcaccttacagctataatggaacccttttccgactgtcctttagaactcaacaggaagcaaaagtgagtgaagttagtagtacgtgctacaatacagcagatatttattctcttgtggatgaatttagtctctgtggacacaggcttatcattttcactcagagtgtaaagtcaatgtatttgaagtacttgaaaattgaggaaaccaaccccagtttagcacaagatacagtaataattaaaaaaaaatcctgctcttccaaagcattgaacacacctgtcttaagtgttttaaaagaggctgctaagctcatgaagacttgcagcagcagtaataaaaagcttcccagtgatgaaccaaagtcatcttgcattcttcagatcacagtggaagaatttcaccatgtgttcagaaggattgctgatttacagtcgccactttttagaggtccagatgatgacccagctgctctctttgaaatggctaagtctggccaatcaaaaaagccatcagatgagttgtcacagaaaacagtagagtgtaccacgtggcttctgtgtacttgcatggacacaggagaggctctgaagttttccctgagtgagagtggaagaagactaggactggttccatgtggggcagtaggagttcagctgtcagaaatccaggaccagaagtggacagtgaaaccacacattggagaggtgttttgctatttacctttacgaataaaaacaggcttgccagttcatatcaatgggtgctttgctgttacatcaaataggaaagaaatctggaaaacagatacaaaaggacgatggaataccacgttcatgagacatgttattgtgaaagcttacttacaggtactgagtgtcttacgggacctggccactagtggggagctaatggattatacttactatgcagtatggcccgatcctgatttagttcatgatgatttttctgtaatttgccaaggattttatgaagatatagctcatggaaaagggaaagaactgaccaaagtcttctctgatggatctacttgggtttccatgaagaacgtaagatttctagatgactctatacttaaaagaagagatgttggttcagcagccttcaagatatttttgaaatacctcaagaagactgggtccaaaaacctttgtgctgttgaacttccttcttcggtaaaattaggatttgaagaagctggctgcaaacagatactacttgaaaacacattttcagagaaacagtttttttctgaagtgttttttccaaatattcaagaaattgaagcagaacttagagatcctttaatgatctttgttctaaatgaaaaagttgatgagttctcgggagttcttcgtgttactccatgtattccttgttccttggaggggcatcctttggttttgccatcaagattgatccaccccgaaggacgagttgcaaagttatttgatattaaagatgggagattcccttatggttctactcaggattatctcaatcctattattttgattaaactagttcagttaggtatggcaaaagatgatattttatgggatgatatgctagaacgtgcagtgtcagtagctgaaattaataaaagtgatcatgttgctgcatgcctaagaagtagtatcttattgagtcttatcgatgagaaactaaaaataagggatcctagagcaaaggattttgctgcaaaatatcaaacaatccgcttccttccatttctgacaaaaccagcaggtttttctttggactggaaaggcaacagttttaagcctgaaaccatgtttgcagcaactgacctttatacagctgaacatcaagatatagtttgtcttttgcaaccaattctaaatgaaaattcccattcttttagaggttgtggttcagtgtcattggctgttaaagagtttttgggattactcaagaagccaacagttgatctggttataaaccaattgaaagaagtagcaaaatcagttgatgatggaattacactgtaccaggagaatatcaccaatgcttgctacaaataccttcatgaagccttgatgcaaaatgaaatcactaagatgtcaattattgataagttaaaaccctttagcttcattctagttgagaatgcatatgttgactcagaaaaggtttcttttcatttaaattttgaggcggcaccatacctttatcagttgcctaataagtataaaaataatttccgcgaactttttgaaaccgtgggtgtgaggcagtcatgcactgttgaagattttgctcttgttttggaatctattgatcaagaaagaggaacaaagcaaataacagaagagaattttcagctttgccgacgaataatcagtgaaggaatatggagtctcattagagaaaagaaacaagaattttgtgagaaaaattatggcaagatattattgccagatactaatcttatgcttctccctgctaaatcgttatgctacaatgattgcccttggataaaagtaaaggataccactgtaaaatattgtcatgctgacatacccagggaagtagcagtaaaactaggagcagtcccaaagcgacacaaagccttagaaagatatgcatccaatgtctgttttacaacacttggcacagaatttgggcagaaagaaaaattgaccagcagaattaagagcatccttaatgcatatccttctgaaaaggaaatgttgaaagagcttcttcaaaatgctgatgatgcaaaggcgacagaaatctgttttgtgtttgatcctagacagcatccagttgatagaatatttgatgataagtgggccccattgcaagggccagcactttgtgtgtacaacaaccagccatttacagaagatgatgttagaggaattcagaatcttggaaaaggcacgaaagagggaaatccttataaaactggacagtatggaataggattcaattctgtgtatcatatcacagactgcccatcttttatttctggcaatgacatcctgtgtatttttgatcctcatgccagatatgcaccaggggccacatccattagtcccggacgcatgtttagagatttggatgcagattttaggacacagttctcagatgttctggatctttatctgggaacccattttaaactggataattgcacaatgttcagatttcctcttcgtaatgcagaaatggcaaaagtttcggaaatttcgtctgttccagcatcagacagaatggtccagaatcttttggacaaactgcgctcagatggggcagaacttctaatgtttcttaatcacatggaaaaaatttctatttgtgaaatagataagagtactggagctctaaatgtgctgtattcagtaaagggcaaaatcacagatggagacagattgaaaaggaaacaatttcatgcatctgtaattgatagtgttactaaaaagaggcagctcaaagacataccagttcaacaaataacctatactatggatactgaggactctgaaggaaatcttactacgtggctaatttgtaatagatcaggcttttcaagtatggagaaagtatctaaaagtgtcatatcagctcacaagaaccaagatattactcttttcccacgtggtggagtagctgcctgcattactcacaactataaaaaaccccatagggccttctgttttttgcctctttctttggagactgggctgccatttcatgtgaatggccactttgcactggattcagccagaaggaacctgtggcgtgatgataatggagttggtgttcgaagtgactggaataacagtttaatgacagcattaatagctcctgcatatgttgaattgctaatacagttaaaaaaacggtatttccctggttctgatccaacattatcagtgttacagaacacccctattcatgttgtaaaggacactttaaagaagtttttatcgtttttcccagttaaccgtcttgatctacagccagatttatattgtctagtgaaagcactttacaattgcattcacgaagacatgaaacgtcttttacctgttgtgcgggctccaaatattgatggctctgacttgcactctgcagttataattacttggatcaatatgtctacttctaataaaactagaccattttttgacaatttactacaggatgaattacaacaccttaaaaatgcagattataatatcaccacacgcaaaacagtagcagagaatgtctataggctgaaacatctccttttagaaattggtttcaacttggtttataactgtgatgaaactgctaatctttaccactgtcttatagatgcagatattcctgttagttatgtgacccctgctgatatcagatcttttttaatgacattttcctctcctgacactaattgccatattgggaagctgccttgtcgtctgcagcagactaatctaaaactttttcatagtttaaaacttttagttgattattgttttaaagatgcagaagaaaatgagattgaagttgagggattgccccttctcatcacactggacagtgttttgcaaacttttgatgcaaaacgacccaagtttctaacaacatatcatgaattgattccatcccgcaaagacttgtttatgaatacattatatttgaaatatagtaatattttattgaactgtaaagttgcaaaagtgtttgacatttccagctttgctgatttgttatcctctgtgttgcctcgagaatataagaccaaaagttgcacaaagtggaaagacaattttgcaagtgagtcttggcttaagaatgcatggcattttattagtgaatctgtaagtgtgaaagaagatcaggaagaaacaaaaccaacatttgacattgttgttgatactctaaaagactgggcattgcttccaggaacaaagtttactgtttcagccaaccagcttgtggttcctgaaggagatgttctgcttcctctcagccttatgcacattgcagtttttccaaatgcccagagtgataaagtttttcatgctctaatgaaagctggctgtattcagcttgctttgaacaaaatctgttccaaagacagtgcatttgttcctttgttgtcatgtcacacagcaaatatagagagccccacaagcatcttgaaggctctacattatatggtccaaacttcaacatttagagcagaaaaattagtagaaaatgattttgaggcacttttgatgtatttcaactgcaatttgaatcatttgatgtcccaagatgatataaaaattctaaagtcacttccgtgctataaatccatcagtggccgctatgtaagcattggaaaatttggaacatgctacgtacttacaaaaagtatcccttcagctgaagtggagaaatggacacagtcatcatcatctgcatttcttgaagaaaaaatacacttaaaagaactatatgaggtgattggttgtgtacctgtagatgatcttgaggtatatttgaaacacctcttaccaaaaattgaaaatctctcttatgatgcaaaattagagcacttgatctaccttaagaatagattatcaagtgctgaggaattatcagagattaaggaacaactttttgaaaaactggaaagtttattgataatccatgatgctaacagtagactaaagcaagcaaagcatttctatgatagaactgtgagagtttttgaagttatgcttcctgaaaaattgtttattcctaatgatttctttaagaaattggaacaacttataaaacccaaaaatcatgttacatttatgacatcctgggtggaattcttaagaaatattggactaaaatacatactttctcagcagcagttgttacagtttgctaaggaaatcagtgtgagggctaatacagaaaactggtccaaagaaacattgcaaaatacagttgatatccttctgcatcatatattccaagaacgaatggatttgttatctggaaattttctgaaagaactatctttaataccattcttatgtcctgagcgggcccccgcggaattcattagatttcatcctcaatatcaagaggtaaatggaacacttcctcttataaagttcaatggagcacaggtaaatccaaaattcaagcaatgtgatgtactccagctgttatggacatcctgccctattcttccagagaaagctacacccttaagcattaaagaacaagaaggtagtgaccttggtccacaagaacagcttgaacaagttttaaatatgcttaatgttaacctggatcctcctcttgataaggtaatcaataactgcagaaacatatgcaacataacgacgttggatgaagaaatggtaaaaactagagcaaaagtcttaaggagcatatatgaattcctcagtgcagaaaaaagggaatttcgttttcagttgcgaggggttgcttttgtgatggtagaagatggttggaaacttctgaagcctgaggaggtagtcataaacctagaatatgaatctgattttaaaccttatttgtacaagctacctttagaacttggcacatttcaccagttgttcaaacacttaggtactgaagatattatttcaactaagcaatatgttgaagtgttgagccgcatatttaaaaattctgagggcaaacaattagatcctaatgaaatgcgtacagttaagagagtagtttctggtctgttcaggagtctacagaatgattcagtcaaggtgaggagtgatctcgagaatgtacgagaccttgcgctttacctcccaagccaggatggtagattggtaaagtcaagcatcttagtgtttgacgatgcgccacattataaaagtagaatccaggggaatattggtgtgcaaatgttagttgatctcagccagtgctacttagggaaagaccatggatttcacactaagttgataatgctctttcctcaaaaacttagacctcgattattgagcagtatacttgaagaacaattagatgaagagactcccaaagtttgtcagtttggagcgttgtgttctcttcaaggaagattgcagttactcttgtcttctgaacagttcattacaggactgattagaattatgaagcatgaaaatgataatgcttttctggccaatgaagaaaaagccataagactttgcaaagccctaagagaaggattgaaagtatcctgctttgaaaagcttcaaacaacattaagagttaaaggttttaatcctattccccacagcagaagtgaaacttttgcttttttgaagcgatttggtaatgcagtcatcttgctctacattcaacattcagacagtaaagacattaatttcctgttagcattggcaatgactcttaaatcagcaactgacaatttgatttctgacacttcatatttaattgctatgctaggatgcaatgatatttacaggattggtgagaaacttgacagtttaggagtgaaatatgactcttcggagccatcaaaactggaacttccaatgcctggcacaccaattcctgctgaaattcattacactctgcttatggacccaatgaatgttttttacccgggagaatatgttgggtaccttgttgatgctgaaggtggtgatatctatggatcataccagccaacatacacatatgcaattattgtacaagaagttgaaagagaagatgctgacaattctagttttctaggaaagatatatcagatagatattggttatagtgaatataaaatagttagctctcttgatctgtataagttttcaagacctgaggaaagctctcaaagcagggacagtgctccttctacaccaaccagccccactgagttcctcacccctggcctgagaagcattcctcctcttttctctggtagagagagccacaagacttcttccaaacatcagtcccccaaaaagcttaaggttaattctttaccagaaatcttaaaagaagtgacatctgtggtggagcaagcatggaagcttccagaatcggaacgaaaaaagattattaggcggttgtatttgaaatggcatcctgacaaaaatccagagaaccatgacattgccaatgaagtttttaaacatttgcagaatgaaatcaacagattagaaaaacaggcttttctagatcaaaatgcagacagggcctccagacgaacattttcaacctcagcatcccgatttcagtcagacaaatactcatttcagagattctatacttcatggaatcaagaagcaacgagccataaatctgaaagacagcaacagaacaaagaaaaatgccccccttcagccggacagacttactctcaaaggttctttgttcctcccactttcaagtcggttggcaatccagtggaagcacgcagatggctaagacaagccagagcaaacttctcagctgccaggaatgaccttcataaaaatgccaatgagtgggtgtgctttaaatgttacctttctaccaagttagctttgattgcagctgactatgctgtgaggggaaagtctgataaagatgtaaaaccaactgcacttgctcagaaaatagaggaatatagtcagcaacttgaaggactgacaaatgatgttcacacattggaagcttatggtgtagacagtttaaaaacaagataccctgatttgcttccctttcctcagatcccaaatgacaggttcacttctgaggttgctatgagggtgatggaatgtactgcctgtatcataataaaacttgaaaattttatgcaacaaaaagtgtgaagatatttaacgaaaaaaaaggtagatcttgaatgtgttgtagcacgaataaattgctgtacttcattaagcttcattgccaattagctaggaattgttaagcacattgcagattgttcttggagaattctggagttgttatgaacatgaataccaacggaaaaccttaactgaatctaaaagaaaactattttgaagatggtggtgagctgcaaaatagctggatggatttgaatgattgggatgatacatcattgaactgcactttatataaccaaagcttagcagtttgttagataagagtctatgtatgtctctggttaggatgaagttaattttatgtttttaacatggtatttttgaaggagctaatgaaacactggacatataattggtttaaacataaggggaattaagtctttgtagtctgtcatttttttaagtggatcctcttggatgcgttattttctcatcagctggctctgatcatgaatttgttgtaattttatgttgtactcagtgcatttaagaaatggtagagtattttaatcctattacttgactaagagtgtgaaggtagtactttttagagtgcactgagtgcactttacatctttatttaaatttttttttaacatcttatgtttacaggcttcctgtttgatgaagatagcaacggaaaactcaaaatggtggcagttcttattaccagttgttagtattgtttctggaaactgcttgccaagacaacatttattaactgttagaacacttgctttatgtttgtgtgtacatattttccacaaatgttataatttatatagtgtggttgaacaggatgcaatcttttgttgtctaaaggtgctgcagttaaaaaaaaaacaaccttttctttcaatatggcatgtagtggagtttttttaactttaaaaacatcaaaaattgttaaaatcattgtgttatctagtagtttataattatcggcttatatttccccatgaatgatcagaactgacatttaattcatgtttgtctcgccatgcttctttactttaacatatttcttttgcagaatgtaaaaggtaatgataattagtttatataagtgtactggctgtaaatgatgctaaatatactttatgcaattaagggcttacagaacatgttgaaactttttttacttttattgggaataaggaatgtttgcacctccacattttattgcttctggatgtgaaatcatgtaattatttctgctgttatataaagtgccatacttttaataaaggaaaatgtacatatgaaatcat

SEQ ID NO: 178774 - DNA, 15668 bp, Homo sapiens
  Payload ID: 15240
  Gene Symbol: SACS
  Gene Name: sacsin molecular chaperone
  Uniprot ID: Q9NZJ4
  ENST ID: ENST00000382298
  CDS Start-End: 616-14355
gactgcggcaggagccgcctggacccagtgcggctgcgggacagtcacgctgggaactgctgatggcactggaggaaaacaaaggccgagagaccctgatgcccacagcccccagatcacagaagtgaggccaagatgcccatgtcaccagagccagaagaaaggctcctaccaaagaatattttacatctgctgagatgagggtgagaaacaaaatccaagaatttctgcgacgttttccccaagaaccttcaaaaagaaatacagaaaattctcagatgaaaataaattgattttgctctgggggaaagccaaaaacctttagcgaatccacactgttttatcctgagaacttccatgggtcgctggatcagcaggcaaccattatcagactggagagtcatactttaaggaatacaaatgcaacacacgacaatgtttcctgacatcagatgatgaatggacactgaagggaaaaacaggctttttttccacctggcaggaagagctgaacttggagtacacatttaaaggaagcacagagggaagacttaaacagaagaaagaagcgtactttcatggttttcacaaacaaatatcccaggagaagtgatcatggagaccaaggagaacaggtgggtcccggtgaccgtgctccccggctgcgtgggctgcaggaccgtcgcggcgctggcgtcctggaccgtgcgcgatgtgaaggaacgtatcttcgcggagactggcttcccggtgtcggagcagcggctgtggcgcggcggccgcgagttatctgactggatcaagattggagatctgacttccaaaaattgtcatctttttgtaaaccttcaatcaaaaggcttaaaagggggaggtcgatttggtcagacaacgccaccacttgttgattttctcaaggacattttgagaagatatccagaaggaggacagattcttaaggaattaattcagaatgcagaagatgctggggcgacagaagttaaatttttatatgatgaaactcaatacggaacagagactctttggtcaaaagatatggcgccatatcaggggccagctctctatgtgtacaacaacgcggttttcaccccagaggactggcacggcattcaagaaatagcaagaagcaggaaaaaggatgatcctctgaaggtcggaagatttggaattgggtttaattctgtctatcatataacagatgttccttgtatctttagtggtgaccaaatcgggatgctagatcctcatcaaacactttttggcccacatgaatcaggccaatgttggaatctcaaagatgacagcaaagaaattagtgaactttcagaccagtttgcaccatttgttggcatttttggaagcaccaaggaaacatttataaacggcaattttccaggaacatttttccgtttccctcttcgcctacaaccttcacaacttagtagtaacctctacaataagcagaaggttcttgagttgtttgagtcttttagggcagatgcagacacagtgctgctctttctgaaaagtgtgcaggatgtttccttatatgtccgagaggctgacggaacagagaaactggtgtttagagtgacttcgagtgagagtaaggcactgaaacatgagcggccgaattctataaagattctgggaactgctataagtaactattgtaaaaagactccaagcaataacatcacctgtgtaacatatcacgtaaatattgttttagaagaggagagtactaaggatgcacagaaaacatcttggttggtgtgtaacagtgtgggtgggcgagggatcagtagtaagcttgactctttagctgatgaactgaaatttgtcccaatcattggaatagccatgcctttatcaagcagagatgatgaagcaaaaggagcaacgtctgatttctcaggaaaagcattttgtttccttcctttaccacctggtgaggaaagcagcacaggcctcccagttcacatcagtgggttctttggccttactgataaccgcaggagcataaaatggagagagctggaccagtggagagacccggcagccttatggaatgagtttcttgtcatgaatgttgtccccaaagcttatgctactctgatcttagattcaataaaacgtctggagatggaaaagagctctgatttccccttgtcagttgatgttatctataagctttggccggaggcgagcaaagtcaaggtgcactggcaaccggtgttagagcctctattcagcgagctgttgcagaatgcagtgatttattcaattagctgtgactgggtcaggttggagcaggtgtacttctcagaacttgatgaaaatttagaatacacaaaaactgtgctcaactacctccagagctcagggaagcagattgccaaggtaccagggaatgtggatgctgctgttcagctcacagctgcctctggcacaacacctgtgaggaaggtgacgcccgcgtgggtgcggcaggtgctgcggaagtgtgcacacctgggctgtgctgaagaaaagcttcaccttctagaatttgtgctttctgaccaagcctacagtgagctgcttgggctggagctgctccctttacaaaatggcaattttgtccccttctcctcatctgtatcagaccaagatgtcatttatattacctcagcagaatatccaaggtcccttttcccaagtcttgaaggaagatttattttggataacttgaaacctcaccttgtggctgctttaaaggaagctgcccaaacccgaggaagaccatgtactcagctgcagcttctaaatccagaacgatttgcacgtcttatcaaggaagtaatgaatacattctggcctggcagagaattgattgttcaatggtatccatttgatgaaaacagaaatcacccatctgtttcatggcttaagatggtttggaaaaatctttatatacatttttcagaggatttgactttatttgatgagatgccacttatccccagaactatactagaggaaggtcagacatgtgtggaactcattagactcaggattccatcgttagtcattttagacgatgaatctgaagcacagcttccagaatttttagcagacattgtacaaaaacttggagggtttgtccttaaaaaattagatgcatctatacaacatccgcttattaaaaaatatattcattcaccattaccaagtgctgttttgcagataatggagaagatgccattgcagaaattgtgtaatcaaataacttcgctacttccaacacacaaagatgccctgaggaagttcttggctagtttaaccgatagcagtgagaaagagaaaagaattattcaagaattggcaatattcaagcgcattaaccattcttctgatcagggaatttcctcttatacaaaattgaaaggttgtaaagtcttacaccatactgccaaactcccagcagatctgcgactttctatttcagtaatagacagtagtgatgaagctactattcgtctggcaaacatgttgaaaatagaacagttaaagaccactagctgcttaaagcttgttttaaaagatattgaaaatgcattttattcacatgaagaggtaacacagcttatgttatgggtccttgagaatctatcttctcttaaaaatgagaatccaaatgtgcttgagtggttaacaccattaaaattcatccagatatcacaggaacagatggtatcagctggtgaactctttgaccctgatatagaagtactaaaggatctcttttgtaatgaagaaggaacctatttcccaccctcagtttttacctcaccagatattcttcactccttaagacagattggtttaaaaaacgaagccagtctcaaagaaaaggatgttgtgcaagtggcaaaaaaaattgaagccttacaggtcggtgcttgtcctgatcaagatgttcttctgaagaaagccaaaaccctcttactggttttaaataagaatcacacactgttgcaatcatctgaaggaaagatgacattgaagaaaataaaatgggttccagcctgcaaggaaaggcctccaaattatccaggctctttggtctggaaaggagatctctgtaatctctgtgcaccaccagatatgtgtgatgtaggccatgcaattctcattggctcctcacttcctcttgttgaaagtatccatgtaaacctggaaaaagcattagggatcttcacaaaacctagccttagtgctgtcttaaaacactttaaaattgttgttgattggtattcttcaaaaacctttagtgatgaagactactatcaattccagcatattttgcttgagatttacggattcatgcatgatcatctaaatgaagggaaagattcttttagagccttaaaatttccatgggtttggactggcaaaaagttttgtccacttgcccaggctgtgattaaaccaatccatgatcttgaccttcagccttatttgcataatgtacctaaaaccatggcaaaattccaccaactatttaaggtctgtggttcaatagaggagttgacatcagatcatatttccatggttattcagaagatatatctcaaaagtgaccaagatctcagtgaacaagaaagcaaacaaaatcttcatcttatgttgaatattatcagatggctgtatagcaatcagattccagcaagccccaacacaccagttcctatacatcatagcaaaaatccttctaaacttatcatgaagccaattcacgaatgctgttattgtgacattaaagttgatgaccttaatgacttacttgaagattctgtggaaccaatcattttggtgcatgaggacatacccatgaaaactgcagaatggctaaaagttccatgccttagtacaagactgataaatcctgaaaacatgggatttgagcagtcaggacaaagagagccacttactgtaagaattaaaaatattctggaagaatacccttcagtgtcagatatttttaaagaactacttcaaaacgctgatgatgcaaatgcaacagaatgcagtttcttgattgatatgagaagaaatatggacataagagagaatctcctagacccagggatggcagcttgtcatggacctgctttgtggtcattcaacaattctcaattctcagattcagattttgtgaacataactaggttaggagaatctttaaaaaggggagaagttgacaaagttggaaaatttggtcttggatttaattctgtgtaccatatcactgacattcccatcattatgagtcgggaattcatgataatgttcgatccaaacataaatcatatcagtaaacacattaaagacaaatccaatcctgggatcaaaattaattggagtaaacaacagaaaagacttagaaaatttcctaatcagttcaaaccatttatagatgtatttggctgtcagttacctttgactgtagaagcaccttacagctataatggaacccttttccgactgtcctttagaactcaacaggaagcaaaagtgagtgaagttagtagtacgtgctacaatacagcagatatttattctcttgtggatgaatttagtctctgtggacacaggcttatcattttcactcagagtgtaaagtcaatgtatttgaagtacttgaaaattgaggaaaccaaccccagtttagcacaagatacagtaataattaaaaaaaaatcctgctcttccaaagcattgaacacacctgtcttaagtgttttaaaagaggctgctaagctcatgaagacttgcagcagcagtaataaaaagcttcccagtgatgaaccaaagtcatcttgcattcttcagatcacagtggaagaatttcaccatgtgttcagaaggattgctgatttacagtcgccactttttagaggtccagatgatgacccagctgctctctttgaaatggctaagtctggccaatcaaaaaagccatcagatgagttgtcacagaaaacagtagagtgtaccacgtggcttctgtgtacttgcatggacacaggagaggctctgaagttttccctgagtgagagtggaagaagactaggactggttccatgtggggcagtaggagttcagctgtcagaaatccaggaccagaagtggacagtgaaaccacacattggagaggtgttttgctatttacctttacgaataaaaacaggcttgccagttcatatcaatgggtgctttgctgttacatcaaataggaaagaaatctggaaaacagatacaaaaggacgatggaataccacgttcatgagacatgttattgtgaaagcttacttacaggtactgagtgtcttacgggacctggccactagtggggagctaatggattatacttactatgcagtatggcccgatcctgatttagttcatgatgatttttctgtaatttgccaaggattttatgaagatatagctcatggaaaagggaaagaactgaccaaagtcttctctgatggatctacttgggtttccatgaagaacgtaagatttctagatgactctatacttaaaagaagagatgttggttcagcagccttcaagatatttttgaaatacctcaagaagactgggtccaaaaacctttgtgctgttgaacttccttcttcggtaaaattaggatttgaagaagctggctgcaaacagatactacttgaaaacacattttcagagaaacagtttttttctgaagtgttttttccaaatattcaagaaattgaagcagaacttagagatcctttaatgatctttgttctaaatgaaaaagttgatgagttctcgggagttcttcgtgttactccatgtattccttgttccttggaggggcatcctttggttttgccatcaagattgatccaccccgaaggacgagttgcaaagttatttgatattaaagatgggagattcccttatggttctactcaggattatctcaatcctattattttgattaaactagttcagttaggtatggcaaaagatgatattttatgggatgatatgctagaacgtgcagtgtcagtagctgaaattaataaaagtgatcatgttgctgcatgcctaagaagtagtatcttattgagtcttatcgatgagaaactaaaaataagggatcctagagcaaaggattttgctgcaaaatatcaaacaatccgcttccttccatttctgacaaaaccagcaggtttttctttggactggaaaggcaacagttttaagcctgaaaccatgtttgcagcaactgacctttatacagctgaacatcaagatatagtttgtcttttgcaaccaattctaaatgaaaattcccattcttttagaggttgtggttcagtgtcattggctgttaaagagtttttgggattactcaagaagccaacagttgatctggttataaaccaattgaaagaagtagcaaaatcagttgatgatggaattacactgtaccaggagaatatcaccaatgcttgctacaaataccttcatgaagccttgatgcaaaatgaaatcactaagatgtcaattattgataagttaaaaccctttagcttcattctagttgagaatgcatatgttgactcagaaaaggtttcttttcatttaaattttgaggcggcaccatacctttatcagttgcctaataagtataaaaataatttccgcgaactttttgaaaccgtgggtgtgaggcagtcatgcactgttgaagattttgctcttgttttggaatctattgatcaagaaagaggaacaaagcaaataacagaagagaattttcagctttgccgacgaataatcagtgaaggaatatggagtctcattagagaaaagaaacaagaattttgtgagaaaaattatggcaagatattattgccagatactaatcttatgcttctccctgctaaatcgttatgctacaatgattgcccttggataaaagtaaaggataccactgtaaaatattgtcatgctgacatacccagggaagtagcagtaaaactaggagcagtcccaaagcgacacaaagccttagaaagatatgcatccaatgtctgttttacaacacttggcacagaatttgggcagaaagaaaaattgaccagcagaattaagagcatccttaatgcatatccttctgaaaaggaaatgttgaaagagcttcttcaaaatgctgatgatgcaaaggcgacagaaatctgttttgtgtttgatcctagacagcatccagttgatagaatatttgatgataagtgggccccattgcaagggccagcactttgtgtgtacaacaaccagccatttacagaagatgatgttagaggaattcagaatcttggaaaaggcacgaaagagggaaatccttataaaactggacagtatggaataggattcaattctgtgtatcatatcacagactgcccatcttttatttctggcaatgacatcctgtgtatttttgatcctcatgccagatatgcaccaggggccacatccattagtcccggacgcatgtttagagatttggatgcagattttaggacacagttctcagatgttctggatctttatctgggaacccattttaaactggataattgcacaatgttcagatttcctcttcgtaatgcagaaatggcaaaagtttcggaaatttcgtctgttccagcatcagacagaatggtccagaatcttttggacaaactgcgctcagatggggcagaacttctaatgtttcttaatcacatggaaaaaatttctatttgtgaaatagataagagtactggagctctaaatgtgctgtattcagtaaagggcaaaatcacagatggagacagattgaaaaggaaacaatttcatgcatctgtaattgatagtgttactaaaaagaggcagctcaaagacataccagttcaacaaataacctatactatggatactgaggactctgaaggaaatcttactacgtggctaatttgtaatagatcaggcttttcaagtatggagaaagtatctaaaagtgtcatatcagctcacaagaaccaagatattactcttttcccacgtggtggagtagctgcctgcattactcacaactataaaaaaccccatagggccttctgttttttgcctctttctttggagactgggctgccatttcatgtgaatggccactttgcactggattcagccagaaggaacctgtggcgtgatgataatggagttggtgttcgaagtgactggaataacagtttaatgacagcattaatagctcctgcatatgttgaattgctaatacagttaaaaaaacggtatttccctggttctgatccaacattatcagtgttacagaacacccctattcatgttgtaaaggacactttaaagaagtttttatcgtttttcccagttaaccgtcttgatctacagccagatttatattgtctagtgaaagcactttacaattgcattcacgaagacatgaaacgtcttttacctgttgtgcgggctccaaatattgatggctctgacttgcactctgcagttataattacttggatcaatatgtctacttctaataaaactagaccattttttgacaatttactacaggatgaattacaacaccttaaaaatgcagattataatatcaccacacgcaaaacagtagcagagaatgtctataggctgaaacatctccttttagaaattggtttcaacttggtttataactgtgatgaaactgctaatctttaccactgtcttatagatgcagatattcctgttagttatgtgacccctgctgatatcagatcttttttaatgacattttcctctcctgacactaattgccatattgggaagctgccttgtcgtctgcagcagactaatctaaaactttttcatagtttaaaacttttagttgattattgttttaaagatgcagaagaaaatgagattgaagttgagggattgccccttctcatcacactggacagtgttttgcaaacttttgatgcaaaacgacccaagtttctaacaacatatcatgaattgattccatcccgcaaagacttgtttatgaatacattatatttgaaatatagtaatattttattgaactgtaaagttgcaaaagtgtttgacatttccagctttgctgatttgttatcctctgtgttgcctcgagaatataagaccaaaagttgcacaaagtggaaagacaattttgcaagtgagtcttggcttaagaatgcatggcattttattagtgaatctgtaagtgtgaaagaagatcaggaagaaacaaaaccaacatttgacattgttgttgatactctaaaagactgggcattgcttccaggaacaaagtttactgtttcagccaaccagcttgtggttcctgaaggagatgttctgcttcctctcagccttatgcacattgcagtttttccaaatgcccagagtgataaagtttttcatgctctaatgaaagctggctgtattcagcttgctttgaacaaaatctgttccaaagacagtgcatttgttcctttgttgtcatgtcacacagcaaatatagagagccccacaagcatcttgaaggctctacattatatggtccaaacttcaacatttagagcagaaaaattagtagaaaatgattttgaggcacttttgatgtatttcaactgcaatttgaatcatttgatgtcccaagatgatataaaaattctaaagtcacttccgtgctataaatccatcagtggccgctatgtaagcattggaaaatttggaacatgctacgtacttacaaaaagtatcccttcagctgaagtggagaaatggacacagtcatcatcatctgcatttcttgaagaaaaaatacacttaaaagaactatatgaggtgattggttgtgtacctgtagatgatcttgaggtatatttgaaacacctcttaccaaaaattgaaaatctctcttatgatgcaaaattagagcacttgatctaccttaagaatagattatcaagtgctgaggaattatcagagattaaggaacaactttttgaaaaactggaaagtttattgataatccatgatgctaacagtagactaaagcaagcaaagcatttctatgatagaactgtgagagtttttgaagttatgcttcctgaaaaattgtttattcctaatgatttctttaagaaattggaacaacttataaaacccaaaaatcatgttacatttatgacatcctgggtggaattcttaagaaatattggactaaaatacatactttctcagcagcagttgttacagtttgctaaggaaatcagtgtgagggctaatacagaaaactggtccaaagaaacattgcaaaatacagttgatatccttctgcatcatatattccaagaacgaatggatttgttatctggaaattttctgaaagaactatctttaataccattcttatgtcctgagcgggcccccgcggaattcattagatttcatcctcaatatcaagaggtaaatggaacacttcctcttataaagttcaatggagcacaggtaaatccaaaattcaagcaatgtgatgtactccagctgttatggacatcctgccctattcttccagagaaagctacacccttaagcattaaagaacaagaaggtagtgaccttggtccacaagaacagcttgaacaagttttaaatatgcttaatgttaacctggatcctcctcttgataaggtaatcaataactgcagaaacatatgcaacataacgacgttggatgaagaaatggtaaaaactagagcaaaagtcttaaggagcatatatgaattcctcagtgcagaaaaaagggaatttcgttttcagttgcgaggggttgcttttgtgatggtagaagatggttggaaacttctgaagcctgaggaggtagtcataaacctagaatatgaatctgattttaaaccttatttgtacaagctacctttagaacttggcacatttcaccagttgttcaaacacttaggtactgaagatattatttcaactaagcaatatgttgaagtgttgagccgcatatttaaaaattctgagggcaaacaattagatcctaatgaaatgcgtacagttaagagagtagtttctggtctgttcaggagtctacagaatgattcagtcaaggtgaggagtgatctcgagaatgtacgagaccttgcgctttacctcccaagccaggatggtagattggtaaagtcaagcatcttagtgtttgacgatgcgccacattataaaagtagaatccaggggaatattggtgtgcaaatgttagttgatctcagccagtgctacttagggaaagaccatggatttcacactaagttgataatgctctttcctcaaaaacttagacctcgattattgagcagtatacttgaagaacaattagatgaagagactcccaaagtttgtcagtttggagcgttgtgttctcttcaaggaagattgcagttactcttgtcttctgaacagttcattacaggactgattagaattatgaagcatgaaaatgataatgcttttctggccaatgaagaaaaagccataagactttgcaaagccctaagagaaggattgaaagtatcctgctttgaaaagcttcaaacaacattaagagttaaaggttttaatcctattccccacagcagaagtgaaacttttgcttttttgaagcgatttggtaatgcagtcatcttgctctacattcaacattcagacagtaaagacattaatttcctgttagcattggcaatgactcttaaatcagcaactgacaatttgatttctgacacttcatatttaattgctatgctaggatgcaatgatatttacaggattggtgagaaacttgacagtttaggagtgaaatatgactcttcggagccatcaaaactggaacttccaatgcctggcacaccaattcctgctgaaattcattacactctgcttatggacccaatgaatgttttttacccgggagaatatgttgggtaccttgttgatgctgaaggtggtgatatctatggatcataccagccaacatacacatatgcaattattgtacaagaagttgaaagagaagatgctgacaattctagttttctaggaaagatatatcagatagatattggttatagtgaatataaaatagttagctctcttgatctgtataagttttcaagacctgaggaaagctctcaaagcagggacagtgctccttctacaccaaccagccccactgagttcctcacccctggcctgagaagcattcctcctcttttctctggtagagagagccacaagacttcttccaaacatcagtcccccaaaaagcttaaggttaattctttaccagaaatcttaaaagaagtgacatctgtggtggagcaagcatggaagcttccagaatcggaacgaaaaaagattattaggcggttgtatttgaaatggcatcctgacaaaaatccagagaaccatgacattgccaatgaagtttttaaacatttgcagaatgaaatcaacagattagaaaaacaggcttttctagatcaaaatgcagacagggcctccagacgaacattttcaacctcagcatcccgatttcagtcagacaaatactcatttcagagattctatacttcatggaatcaagaagcaacgagccataaatctgaaagacagcaacagaacaaagaaaaatgccccccttcagccggacagacttactctcaaaggttctttgttcctcccactttcaagtcggttggcaatccagtggaagcacgcagatggctaagacaagccagagcaaacttctcagctgccaggaatgaccttcataaaaatgccaatgagtgggtgtgctttaaatgttacctttctaccaagttagctttgattgcagctgactatgctgtgaggggaaagtctgataaagatgtaaaaccaactgcacttgctcagaaaatagaggaatatagtcagcaacttgaaggactgacaaatgatgttcacacattggaagcttatggtgtagacagtttaaaaacaagataccctgatttgcttccctttcctcagatcccaaatgacaggttcacttctgaggttgctatgagggtgatggaatgtactgcctgtatcataataaaacttgaaaattttatgcaacaaaaagtgtgaagatatttaacgaaaaaaaaggtagatcttgaatgtgttgtagcacgaataaattgctgtacttcattaagcttcattgccaattagctaggaattgttaagcacattgcagattgttcttggagaattctggagttgttatgaacatgaataccaacggaaaaccttaactgaatctaaaagaaaactattttgaagatggtggtgagctgcaaaatagctggatggatttgaatgattgggatgatacatcattgaactgcactttatataaccaaagcttagcagtttgttagataagagtctatgtatgtctctggttaggatgaagttaattttatgtttttaacatggtatttttgaaggagctaatgaaacactggacatataattggtttaaacataaggggaattaagtctttgtagtctgtcatttttttaagtggatcctcttggatgcgttattttctcatcagctggctctgatcatgaatttgttgtaattttatgttgtactcagtgcatttaagaaatggtagagtattttaatcctattacttgactaagagtgtgaaggtagtactttttagagtgcactgagtgcactttacatctttatttaaatttttttttaacatcttatgtttacaggcttcctgtttgatgaagatagcaacggaaaactcaaaatggtggcagttcttattaccagttgttagtattgtttctggaaactgcttgccaagacaacatttattaactgttagaacacttgctttatgtttgtgtgtacatattttccacaaatgttataatttatatagtgtggttgaacaggatgcaatcttttgttgtctaaaggtgctgcagttaaaaaaaaaacaaccttttctttcaatatggcatgtagtggagtttttttaactttaaaaacatcaaaaattgttaaaatcattgtgttatctagtagtttataattatcggcttatatttccccatgaatgatcagaactgacatttaattcatgtttgtctcgccatgcttctttactttaacatatttcttttgcagaatgtaaaaggtaatgataattagtttatataagtgtactggctgtaaatgatgctaaatatactttatgcaattaagggcttacagaacatgttgaaactttttttacttttattgggaataaggaatgtttgcacctccacattttattgcttctggatgtgaaatcatgtaattatttctgctgttatataaagtgccatacttttaataaaggaaaatgtacatatgaaatcatcgt

SEQ ID NO: 178775 - DNA, 15134 bp, Homo sapiens
  Payload ID: 15240
  Gene Symbol: SACS
  Gene Name: sacsin molecular chaperone
  Uniprot ID: Q9NZJ4
  ENST ID: ENST00000402364
  CDS Start-End: 2335-13824
ctgctcctcggccgccgcggcttcctctagcgtttcctcctcggcgcgggctgctgcgtacgggactgcgccatgcggatcccgccctcccggcccgcgcggggcctgtggacgcggtagggccggccgtgatcgggcgccggcgtcaggggcgggcgctaggggcgcctgccgcgccgcgatgtgggagaggtgggtcccggtgaccgtgctccccggctgcgtgggctgcaggaccgtcgcggcgctggcgtcctggaccgtgcgcgatgtgaaggaacgtatcttcgcggagactggcttcccggtgtcggagcagcggctgtggcgcggcggccgcgaggtcgatttggtcagacaacgccaccacttgttgattttctcaaggacattttgagaagatatccagaaggaggacagattcttaaggaattaattcagaatgcagaagatgctggggcgacagaagttaaatttttatatgatgaaactcaatacggaacagagactctttggtcaaaagatatggcgccatatcaggggccagctctctatgtgtacaacaacgcggttttcaccccagaggactggcacggcattcaagaaatagcaagaagcaggaaaaaggatgatcctctgaaggtcggaagatttggaattgggtttaattctgtctatcatataacagatgttccttgtatctttagtggtgaccaaatcgggatgctagatcctcatcaaacactttttggcccacatgaatcaggccaatgttggaatctcaaagatgacagcaaagaaattagtgaactttcagaccagtttgcaccatttgttggcatttttggaagcaccaaggaaacatttataaacggcaattttccaggaacatttttccgtttccctcttcgcctacaaccttcacaacttagtagtaacctctacaataagcagaaggttcttgagttgtttgagtcttttagggcagatgcagacacagtgctgctctttctgaaaagtgtgcaggatgtttccttatatgtccgagaggctgacggaacagagaaactggtgtttagagtgacttcgagtgagagtaaggcactgaaacatgagcggccgaattctataaagattctgggaactgctataagtaactattgtaaaaagactccaagcaataacatcacctgtgtaacatatcacgtaaatattgttttagaagaggagagtactaaggatgcacagaaaacatcttggttggtgtgtaacagtgtgggtgggcgagggatcagtagtaagcttgactctttagctgatgaactgaaatttgtcccaatcattggaatagccatgcctttatcaagcagagatgatgaagcaaaaggagcaacgtctgatttctcaggaaaagcattttgtttccttcctttaccacctggtgaggaaagcagcacaggcctcccagttcacatcagtgggttctttggccttactgataaccgcaggagcataaaatggagagagctggaccagtggagagacccggcagccttatggaatgagtttcttgtcatgaatgttgtccccaaagcttatgctactctgatcttagattcaataaaacgtctggagatggaaaagagctctgatttccccttgtcagttgatgttatctataagctttggccggaggcgagcaaagtcaaggtgcactggcaaccggtgttagagcctctattcagcgagctgttgcagaatgcagtgatttattcaattagctgtgactgggtcaggttggagcaggtgtacttctcagaacttgatgaaaatttagaatacacaaaaactgtgctcaactacctccagagctcagggaagcagattgccaaggtaccagggaatgtggatgctgctgttcagctcacagctgcctctggcacaacacctgtgaggaaggtgacgcccgcgtgggtgcggcaggtgctgcggaagtgtgcacacctgggctgtgctgaagaaaagcttcaccttctagaatttgtgctttctgaccaagcctacagtgagctgcttgggctggagctgctccctttacaaaatggcaattttgtccccttctcctcatctgtatcagaccaagatgtcatttatattacctcagcagaatatccaaggtcccttttcccaagtcttgaaggaagatttattttggataacttgaaacctcaccttgtggctgctttaaaggaagctgcccaaacccgaggaagaccatgtactcagctgcagcttctaaatccagaacgatttgcacgtcttatcaaggaagtaatgaatacattctggcctggcagagaattgattgttcaatggtatccatttgatgaaaacagaaatcacccatctgtttcatggcttaagatggtttggaaaaatctttatatacatttttcagaggatttgactttatttgatgagatgccacttatccccagaactatactagaggaaggtcagacatgtgtggaactcattagactcaggattccatcgttagtcattttagacgatgaatctgaagcacagcttccagaatttttagcagacattgtacaaaaacttggagggtttgtccttaaaaaattagatgcatctatacaacatccgcttattaaaaaatatattcattcaccattaccaagtgctgttttgcagataatggagaagatgccattgcagaaattgtgtaatcaaataacttcgctacttccaacacacaaagatgccctgaggaagttcttggctagtttaaccgatagcagtgagaaagagaaaagaattattcaagaattggcaatattcaagcgcattaaccattcttctgatcagggaatttcctcttatacaaaattgaaaggttgtaaagtcttacaccatactgccaaactcccagcagatctgcgactttctatttcagtaatagacagtagtgatgaagctactattcgtctggcaaacatgttgaaaatagaacagttaaagaccactagctgcttaaagcttgttttaaaagatattgaaaatgcattttattcacatgaagaggtaacacagcttatgttatgggtccttgagaatctatcttctcttaaaaatgagaatccaaatgtgcttgagtggttaacaccattaaaattcatccagatatcacaggaacagatggtatcagctggtgaactctttgaccctgatatagaagtactaaaggatctcttttgtaatgaagaaggaacctatttcccaccctcagtttttacctcaccagatattcttcactccttaagacagattggtttaaaaaacgaagccagtctcaaagaaaaggatgttgtgcaagtggcaaaaaaaattgaagccttacaggtcggtgcttgtcctgatcaagatgttcttctgaagaaagccaaaaccctcttactggttttaaataagaatcacacactgttgcaatcatctgaaggaaagatgacattgaagaaaataaaatgggttccagcctgcaaggaaaggcctccaaattatccaggctctttggtctggaaaggagatctctgtaatctctgtgcaccaccagatatgtgtgatgtaggccatgcaattctcattggctcctcacttcctcttgttgaaagtatccatgtaaacctggaaaaagcattagggatcttcacaaaacctagccttagtgctgtcttaaaacactttaaaattgttgttgattggtattcttcaaaaacctttagtgatgaagactactatcaattccagcatattttgcttgagatttacggattcatgcatgatcatctaaatgaagggaaagattcttttagagccttaaaatttccatgggtttggactggcaaaaagttttgtccacttgcccaggctgtgattaaaccaatccatgatcttgaccttcagccttatttgcataatgtacctaaaaccatggcaaaattccaccaactatttaaggtctgtggttcaatagaggagttgacatcagatcatatttccatggttattcagaagatatatctcaaaagtgaccaagatctcagtgaacaagaaagcaaacaaaatcttcatcttatgttgaatattatcagatggctgtatagcaatcagattccagcaagccccaacacaccagttcctatacatcatagcaaaaatccttctaaacttatcatgaagccaattcacgaatgctgttattgtgacattaaagttgatgaccttaatgacttacttgaagattctgtggaaccaatcattttggtgcatgaggacatacccatgaaaactgcagaatggctaaaagttccatgccttagtacaagactgataaatcctgaaaacatgggatttgagcagtcaggacaaagagagccacttactgtaagaattaaaaatattctggaagaatacccttcagtgtcagatatttttaaagaactacttcaaaacgctgatgatgcaaatgcaacagaatgcagtttcttgattgatatgagaagaaatatggacataagagagaatctcctagacccagggatggcagcttgtcatggacctgctttgtggtcattcaacaattctcaattctcagattcagattttgtgaacataactaggttaggagaatctttaaaaaggggagaagttgacaaagttggaaaatttggtcttggatttaattctgtgtaccatatcactgacattcccatcattatgagtcgggaattcatgataatgttcgatccaaacataaatcatatcagtaaacacattaaagacaaatccaatcctgggatcaaaattaattggagtaaacaacagaaaagacttagaaaatttcctaatcagttcaaaccatttatagatgtatttggctgtcagttacctttgactgtagaagcaccttacagctataatggaacccttttccgactgtcctttagaactcaacaggaagcaaaagtgagtgaagttagtagtacgtgctacaatacagcagatatttattctcttgtggatgaatttagtctctgtggacacaggcttatcattttcactcagagtgtaaagtcaatgtatttgaagtacttgaaaattgaggaaaccaaccccagtttagcacaagatacagtaataattaaaaaaaaatcctgctcttccaaagcattgaacacacctgtcttaagtgttttaaaagaggctgctaagctcatgaagacttgcagcagcagtaataaaaagcttcccagtgatgaaccaaagtcatcttgcattcttcagatcacagtggaagaatttcaccatgtgttcagaaggattgctgatttacagtcgccactttttagaggtccagatgatgacccagctgctctctttgaaatggctaagtctggccaatcaaaaaagccatcagatgagttgtcacagaaaacagtagagtgtaccacgtggcttctgtgtacttgcatggacacaggagaggctctgaagttttccctgagtgagagtggaagaagactaggactggttccatgtggggcagtaggagttcagctgtcagaaatccaggaccagaagtggacagtgaaaccacacattggagaggtgttttgctatttacctttacgaataaaaacaggcttgccagttcatatcaatgggtgctttgctgttacatcaaataggaaagaaatctggaaaacagatacaaaaggacgatggaataccacgttcatgagacatgttattgtgaaagcttacttacaggtactgagtgtcttacgggacctggccactagtggggagctaatggattatacttactatgcagtatggcccgatcctgatttagttcatgatgatttttctgtaatttgccaaggattttatgaagatatagctcatggaaaagggaaagaactgaccaaagtcttctctgatggatctacttgggtttccatgaagaacgtaagatttctagatgactctatacttaaaagaagagatgttggttcagcagccttcaagatatttttgaaatacctcaagaagactgggtccaaaaacctttgtgctgttgaacttccttcttcggtaaaattaggatttgaagaagctggctgcaaacagatactacttgaaaacacattttcagagaaacagtttttttctgaagtgttttttccaaatattcaagaaattgaagcagaacttagagatcctttaatgatctttgttctaaatgaaaaagttgatgagttctcgggagttcttcgtgttactccatgtattccttgttccttggaggggcatcctttggttttgccatcaagattgatccaccccgaaggacgagttgcaaagttatttgatattaaagatgggagattcccttatggttctactcaggattatctcaatcctattattttgattaaactagttcagttaggtatggcaaaagatgatattttatgggatgatatgctagaacgtgcagtgtcagtagctgaaattaataaaagtgatcatgttgctgcatgcctaagaagtagtatcttattgagtcttatcgatgagaaactaaaaataagggatcctagagcaaaggattttgctgcaaaatatcaaacaatccgcttccttccatttctgacaaaaccagcaggtttttctttggactggaaaggcaacagttttaagcctgaaaccatgtttgcagcaactgacctttatacagctgaacatcaagatatagtttgtcttttgcaaccaattctaaatgaaaattcccattcttttagaggttgtggttcagtgtcattggctgttaaagagtttttgggattactcaagaagccaacagttgatctggttataaaccaattgaaagaagtagcaaaatcagttgatgatggaattacactgtaccaggagaatatcaccaatgcttgctacaaataccttcatgaagccttgatgcaaaatgaaatcactaagatgtcaattattgataagttaaaaccctttagcttcattctagttgagaatgcatatgttgactcagaaaaggtttcttttcatttaaattttgaggcggcaccatacctttatcagttgcctaataagtataaaaataatttccgcgaactttttgaaaccgtgggtgtgaggcagtcatgcactgttgaagattttgctcttgttttggaatctattgatcaagaaagaggaacaaagcaaataacagaagagaattttcagctttgccgacgaataatcagtgaaggaatatggagtctcattagagaaaagaaacaagaattttgtgagaaaaattatggcaagatattattgccagatactaatcttatgcttctccctgctaaatcgttatgctacaatgattgcccttggataaaagtaaaggataccactgtaaaatattgtcatgctgacatacccagggaagtagcagtaaaactaggagcagtcccaaagcgacacaaagccttagaaagatatgcatccaatgtctgttttacaacacttggcacagaatttgggcagaaagaaaaattgaccagcagaattaagagcatccttaatgcatatccttctgaaaaggaaatgttgaaagagcttcttcaaaatgctgatgatgcaaaggcgacagaaatctgttttgtgtttgatcctagacagcatccagttgatagaatatttgatgataagtgggccccattgcaagggccagcactttgtgtgtacaacaaccagccatttacagaagatgatgttagaggaattcagaatcttggaaaaggcacgaaagagggaaatccttataaaactggacagtatggaataggattcaattctgtgtatcatatcacagactgcccatcttttatttctggcaatgacatcctgtgtatttttgatcctcatgccagatatgcaccaggggccacatccattagtcccggacgcatgtttagagatttggatgcagattttaggacacagttctcagatgttctggatctttatctgggaacccattttaaactggataattgcacaatgttcagatttcctcttcgtaatgcagaaatggcaaaagtttcggaaatttcgtctgttccagcatcagacagaatggtccagaatcttttggacaaactgcgctcagatggggcagaacttctaatgtttcttaatcacatggaaaaaatttctatttgtgaaatagataagagtactggagctctaaatgtgctgtattcagtaaagggcaaaatcacagatggagacagattgaaaaggaaacaatttcatgcatctgtaattgatagtgttactaaaaagaggcagctcaaagacataccagttcaacaaataacctatactatggatactgaggactctgaaggaaatcttactacgtggctaatttgtaatagatcaggcttttcaagtatggagaaagtatctaaaagtgtcatatcagctcacaagaaccaagatattactcttttcccacgtggtggagtagctgcctgcattactcacaactataaaaaaccccatagggccttctgttttttgcctctttctttggagactgggctgccatttcatgtgaatggccactttgcactggattcagccagaaggaacctgtggcgtgatgataatggagttggtgttcgaagtgactggaataacagtttaatgacagcattaatagctcctgcatatgttgaattgctaatacagttaaaaaaacggtatttccctggttctgatccaacattatcagtgttacagaacacccctattcatgttgtaaaggacactttaaagaagtttttatcgtttttcccagttaaccgtcttgatctacagccagatttatattgtctagtgaaagcactttacaattgcattcacgaagacatgaaacgtcttttacctgttgtgcgggctccaaatattgatggctctgacttgcactctgcagttataattacttggatcaatatgtctacttctaataaaactagaccattttttgacaatttactacaggatgaattacaacaccttaaaaatgcagattataatatcaccacacgcaaaacagtagcagagaatgtctataggctgaaacatctccttttagaaattggtttcaacttggtttataactgtgatgaaactgctaatctttaccactgtcttatagatgcagatattcctgttagttatgtgacccctgctgatatcagatcttttttaatgacattttcctctcctgacactaattgccatattgggaagctgccttgtcgtctgcagcagactaatctaaaactttttcatagtttaaaacttttagttgattattgttttaaagatgcagaagaaaatgagattgaagttgagggattgccccttctcatcacactggacagtgttttgcaaacttttgatgcaaaacgacccaagtttctaacaacatatcatgaattgattccatcccgcaaagacttgtttatgaatacattatatttgaaatatagtaatattttattgaactgtaaagttgcaaaagtgtttgacatttccagctttgctgatttgttatcctctgtgttgcctcgagaatataagaccaaaagttgcacaaagtggaaagacaattttgcaagtgagtcttggcttaagaatgcatggcattttattagtgaatctgtaagtgtgaaagaagatcaggaagaaacaaaaccaacatttgacattgttgttgatactctaaaagactgggcattgcttccaggaacaaagtttactgtttcagccaaccagcttgtggttcctgaaggagatgttctgcttcctctcagccttatgcacattgcagtttttccaaatgcccagagtgataaagtttttcatgctctaatgaaagctggctgtattcagcttgctttgaacaaaatctgttccaaagacagtgcatttgttcctttgttgtcatgtcacacagcaaatatagagagccccacaagcatcttgaaggctctacattatatggtccaaacttcaacatttagagcagaaaaattagtagaaaatgattttgaggcacttttgatgtatttcaactgcaatttgaatcatttgatgtcccaagatgatataaaaattctaaagtcacttccgtgctataaatccatcagtggccgctatgtaagcattggaaaatttggaacatgctacgtacttacaaaaagtatcccttcagctgaagtggagaaatggacacagtcatcatcatctgcatttcttgaagaaaaaatacacttaaaagaactatatgaggtgattggttgtgtacctgtagatgatcttgaggtatatttgaaacacctcttaccaaaaattgaaaatctctcttatgatgcaaaattagagcacttgatctaccttaagaatagattatcaagtgctgaggaattatcagagattaaggaacaactttttgaaaaactggaaagtttattgataatccatgatgctaacagtagactaaagcaagcaaagcatttctatgatagaactgtgagagtttttgaagttatgcttcctgaaaaattgtttattcctaatgatttctttaagaaattggaacaacttataaaacccaaaaatcatgttacatttatgacatcctgggtggaattcttaagaaatattggactaaaatacatactttctcagcagcagttgttacagtttgctaaggaaatcagtgtgagggctaatacagaaaactggtccaaagaaacattgcaaaatacagttgatatccttctgcatcatatattccaagaacgaatggatttgttatctggaaattttctgaaagaactatctttaataccattcttatgtcctgagcgggcccccgcggaattcattagatttcatcctcaatatcaagaggtaaatggaacacttcctcttataaagttcaatggagcacaggtaaatccaaaattcaagcaatgtgatgtactccagctgttatggacatcctgccctattcttccagagaaagctacacccttaagcattaaagaacaagaaggtagtgaccttggtccacaagaacagcttgaacaagttttaaatatgcttaatgttaacctggatcctcctcttgataaggtaatcaataactgcagaaacatatgcaacataacgacgttggatgaagaaatggtaaaaactagagcaaaagtcttaaggagcatatatgaattcctcagtgcagaaaaaagggaatttcgttttcagttgcgaggggttgcttttgtgatggtagaagatggttggaaacttctgaagcctgaggaggtagtcataaacctagaatatgaatctgattttaaaccttatttgtacaagctacctttagaacttggcacatttcaccagttgttcaaacacttaggtactgaagatattatttcaactaagcaatatgttgaagtgttgagccgcatatttaaaaattctgagggcaaacaattagatcctaatgaaatgcgtacagttaagagagtagtttctggtctgttcaggagtctacagaatgattcagtcaaggtgaggagtgatctcgagaatgtacgagaccttgcgctttacctcccaagccaggatggtagattggtaaagtcaagcatcttagtgtttgacgatgcgccacattataaaagtagaatccaggggaatattggtgtgcaaatgttagttgatctcagccagtgctacttagggaaagaccatggatttcacactaagttgataatgctctttcctcaaaaacttagacctcgattattgagcagtatacttgaagaacaattagatgaagagactcccaaagtttgtcagtttggagcgttgtgttctcttcaaggaagattgcagttactcttgtcttctgaacagttcattacaggactgattagaattatgaagcatgaaaatgataatgcttttctggccaatgaagaaaaagccataagactttgcaaagccctaagagaaggattgaaagtatcctgctttgaaaagcttcaaacaacattaagagttaaaggttttaatcctattccccacagcagaagtgaaacttttgcttttttgaagcgatttggtaatgcagtcatcttgctctacattcaacattcagacagtaaagacattaatttcctgttagcattggcaatgactcttaaatcagcaactgacaatttgatttctgacacttcatatttaattgctatgctaggatgcaatgatatttacaggattggtgagaaacttgacagtttaggagtgaaatatgactcttcggagccatcaaaactggaacttccaatgcctggcacaccaattcctgctgaaattcattacactctgcttatggacccaatgaatgttttttacccgggagaatatgttgggtaccttgttgatgctgaaggtggtgatatctatggatcataccagccaacatacacatatgcaattattgtacaagaagttgaaagagaagatgctgacaattctagttttctaggaaagatatatcagatagatattggttatagtgaatataaaatagttagctctcttgatctgtataagttttcaagacctgaggaaagctctcaaagcagggacagtgctccttctacaccaaccagccccactgagttcctcacccctggcctgagaagcattcctcctcttttctctggtagagagagccacaagacttcttccaaacatcagtcccccaaaaagcttaaggttaattctttaccagaaatcttaaaagaagtgacatctgtggtggagcaagcatggaagcttccagaatcggaacgaaaaaagattattaggcggttgtatttgaaatggcatcctgacaaaaatccagagaaccatgacattgccaatgaagtttttaaacatttgcagaatgaaatcaacagattagaaaaacaggcttttctagatcaaaatgcagacagggcctccagacgaacattttcaacctcagcatcccgatttcagtcagacaaatactcatttcagagattctatacttcatggaatcaagaagcaacgagccataaatctgaaagacagcaacagaacaaagaaaaatgccccccttcagccggacagacttactctcaaaggttctttgttcctcccactttcaagtcggttggcaatccagtggaagcacgcagatggctaagacaagccagagcaaacttctcagctgccaggaatgaccttcataaaaatgccaatgagtgggtgtgctttaaatgttacctttctaccaagttagctttgattgcagctgactatgctgtgaggggaaagtctgataaagatgtaaaaccaactgcacttgctcagaaaatagaggaatatagtcagcaacttgaaggactgacaaatgatgttcacacattggaagcttatggtgtagacagtttaaaaacaagataccctgatttgcttccctttcctcagatcccaaatgacaggttcacttctgaggttgctatgagggtgatggaatgtactgcctgtatcataataaaacttgaaaattttatgcaacaaaaagtgtgaagatatttaacgaaaaaaaaggtagatcttgaatgtgttgtagcacgaataaattgctgtacttcattaagcttcattgccaattagctaggaattgttaagcacattgcagattgttcttggagaattctggagttgttatgaacatgaataccaacggaaaaccttaactgaatctaaaagaaaactattttgaagatggtggtgagctgcaaaatagctggatggatttgaatgattgggatgatacatcattgaactgcactttatataaccaaagcttagcagtttgttagataagagtctatgtatgtctctggttaggatgaagttaattttatgtttttaacatggtatttttgaaggagctaatgaaacactggacatataattggtttaaacataaggggaattaagtctttgtagtctgtcatttttttaagtggatcctcttggatgcgttattttctcatcagctggctctgatcatgaatttgttgtaattttatgttgtactcagtgcatttaagaaatggtagagtattttaatcctattacttgactaagagtgtgaaggtagtactttttagagtgcactgagtgcactttacatctttatttaaatttttttttaacatcttatgtttacaggcttcctgtttgatgaagatagcaacggaaaactcaaaatggtggcagttcttattaccagttgttagtattgtttctggaaactgcttgccaagacaacatttattaactgttagaacacttgctttatgtttgtgtgtacatattttccacaaatgttataatttatatagtgtggttgaacaggatgcaatcttttgttgtctaaaggtgctgcagttaaaaaaaaaacaaccttttctttcaatatggcatgtagtggagtttttttaactttaaaaacatcaaaaattgttaaaatcattgtgttatctagtagtttataattatcggcttatatttccccatgaatgatcagaactgacatttaattcatgtttgtctcgccatgcttctttactttaacatatttcttttgcagaatgtaaaaggtaatgataattagtttatataagtgtactggctgtaaatgatgctaaatatactttatgcaattaagggcttacagaacatgttgaaactttttttacttttattgggaataaggaatgtttgcacctccacattttattgcttctggatgtgaaatcatgtaattatttctgctgttatataaagtgccatacttttaataaaggaaaatgtacatatgaaatcat

SEQ ID NO: 178776 - DNA, 1709 bp, Homo sapiens
  Payload ID: 15240
  Gene Symbol: SACS
  Gene Name: sacsin molecular chaperone
  ENST ID: ENST00000423156
  CDS Start-End: 1-1125
attgttttagaagaggagagtactaaggatgcacagaaaacatcttggttggtgtgtaacagtgtgggtgggcgagggatcagtagtaagcttgactctttagctgatgaactgaaatttgtcccaatcattggaatagccatgcctttatcaagcagagatgatgaagcaaaaggagcaacgtctgatttctcaggaaaagcattttgtttccttcctttaccacctggtgaggaaagcagcacaggcctcccagttcacatcagtgggttctttggccttactgataaccgcaggagcataaaatggagagagctggaccagtggagagacccggcagccttatggaatgagtttcttgtcatgaatgttgtccccaaagcttatgctactctgatcttagattcaataaaacgtctggagatggaaaagagctctgatttccccttgtcagttgatgttatctataagctttggccggaggcgagcaaagtcaaggtgcactggcaaccggtgttagagcctctattcagcgagctgttgcagaatgcagtgatttattcaattagctgtgactgggtcaggttggagcaggtgtacttctcagaacttgatgaaaatttagaatacacaaaaactgtgctcaactacctccagagctcagggaagcagattgccaaggtaccagggaatgtggatgctgctgttcagctcacagctgcctctggcacaacacctgtgaggaaggtgacgcccgcgtgggtgcggcaggtgctgcggaagtgtgcacacctgggctgtgctgaagaaaagcttcaccttctagaatttgtgctttctgaccaagcctacagtgagctgcttgggctggagctgctccctttacaaaatggcaattttgtccccttctcctcatctgtatcagaccaagatgtcatttatattacctcagcagaatatccaaggtcccttttcccaagtcttgaaggaagatttattttggataacttgaaacctcaccttgtggctgctttaaaggaagctgcccaaacccgaggcttcctgtttgatgaagatagcaacggaaaactcaaaatggtggcagttcttattaccagttgttagtattgtttctggaaactgcttgccaagacaacatttattaactgttagaacacttgctttatgtttgtgtgtacatattttccacaaatgttataatttatatagtgtggttgaacaggatgcaatcttttgttgtctaaaggtgctgcagttaaaaaaaaaacaaccttttctttcaatatggcatgtagtggagtttttttaactttaaaaacatcaaaaattgttaaaatcattgtgttatctagtagtttataattatcggcttatatttccccatgaatgatcagaactgacatttaattcatgtttgtctcgccatgcttctttactttaacatatttcttttgcagaatgtaaaaggtaatgataattagtttatataagtgtactggctgtaaatgatgctaaatatactttatgcaattaagggcttacagaacatgttgaaactttttttacttttattgggaataaggaatgtttgcacctccacattttattgcttctggatgtgaaatcatgtaattatttctgctgttatataaagtgccatacttttaataaaggaaaatgtacatatg

SEQ ID NO: 178777 - DNA, 2784 bp, Homo sapiens
  Payload ID: 15240
  Gene Symbol: SACS
  Gene Name: sacsin molecular chaperone
  ENST ID: ENST00000455470
  CDS Start-End: 1-2197
ggacattttgagaagatatccagaaggaggacagattcttaaggaattaattcagaatgcagaagatgctggggcgacagaagttaaatttttatatgatgaaactcaatacggaacagagactctttggtcaaaagatatggcgccatatcaggggccagctctctatgtgtacaacaacgcggttttcaccccagaggactggcacggcattcaagaaatagcaagaagcaggaaaaaggatgatcctctgaaggtcggaagatttggaattgggtttaattctgtctatcatataacagatgttccttgtatctttagtggtgaccaaatcgggatgctagatcctcatcaaacactttttggcccacatgaatcaggccaatgttggaatctcaaagatgacagcaaagaaattagtgaactttcagaccagtttgcaccatttgttggcatttttggaagcaccaaggaaacatttataaacggcaattttccaggaacatttttccgtttccctcttcgcctacaaccttcacaacttagtagtaacctctacaataagcagaaggttcttgagttgtttgagtcttttagggcagatgcagacacagtgctgctctttctgaaaagtgtgcaggatgtttccttatatgtccgagaggctgacggaacagagaaactggtgtttagagtgacttcgagtgagagtaaggcactgaaacatgagcggccgaattctataaagattctgggaactgctataagtaactattgtaaaaagactccaagcaataacatcacctgtgtaacatatcacgtaaatattgttttagaagaggagagtactaaggatgcacagaaaacatcttggttggtgtgtaacagtgtgggtgggcgagggatcagtagtaagcttgactctttagctgatgaactgaaatttgtcccaatcattggaatagccatgcctttatcaagcagagatgatgaagcaaaaggagcaacgtctgatttctcaggaaaagcattttgtttccttcctttaccacctggtgaggaaagcagcacaggcctcccagttcacatcagtgggttctttggccttactgataaccgcaggagcataaaatggagagagctggaccagtggagagacccggcagccttatggaatgagtttcttgtcatgaatgttgtccccaaagcttatgctactctgatcttagattcaataaaacgtctggagatggaaaagagctctgatttccccttgtcagttgatgttatctataagctttggccggaggcgagcaaagtcaaggtgcactggcaaccggtgttagagcctctattcagcgagctgttgcagaatgcagtgatttattcaattagctgtgactgggtcaggttggagcaggtgtacttctcagaacttgatgaaaatttagaatacacaaaaactgtgctcaactacctccagagctcagggaagcagattgccaaggtaccagggaatgtggatgctgctgttcagctcacagctgcctctggcacaacacctgtgaggaaggtgacgcccgcgtgggtgcggcaggtgctgcggaagtgtgcacacctgggctgtgctgaagaaaagcttcaccttctagaatttgtgctttctgaccaagcctacagtgagctgcttgggctggagctgctccctttacaaaatggcaattttgtccccttctcctcatctgtatcagaccaagatgtcatttatattacctcagcagaatatccaaggtcccttttcccaagtcttgaaggaagatttattttggataacttgaaacctcaccttgtggctgctttaaaggaagctgcccaaacccgaggaagaccatgtactcagctgcagcttctaaatccagaacgatttgcacgtcttatcaaggaagtaatgaatacattctggcctggcagagaattgattgttcaatggtatccatttgatgaaaacagaaatcacccatctgtttcatggcttaagatggtttggaaaaatctttatatacatttttcagaggatttgactttatttgatgagatgccacttatccccagaactatactagaggaaggcttcctgtttgatgaagatagcaacggaaaactcaaaatggtggcagttcttattaccagttgttagtattgtttctggaaactgcttgccaagacaacatttattaactgttagaacacttgctttatgtttgtgtgtacatattttccacaaatgttataatttatatagtgtggttgaacaggatgcaatcttttgttgtctaaaggtgctgcagttaaaaaaaaaacaaccttttctttcaatatggcatgtagtggagtttttttaactttaaaaacatcaaaaattgttaaaatcattgtgttatctagtagtttataattatcggcttatatttccccatgaatgatcagaactgacatttaattcatgtttgtctcgccatgcttctttactttaacatatttcttttgcagaatgtaaaaggtaatgataattagtttatataagtgtactggctgtaaatgatgctaaatatactttatgcaattaagggcttacagaacatgttgaaactttttttacttttattgggaataaggaatgtttgcacctccacattttattgcttctggatgtgaaatcatgtaattatttctgctgttatataaagtgccatacttttaataaaggaaaatgtacatatgaaa

SEQ ID NO: 178778 - DNA, 3812 bp, Homo sapiens
  Payload ID: 15241
  Gene Symbol: SUN1
  Gene Name: Sad1 and UNC84 domain containing 1
  Uniprot ID: O94901
  ENST ID: ENST00000389574
  CDS Start-End: 133-2241
agagcgtcttctcgggcctgggcggcgcagacgaggcctgaggcggcggcgcgaggcagttccagctattcttcagatgctctggattttgagacggagcacaaattggaccctgtatttgattctccacggatgtcccgccgtagtttgcgcctggccacgacagcatgcaccctgggggatggtgaggctgtgggtgccgacagcggcaccagcagcgctgtctccctgaagaaccgagcggccagaacaacaaaacagcgcagaagcacaaacaaatcagcttttagtatcaaccacgtgtcaaggcaggtcacgtcctctggcgtcagccacggcggcactgtcagcctgcaggatgctgtgactcgacggcctcctgtattggacgagtcttggattcgtgaacagaccacagtggaccacttctggggtcttgatgatgatggtgatcttaaaggtggaaataaagctgccattcagggaaacggggatgtgggagccgccgccgccaccgcgcacaacggcttctcctgcagcaactgcagcatgctgtccgagcgcaaggacgtgctcacggcgcaccccgcggcccccgggcccgtgtcgagagtttattctagggacaggaatcaaaaatggaaggcagcctctggagtgttctggtggctggggattggatggtaccagtttgttactttgatttcttggctgaatgtgtttcttcttaccaggtgccttcgaaacatctgcaagtttttagtcttgctcatcccactcttccttttactagcaggtctctccttacggggccagggcaatttcttttcgttcttgcccgtgttgaactgggcaagcatgcatagaacacagcgggtggatgacccccaggacgtgtttaaacccacgacttctcgcctgaagcagcctctgcagggtgacagtgaggcttttccgtggcattggatgagtggcgtggagcagcaggtggcctctctgtctggacagtgccaccaccatggtgagaatctccgagagctgaccactttgctacagaagctgcaggctcgggtggaccagatggaaggcggcgctgccgggccgtcagcttcggtcagagacgctgtgggacagcccccgagggagactgactttatggcctttcaccaagaacatgaagtgcgtatgtcacacttggaagatattctgggaaaactgagagaaaaatctgaggccatccagaaggaactagaacagaccaagcaaaaaacaatcagtgcggttggtgagcagctcctgcccacagtcgagcacctccagctggagctggatcagctaaagtcagagctgtccagctggcgacacgtgaagaccggctgtgagacagtggatgccgtacaagaaagagtggacgtgcaagtcagagaaatggtgaaactcctgttttccgaagatcagcaaggcggttctctggaacagctgctgcagaggttctcatcacagtttgtgagcaaaggcgacttgcagacgatgctgcgagacctgcagctgcagatcctgcggaacgtcacccaccacgtttccgtgaccaagcagctcccaacctcagaagccgtggtgtctgctgtgagcgaggcgggggcgtctggaataacagaggcgcaagcacgtgccatcgtgaacagcgccttgaagctgtattcccaagataagaccgggatggtggactttgctctggaatctggtggtggcagcatcttgagtactcgctgttctgaaacttacgaaaccaaaacggcgctgatgagtctgtttgggatcccgctgtggtacttctcgcagtccccgcgcgtggtcatccagcctgacatttaccccggtaactgctgggcatttaaaggctcccaggggtacctggtggtgaggctctccatgatgatccacccagccgccttcactctggagcacatccctaagacgctgtcgccaacaggcaacatcagcagcgcccccaaggacttcgccgtctatggattagaaaatgagtatcaggaagaagggcagcttctgggacagttcacgtatgatcaggatggggagtcgctccagatgttccaggccctgaaaagacccgacgacacagctttccaaatagtggaacttcggattttttctaactggggccatcctgagtatacctgtctgtatcggttcagagttcatggcgaacctgtcaagtgaagacactactcattatttttgtacatttttgtatatactgggacagcgtgaaacactggaatccttcatggacgagggcatatacaatgatgggacagtgccacactccttcaataaacgtggctgctggccagaggacgtgagcgtgtgacgggcgccttggcgccacctgttgggtgctcactgcctctgcaggtgcagaggggtcagcagcaggagaagcgtgttgaacacgtggctctcagacactccttgtttttaacgggaagctctttgcatttgcatttcctcaacaaaggagcaaagcagaggaagctgagagtctggcgtgttcttgacgctttggtcttcagccttgcactggctcttctaaaggacttttggagggcagataatttcatctgttaaatccaacacacatttctttcagggaaaaacaatgtcaccaaattttcagagttctaaactcctttccttcaagccggaattttccttttttcagcaccagtaggtactaagtctccagatggggaaataactaaaatgtgtttttctgctttgttcgctcttacttctgaggaaggtttccagtcaggactcgctgtaccaatatccatggaggaatatgggagcgtttcgctctccttgtaggctgaagtcagtctgacttgaaggggcctggtttggatctaagcaaacacccagatggggttctctggtctcagcaaggcttttcctgttgggagtcacagtaaacagaaacccaaaaatctcatcttgggtgttttcagggcttgttttgagttttgctgaatagggagcgcaagacgccctgagcctccctctcactggtggtgataagaggagccgtctggtgtgtcagggtcacgaacccgttacatttcaggacgatcctttttccttcagcagcatttcttactggctgtggctggaatctgccttttatcacagctgtcaccattctcacgtgattcttgtgagactctttttggttataattactatttaatatttagactattttactgagcagactttataaatgagatatctacaaggcacttaaagtgttacagatgttttaccttaagaattatttaagttgtgttgggttaagacagttttcagtgtaccgtaaatgttgtgttttcagaaaaagacaaaacgatggtgctgactggttttctgtatattgcacaacagtcctcaaatacactgatgtatgaaactattcatacatcaagcagcatttttttcactctccttagaattggaactatgcagttaaggcagataaaatgtacagatgtttcatatattacaggttacatatataaatcaaaatttcctatataaaactgatttgggatttggggtggaaatattttgaatattaatttatttttaaagatgcaagataggactttgtgcaatgtatttttgtaaatgcttttcaaaatatctgtctttggtagtgcttctgctgctgccaccaaattgataagatgctattaagaggtttaaataaagagttttaatttttaaaaggg

SEQ ID NO: 178779 - DNA, 978 bp, Homo sapiens
  Payload ID: 15241
  Gene Symbol: SUN1
  Gene Name: Sad1 and UNC84 domain containing 1
  Uniprot ID: O94901
  ENST ID: ENST00000403868
  CDS Start-End: 23-796
agtatggtttgaagtggtgaacatggatttttctcggcttcacatgtacagtcctccccagtgtgtgccggagaacacgggctacacgtatgcgctcagttccagctattcttcagatgctctggattttgagacggagcacaaattggaccctgtatttgattctccacggatgtcccgccgtagtttgcgcctggccacgacagcatgcaccctgggggatggtgaggctgtgggtgccgacagcggcaccagcagcgctgtctccctgaagaaccgagcggccagaacaacaaaacagcgcagaagcacaaacaaatcagcttttagtatcaaccacgtgtcaaggcaggtcacgtcctctggcgtcagccacggcggcactgtcagcctgcaggatgctgtgactcgacggcctcctgtattggacgagtcttggattcgtgaacagaccacagtggaccacttctggggtcttgatgatgatggtgatcttaaaggtggaaataaagctgccattcagggaaacggggatgtgggagccgccgccgccaccgcgcacaacggcttctcctgcagcaactgcagcatgctgtccgagcgcaaggacgtgctcacggcgcaccccgcggcccccgggcccgtgtcgagagtttattctagggacaggaatcaaaaatgtaagtctcagtcctttaaaactcagaaaaaggtgtgttttccaaatttaatatttcctttctgtaagtctcagtgtctgcactatttgtcttggagacttaaaattatcccttgaaagcataagaagtacaccccaaaccagctttgtccttcctgtcctcttctagtttacattttatgtggttagtaattttgtacctaaaagtatttgaaattctataaatttggacttgacgtgagcaaaagaaaatttctacgtaagcgaaactaataaaactacagtcactttcagatgca

SEQ ID NO: 178780 - DNA, 3953 bp, Homo sapiens
  Payload ID: 15241
  Gene Symbol: SUN1
  Gene Name: Sad1 and UNC84 domain containing 1
  Uniprot ID: O94901
  ENST ID: ENST00000401592
  CDS Start-End: 25-2382
gcagtatggtttgaagtggtgaacatggatttttctcggcttcacatgtacagtcctccccagtgtgtgccggagaacacgggctacacgtatgcgctcagttccagctattcttcagatgctctggattttgagacggagcacaaattggaccctgtatttgattctccacggatgtcccgccgtagtttgcgcctggccacgacagcatgcaccctgggggatggtgaggctgtgggtgccgacagcggcaccagcagcgctgtctccctgaagaaccgagcggccagaacaacaaaacagcgcagaagcacaaacaaatcagcttttagtatcaaccacgtgtcaaggcaggtcacgtcctctggcgtcagccacggcggcactgtcagcctgcaggatgctgtgactcgacggcctcctgtattggacgagtcttggattcgtgaacagaccacagtggaccacttctggggtcttgatgatgatggtgatcttaaaggtggaaataaagctgccattcagggaaacggggatgtgggagccgccgccgccaccgcgcacaacggcttctcctgcagcaactgcagcatgctgtccgagcgcaaggacgtgctcacggcgcaccccgcggcccccgggcccgtgtcgagagtttattctagggacaggaatcaaaaatgttacttcttgctgcagattctgcgcaggatcggagctgtgggccaggctgtgtccaggacggcgtggtcggccctttggctggccgtggttgctccagggaaggcagcctctggagtgttctggtggctggggattggatggtaccagtttgttactttgatttcttggctgaatgtgtttcttcttaccaggtgccttcgaaacatctgcaagtttttagtcttgctcatcccactcttccttttactagcaggtctctccttacggggccagggcaatttcttttcgttcttgcccgtgttgaactgggcaagcatgcatagaacacagcgggtggatgacccccaggacgtgtttaaacccacgacttctcgcctgaagcagcctctgcagggtgacagtgaggcttttccgtggcattggatgagtggcgtggagcagcaggtggcctctctgtctggacagtgccaccaccatggtgagaatctccgagagctgaccactttgctacagaagctgcaggctcgggtggaccagatggaaggcggcgctgccgggccgtcagcttcggtcagagacgctgtgggacagcccccgagggagactgactttatggcctttcaccaagaacatgaagtgcgtatgtcacacttggaagatattctgggaaaactgagagaaaaatctgaggccatccagaaggaactagaacagaccaagcaaaaaacaatcagtgcggttggtgagcagctcctgcccacagtcgagcacctccagctggagctggatcagctaaagtcagagctgtccagctggcgacacgtgaagaccggctgtgagacagtggatgccgtacaagaaagagtggacgtgcaagtcagagaaatggtgaaactcctgttttccgaagatcagcaaggcggttctctggaacagctgctgcagaggttctcatcacagtttgtgagcaaaggcgacttgcagacgatgctgcgagacctgcagctgcagatcctgcggaacgtcacccaccacgtttccgtgaccaagcagctcccaacctcagaagccgtggtgtctgctgtgagcgaggcgggggcgtctggaataacagaggcgcaagcacgtgccatcgtgaacagcgccttgaagctgtattcccaagataagaccgggatggtggactttgctctggaatctggtggtggcagcatcttgagtactcgctgttctgaaacttacgaaaccaaaacggcgctgatgagtctgtttgggatcccgctgtggtacttctcgcagtccccgcgcgtggtcatccagcctgacatttaccccggtaactgctgggcatttaaaggctcccaggggtacctggtggtgaggctctccatgatgatccacccagccgccttcactctggagcacatccctaagacgctgtcgccaacaggcaacatcagcagcgcccccaaggacttcgccgtctatggattagaaaatgagtatcaggaagaagggcagcttctgggacagttcacgtatgatcaggatggggagtcgctccagatgttccaggccctgaaaagacccgacgacacagctttccaaatagtggaacttcggattttttctaactggggccatcctgagtatacctgtctgtatcggttcagagttcatggcgaacctgtcaagtgaagacactactcattatttttgtacatttttgtatatactgggacagcgtgaaacactggaatccttcatggacgagggcatatacaatgatgggacagtgccacactccttcaataaacgtggctgctggccagaggacgtgagcgtgtgacgggcgccttggcgccacctgttgggtgctcactgcctctgcaggtgcagaggggtcagcagcaggagaagcgtgttgaacacgtggctctcagacactccttgtttttaacgggaagctctttgcatttgcatttcctcaacaaaggagcaaagcagaggaagctgagagtctggcgtgttcttgacgctttggtcttcagccttgcactggctcttctaaaggacttttggagggcagataatttcatctgttaaatccaacacacatttctttcagggaaaaacaatgtcaccaaattttcagagttctaaactcctttccttcaagccggaattttccttttttcagcaccagtaggtactaagtctccagatggggaaataactaaaatgtgtttttctgctttgttcgctcttacttctgaggaaggtttccagtcaggactcgctgtaccaatatccatggaggaatatgggagcgtttcgctctccttgtaggctgaagtcagtctgacttgaaggggcctggtttggatctaagcaaacacccagatggggttctctggtctcagcaaggcttttcctgttgggagtcacagtaaacagaaacccaaaaatctcatcttgggtgttttcagggcttgttttgagttttgctgaatagggagcgcaagacgccctgagcctccctctcactggtggtgataagaggagccgtctggtgtgtcagggtcacgaacccgttacatttcaggacgatcctttttccttcagcagcatttcttactggctgtggctggaatctgccttttatcacagctgtcaccattctcacgtgattcttgtgagactctttttggttataattactatttaatatttagactattttactgagcagactttataaatgagatatctacaaggcacttaaagtgttacagatgttttaccttaagaattatttaagttgtgttgggttaagacagttttcagtgtaccgtaaatgttgtgttttcagaaaaagacaaaacgatggtgctgactggttttctgtatattgcacaacagtcctcaaatacactgatgtatgaaactattcatacatcaagcagcatttttttcactctccttagaattggaactatgcagttaaggcagataaaatgtacagatgtttcatatattacaggttacatatataaatcaaaatttcctatataaaactgatttgggatttggggtggaaatattttgaatattaatttatttttaaagatgcaagataggactttgtgcaatgtatttttgtaaatgcttttcaaaatatctgtctttggtagtgcttctgctgctgccaccaaattgataagatgctattaagaggtttaaataaagagttttaatttttaaaaggg

SEQ ID NO: 178781 - DNA, 4062 bp, Homo sapiens
  Payload ID: 15241
  Gene Symbol: SUN1
  Gene Name: Sad1 and UNC84 domain containing 1
  ENST ID: ENST00000405266
  CDS Start-End: 25-2493
gcagtatggtttgaagtggtgaacatggatttttctcggcttcacatgtacagtcctccccagtgtgtgccggagaacacgggctacacgtatgcgctcagttccagctattcttcagatgctctggattttgagacggagcacaaattggaccctgtatttgattctccacggatgtcccgccgtagtttgcgcctggccacgacagcatgcaccctgggggatggtgaggctgtgggtgccgacagcggcaccagcagcgctgtctccctgaagaaccgagcggccagaacaacaaaacagcgcagaagcacaaacaaatcagcttttagtatcaaccacgtgtcaaggcaggtcacgtcctctggcgtcagccacggcggcactgtcagcctgcaggatgctgtgactcgacggcctcctgtattggacgagtcttggattcgtgaacagaccacagtggaccacttctggggtcttgatgatgatggtgatcttaaaggtggaaataaagctgccattcagggaaacggggatgtgggagccgccgccgccaccgcgcacaacggcttctcctgcagcaactgcagcatgctgtccgagcgcaaggacgtgctcacggcgcaccccgcggcccccgggcccgtgtcgagagtttattctagggacaggaatcaaaaatgcgacgactgtaagggcaagaggcacctcgacgcgcacacagccgcccactcgcagtcgccacggctgcccggtcgggcagggaccctctggcacatctgggcatgtgcaggttacttcttgctgcagattctgcgcaggatcggagctgtgggccaggctgtgtccaggacggcgtggtcggccctttggctggccgtggttgctccagggaaggcagcctctggagtgttctggtggctggggattggatggtaccagtttgttactttgatttcttggctgaatgtgtttcttcttaccaggtgccttcgaaacatctgcaagtttttagtcttgctcatcccactcttccttttactagcaggtctctccttacggggccagggcaatttcttttcgttcttgcccgtgttgaactgggcaagcatgcatagaacacagcgggtggatgacccccaggacgtgtttaaacccacgacttctcgcctgaagcagcctctgcagggtgacagtgaggcttttccgtggcattggatgagtggcgtggagcagcaggtggcctctctgtctggacagtgccaccaccatggtgagaatctccgagagctgaccactttgctacagaagctgcaggctcgggtggaccagatggaaggcggcgctgccgggccgtcagcttcggtcagagacgctgtgggacagcccccgagggagactgactttatggcctttcaccaagaacatgaagtgcgtatgtcacacttggaagatattctgggaaaactgagagaaaaatctgaggccatccagaaggaactagaacagaccaagcaaaaaacaatcagtgcggttggtgagcagctcctgcccacagtcgagcacctccagctggagctggatcagctaaagtcagagctgtccagctggcgacacgtgaagaccggctgtgagacagtggatgccgtacaagaaagagtggacgtgcaagtcagagaaatggtgaaactcctgttttccgaagatcagcaaggcggttctctggaacagctgctgcagaggttctcatcacagtttgtgagcaaaggcgacttgcagacgatgctgcgagacctgcagctgcagatcctgcggaacgtcacccaccacgtttccgtgaccaagcagctcccaacctcagaagccgtggtgtctgctgtgagcgaggcgggggcgtctggaataacagaggcgcaagcacgtgccatcgtgaacagcgccttgaagctgtattcccaagataagaccgggatggtggactttgctctggaatctggtggtggcagcatcttgagtactcgctgttctgaaacttacgaaaccaaaacggcgctgatgagtctgtttgggatcccgctgtggtacttctcgcagtccccgcgcgtggtcatccagcctgacatttaccccggtaactgctgggcatttaaaggctcccaggggtacctggtggtgaggctctccatgatgatccacccagccgccttcactctggagcacatccctaagacgctgtcgccaacaggcaacatcagcagcgcccccaaggacttcgccgtctatggattagaaaatgagtatcaggaagaagggcagcttctgggacagttcacgtatgatcaggatggggagtcgctccagatgttccaggccctgaaaagacccgacgacacagctttccaaatagtggaacttcggattttttctaactggggccatcctgagtatacctgtctgtatcggttcagagttcatggcgaacctgtcaagtgaagacactactcattatttttgtacatttttgtatatactgggacagcgtgaaacactggaatccttcatggacgagggcatatacaatgatgggacagtgccacactccttcaataaacgtggctgctggccagaggacgtgagcgtgtgacgggcgccttggcgccacctgttgggtgctcactgcctctgcaggtgcagaggggtcagcagcaggagaagcgtgttgaacacgtggctctcagacactccttgtttttaacgggaagctctttgcatttgcatttcctcaacaaaggagcaaagcagaggaagctgagagtctggcgtgttcttgacgctttggtcttcagccttgcactggctcttctaaaggacttttggagggcagataatttcatctgttaaatccaacacacatttctttcagggaaaaacaatgtcaccaaattttcagagttctaaactcctttccttcaagccggaattttccttttttcagcaccagtaggtactaagtctccagatggggaaataactaaaatgtgtttttctgctttgttcgctcttacttctgaggaaggtttccagtcaggactcgctgtaccaatatccatggaggaatatgggagcgtttcgctctccttgtaggctgaagtcagtctgacttgaaggggcctggtttggatctaagcaaacacccagatggggttctctggtctcagcaaggcttttcctgttgggagtcacagtaaacagaaacccaaaaatctcatcttgggtgttttcagggcttgttttgagttttgctgaatagggagcgcaagacgccctgagcctccctctcactggtggtgataagaggagccgtctggtgtgtcagggtcacgaacccgttacatttcaggacgatcctttttccttcagcagcatttcttactggctgtggctggaatctgccttttatcacagctgtcaccattctcacgtgattcttgtgagactctttttggttataattactatttaatatttagactattttactgagcagactttataaatgagatatctacaaggcacttaaagtgttacagatgttttaccttaagaattatttaagttgtgttgggttaagacagttttcagtgtaccgtaaatgttgtgttttcagaaaaagacaaaacgatggtgctgactggttttctgtatattgcacaacagtcctcaaatacactgatgtatgaaactattcatacatcaagcagcatttttttcactctccttagaattggaactatgcagttaaggcagataaaatgtacagatgtttcatatattacaggttacatatataaatcaaaatttcctatataaaactgatttgggatttggggtggaaatattttgaatattaatttatttttaaagatgcaagataggactttgtgcaatgtatttttgtaaatgcttttcaaaatatctgtctttggtagtgcttctgctgctgccaccaaattgataagatgctattaagaggtttaaataaagagttttaatttttaaaag

SEQ ID NO: 178782 - DNA, 676 bp, Homo sapiens
  Payload ID: 15241
  Gene Symbol: SUN1
  Gene Name: Sad1 and UNC84 domain containing 1
  ENST ID: ENST00000435699
  CDS Start-End: 154-676
ttctcgggcctgggcggcgcagacgaggcctgaggcggcggcgcgaggcagtttcttttctgattctgagatgcttgtgagagcttcagccatctaggaacgcatacgctgctgcttgaccacgctgtagcagtatggtttgaagtggtgaacatggatttttctcggcttcacatgtacagtcctccccagtgtgtgccggagaacacgggctacacgtatgcgctcagttccagctattcttcagatgctctggattttgagacggagcacaaattggaccctgtatttgattctccacggatgtcccgccgtagtttgcgcctggccacgacagcatgcaccctgggggatggtgaggctgtgggtgccgacagcggcaccagcagcgctgtctccctgaagaaccgagcggccagaacaacaaaacagcgcagaagcacaaacaaatcagcttttagtatcaaccacgtgtcaaggcaggtcacgtcctctggcgtcagccacggcggcactgtcagcctgcaggatgctgtgactcgacggcctcctgtattggacgagtcttggattcgtgaacagaccacagtggaccacttctggggtcttgatgatgatggtgatcttaaaggtggaaataaagctgccattcagggaaacggggatgtgggagccg

SEQ ID NO: 178783 - DNA, 3868 bp, Homo sapiens
  Payload ID: 15241
  Gene Symbol: SUN1
  Gene Name: Sad1 and UNC84 domain containing 1
  Uniprot ID: O94901
  ENST ID: ENST00000425407
  CDS Start-End: 171-2279
tatggtttgaagtggtgaacatggatttttctcggcttcacatgtacagtcctccccagtgtgtgccggagaacacgggctacacgtatgcgctcagttccagctattcttcagatgctctggattttgagacggagcacaaattggaccctgtatttgattctccacggatgtcccgccgtagtttgcgcctggccacgacagcatgcaccctgggggatggtgaggctgtgggtgccgacagcggcaccagcagcgctgtctccctgaagaaccgagcggccagaacaacaaaacagcgcagaagcacaaacaaatcagcttttagtatcaaccacgtgtcaaggcaggtcacgtcctctggcgtcagccacggcggcactgtcagcctgcaggatgctgtgactcgacggcctcctgtattggacgagtcttggattcgtgaacagaccacagtggaccacttctggggtcttgatgatgatggtgatcttaaaggtggaaataaagctgccattcagggaaacggggatgtgggagccgccgccgccaccgcgcacaacggcttctcctgcagcaactgcagcatgctgtccgagcgcaaggacgtgctcacggcgcaccccgcggcccccgggcccgtgtcgagagtttattctagggacaggaatcaaaaatggaaggcagcctctggagtgttctggtggctggggattggatggtaccagtttgttactttgatttcttggctgaatgtgtttcttcttaccaggtgccttcgaaacatctgcaagtttttagtcttgctcatcccactcttccttttactagcaggtctctccttacggggccagggcaatttcttttcgttcttgcccgtgttgaactgggcaagcatgcatagaacacagcgggtggatgacccccaggacgtgtttaaacccacgacttctcgcctgaagcagcctctgcagggtgacagtgaggcttttccgtggcattggatgagtggcgtggagcagcaggtggcctctctgtctggacagtgccaccaccatggtgagaatctccgagagctgaccactttgctacagaagctgcaggctcgggtggaccagatggaaggcggcgctgccgggccgtcagcttcggtcagagacgctgtgggacagcccccgagggagactgactttatggcctttcaccaagaacatgaagtgcgtatgtcacacttggaagatattctgggaaaactgagagaaaaatctgaggccatccagaaggaactagaacagaccaagcaaaaaacaatcagtgcggttggtgagcagctcctgcccacagtcgagcacctccagctggagctggatcagctaaagtcagagctgtccagctggcgacacgtgaagaccggctgtgagacagtggatgccgtacaagaaagagtggacgtgcaagtcagagaaatggtgaaactcctgttttccgaagatcagcaaggcggttctctggaacagctgctgcagaggttctcatcacagtttgtgagcaaaggcgacttgcagacgatgctgcgagacctgcagctgcagatcctgcggaacgtcacccaccacgtttccgtgaccaagcagctcccaacctcagaagccgtggtgtctgctgtgagcgaggcgggggcgtctggaataacagaggcgcaagcacgtgccatcgtgaacagcgccttgaagctgtattcccaagataagaccgggatggtggactttgctctggaatctggtggtggcagcatcttgagtactcgctgttctgaaacttacgaaaccaaaacggcgctgatgagtctgtttgggatcccgctgtggtacttctcgcagtccccgcgcgtggtcatccagcctgacatttaccccggtaactgctgggcatttaaaggctcccaggggtacctggtggtgaggctctccatgatgatccacccagccgccttcactctggagcacatccctaagacgctgtcgccaacaggcaacatcagcagcgcccccaaggacttcgccgtctatggattagaaaatgagtatcaggaagaagggcagcttctgggacagttcacgtatgatcaggatggggagtcgctccagatgttccaggccctgaaaagacccgacgacacagctttccaaatagtggaacttcggattttttctaactggggccatcctgagtatacctgtctgtatcggttcagagttcatggcgaacctgtcaagtgaagacactactcattatttttgtacatttttgtatatactgggacagcgtgaaacactggaatccttcatggacgagggcatatacaatgatgggacagtgccacactccttcaataaacgtggctgctggccagaggacgtgagcgtgtgacgggcgccttggcgccacctgttgggtgctcactgcctctgcaggtgcagaggggtcagcagcaggagaagcgtgttgaacacgtggctctcagacactccttgtttttaacgggaagctctttgcatttgcatttcctcaacaaaggagcaaagcagaggaagctgagagtctggcgtgttcttgacgctttggtcttcagccttgcactggctcttctaaaggacttttggagggcagataatttcatctgttaaatccaacacacatttctttcagggaaaaacaatgtcaccaaattttcagagttctaaactcctttccttcaagccggaattttccttttttcagcaccagtaggtactaagtctccagatggggaaataactaaaatgtgtttttctgctttgttcgctcttacttctgaggaaggtttccagtcaggactcgctgtaccaatatccatggaggaatatgggagcgtttcgctctccttgtaggctgaagtcagtctgacttgaaggggcctggtttggatctaagcaaacacccagatggggttctctggtctcagcaaggcttttcctgttgggagtcacagtaaacagaaacccaaaaatctcatcttgggtgttttcagggcttgttttgagttttgctgaatagggagcgcaagacgccctgagcctccctctcactggtggtgataagaggagccgtctggtgtgtcagggtcacgaacccgttacatttcaggacgatcctttttccttcagcagcatttcttactggctgtggctggaatctgccttttatcacagctgtcaccattctcacgtgattcttgtgagactctttttggttataattactatttaatatttagactattttactgagcagactttataaatgagatatctacaaggcacttaaagtgttacagatgttttaccttaagaattatttaagttgtgttgggttaagacagttttcagtgtaccgtaaatgttgtgttttcagaaaaagacaaaacgatggtgctgactggttttctgtatattgcacaacagtcctcaaatacactgatgtatgaaactattcatacatcaagcagcatttttttcactctccttagaattggaactatgcagttaaggcagataaaatgtacagatgtttcatatattacaggttacatatataaatcaaaatttcctatataaaactgatttgggatttggggtggaaatattttgaatattaatttatttttaaagatgcaagataggactttgtgcaatgtatttttgtaaatgcttttcaaaatatctgtctttggtagtgcttctgctgctgccaccaaattgataagatgctattaagaggtttaaataaagagttttaatttttaaaagggcatgggatataaacagtc

SEQ ID NO: 178784 - DNA, 513 bp, Homo sapiens
  Payload ID: 15241
  Gene Symbol: SUN1
  Gene Name: Sad1 and UNC84 domain containing 1
  ENST ID: ENST00000450881
  CDS Start-End: 1-513
agttccagctattcttcagatgctctggattttgagacggagcacaaattggaccctgtatttgattctccacggatgtcccgccgtagtttgcgcctggccacgacagcatgcaccctgggggatggtgaggctgtgggtgccgacagcggcaccagcagcgctgtctccctgaagaaccgagcggccagaacaacaaaacagcgcagaagcacaaacaaatcagcttttagtatcaaccacgtgtcaaggcaggtcacgtcctctggcgtcagccacggcggcactgtcagcctgcaggatgctgtgactcgacggcctcctgtattggacgagtcttggattcgtgaacagaccacagtggaccacttctgggggaaggcagcctctggagtgttctggtggctggggattggatggtaccagtttgttactttgatttcttggctgaatgtgtttcttcttaccaggtgccttcgaaacatctgcaagtttttagtcttgctcatccca

SEQ ID NO: 178785 - DNA, 540 bp, Homo sapiens
  Payload ID: 15241
  Gene Symbol: SUN1
  Gene Name: Sad1 and UNC84 domain containing 1
  ENST ID: ENST00000421580
  CDS Start-End: 201-540
aatatactcaacactttctaacctaaaaaatatcctgttttttggtgaggaaaaaagtgtaaatagtgccttaagcttttttgttattcaccctgcagtttcttttctgattctgagatgcttgtgagagcttcagccatctaggaacgcatacgctgctgcttgaccacgctgtagcagtatggtttgaagtggtgaacatggatttttctcggcttcacatgtacagtcctccccagtgtgtgccggagaacacgggctacacgtatgcgctcagttccagctattcttcagatgctctggattttgagacggagcacaaattggaccctgtatttgattctccacggatgtcccgccgtagtttgcgcctggccacgacagcatgcaccctgggggatggtgaggctgtgggtgccgacagcggcaccagcagcgctgtctccctgaagaaccgagcggccagaacaacaaaacagcgcagaagcacaaacaaatcagcttttagtatcaaccacgtgtcaaggcaggtcacgtcct

SEQ ID NO: 178786 - DNA, 633 bp, Homo sapiens
  Payload ID: 15241
  Gene Symbol: SUN1
  Gene Name: Sad1 and UNC84 domain containing 1
  ENST ID: ENST00000424128
  CDS Start-End: 368-633
gcgcaggtgaagacgcccggagaccctggcggtcgtggcgcagggggttgtggtctctccatgctgcccaggtcggactcctaggctcaagcgatcccctcgccccagcctgcctggaggcgcgcgcgtggtctccgcgccctgttgcgccttcaaagtgcccagaatggtgtctggtgcaaaataagcagcggcggggaacaccttgccactgtcaccgtcatggggaggatttctcccggctccccagggctccccaggacagtttcttttctgattctgagatgcttgtgagagcttcagccatctaggaacgcatacgctgctgcttgaccacgctgtagcagtatggtttgaagtggtgaacatggatttttctcggcttcacatgtacagtcctccccagtgtgtgccggagaacacgggctacacgtatgcgctcagttccagctattcttcagatgctctggattttgagacggagcacaaattggaccctgtatttgattctccacggatgtcccgccgtagtttgcgcctggccacgacagcatgcaccctgggggatggtgaggctgtgggtgccgacagcggcaccagcagcgctgtctccctgaagaaccgagcggccag

SEQ ID NO: 178787 - DNA, 1309 bp, Homo sapiens
  Payload ID: 15241
  Gene Symbol: SUN1
  Gene Name: Sad1 and UNC84 domain containing 1
  Uniprot ID: O94901
  ENST ID: ENST00000457378
  CDS Start-End: 237-1073
agagcgtcttctcgggcctgggcggcgcagacgaggcctgaggcggcggcgcgaggcagggttgtggtctctccatgctgcccaggtcggactcctaggctcaagcgatcccctcgccccagcctgcctggaggcgcgcgcgtggtctccgcgccctgttgcgccttcaaagtgcccagaatggtgtctggtgcaaaataagcagcggcggggaacaccttgccactgtcaccgtcatggggaggatttctcccggctccccagggctccccaggacagtatggtttgaagtggtgaacatggatttttctcggcttcacatgtacagtcctccccagtgtgtgccggagaacacgggctacacgtatgcgctcagttccagctattcttcagatgctctggattttgagacggagcacaaattggaccctgtatttgattctccacggatgtcccgccgtagtttgcgcctggccacgacagcatgcaccctgggggatggtgaggctgtgggtgccgacagcggcaccagcagcgctgtctccctgaagaaccgagcggccagaacaacaaaacagcgcagaagcacaaacaaatcagcttttagtatcaaccacgtgtcaaggcaggtcacgtcctctggcgtcagccacggcggcactgtcagcctgcaggatgctgtgactcgacggcctcctgtattggacgagtcttggattcgtgaacagaccacagtggaccacttctggggtcttgatgatgatggtgatcttaaaggtggaaataaagctgccattcagggaaacggggatgtgggagccgccgccgccaccgcgcacaacggcttctcctgcagcaactgcagcatgctgtccgagcgcaaggacgtgctcacggcgcaccccgcggcccccgggcccgtgtcgagagtttattctagggacaggaatcaaaaatgtaagtctcagtcctttaaaactcagaaaaaggtgtgttttccaaatttaatatttcctttctgtaagtctcagtgtctgcactatttgtcttggagacttaaaattatcccttgaaagcataagaagtacaccccaaaccagctttgtccttcctgtcctcttctagtttacattttatgtggttagtaattttgtacctaaaagtatttgaaattctataaatttggacttgacgtgagcaaaagaaaatttctacgtaagcgaaactaataaaactacagtcactttcagatgcacacctttatttttataaaacggcacagatgttcacacatactgaaggagtggct

SEQ ID NO: 178788 - DNA, 537 bp, Homo sapiens
  Payload ID: 15241
  Gene Symbol: SUN1
  Gene Name: Sad1 and UNC84 domain containing 1
  ENST ID: ENST00000440380
  CDS Start-End: 272-537
agacgaggcctgaggcggcggcgcgaggcagggttgtggtctctccatgctgcccaggtcggactcctaggctcaagcgatcccctcgccccagcctgcctggaggcgcgcgcgtggtctccgcgccctgttgcgccttcaaagtgcccagaatggtgtctggtgcaaaataagcagcggcggggaacaccttgccactgtcaccgtcatggggaggatttctcccggctccccagggctccccaggacagtatggtttgaagtggtgaacatggatttttctcggcttcacatgtacagtcctccccagtgtgtgccggagaacacgggctacacgtatgcgctcagttccagctattcttcagatgctctggattttgagacggagcacaaattggaccctgtatttgattctccacggatgtcccgccgtagtttgcgcctggccacgacagcatgcaccctgggggatggtgaggctgtgggtgccgacagcggcaccagcagcgctgtctccctgaagaaccgagcggccag

SEQ ID NO: 178789 - DNA, 563 bp, Homo sapiens
  Payload ID: 15241
  Gene Symbol: SUN1
  Gene Name: Sad1 and UNC84 domain containing 1
  ENST ID: ENST00000457598
  CDS Start-End: 208-563
agagcaggcctgcgcacctcaggagcccaggcatggtgtataggtggagggtagcctacattggatccaggccaaggccctgtcctgtgccgggctcctctgcgttttcttttctgattctgagatgcttgtgagagcttcagccatctaggaacgcatacgctgctgcttgaccacgctgtagcagtatggtttgaagtggtgaacatggatttttctcggcttcacatgtacagtcctccccagtgtgtgccggagaacacgggctacacgtatgcgctcagttccagctattcttcagatgctctggattttgagacggagcacaaattggaccctgtatttgattctccacggatgtcccgccgtagtttgcgcctggccacgacagcatgcaccctgggggatggtgaggctgtgggtgccgacagcggcaccagcagcgctgtctccctgaagaaccgagcggccagaacaacaaaacagcgcagaagcacaaacaaatcagcttttagtatcaaccacgtgtcaaggcaggtcacgtcctctggcgtcagccacgg

SEQ ID NO: 178790 - DNA, 2975 bp, Homo sapiens
  Payload ID: 15241
  Gene Symbol: SUN1
  Gene Name: Sad1 and UNC84 domain containing 1
  ENST ID: ENST00000457861
  CDS Start-End: 1-1283
ggaaggcagcctctggagtgttctggtggctggggattggatggtaccagtttgttactttgatttcttggctgaatgtgtttcttcttaccaggtgccttcgaaacatctgcaagtttttagtcttgctcatcccactcttccttttactaggtctctccttacggggccagggcaatttcttttcgttcttgcccgtgttgaactgggcaagcatgcatagaacacagcgggtggatgacccccaggacgtgtttaaacccacgacttctcgcctgaagcagcctctgcagggtgacagtgaggcttttccgtggcattggatgagtggcgtggagcagcaggtggcctctctgtctggacagtgccaccaccatggtgagaatctccgagagctgaccactttgctacagaagctgcaggctcgggtggaccagatggaaggcggcgctgccgggccgtcagcttcggtcagagacgctgtgggacagcccccgagggaggccatccagaaggaactagaacagaccaagcaaaaaacaatcagtgcggttggtgagcagctcctgcccacagtcgagcacctccagctggagctggatcagctaaagtcagagctgtccagctggcgacacgtgaagaccggctgtgagacagtggatgccgtacaagaaagagtggacgtgcaagtcagagaaatggtgaaactcctgttttccgaagatcagcaaggcggttctctggaacagctgctgcagaggttctcatcacagtttgtgagcaaaggcgacttgcagacgatgctgcgagacctgcagctgcagatcctgcggaacgtcacccaccacgtttccgtgaccaagcagctcccaacctcagaagccgtggtgtctgctgtgagcgaggcgggggcgtctggaataacagaggcgcaagcacgtgccatcgtgaacagcgccttgaagctgtattcccaagataagaccgggatggtggactttgctctggaatctggtggtggcagcatcttgagtactcgctgttctgaaacttacgaaaccaaaacggcgctgatgagtctgtttgggatcccgctgtggtacttctcgcagtccccgcgcgtggtcatccaggtacatgtcccagagcaagcacacggaggcccgggagctcatgtactcgggagccctgctcttcttcagccatggccagcaaaacagtgcagcagacttgtccatgctggtcctggagtccctggagaaggcggaagtggaggtggctgacgagctgctggaaaatctggctaaagtgttcagcctgatggaccccaactctcctgagcgcgtgacctttgtgtccagagccctgaagtggtccagtgggggctccgggaagctgggccacccccggctgcaccagctgctggccctcaccctgtggaaagaacaaaactattgtgagtcgaggtatcattttctgcactcagcggacggggagggctgtgccaacatgctggtggagtattccacgtcccgcggcttccgcagcgaggtggacatgttcgtggcccaggccgtgctacagtttctctgtttaaaaaacaaaagtagcgcatcggtggtcttcacgacgtacacccagaagcacccgtccatcgaggacgggcctccgtttgtggagccgctgcttaacttcatctggttcctgctgctggctgtggacggtgggaagctgacggtgttcactgtgctgtgtgagcagtaccagccatccctccggcgggaccccatgtacaacgagtacctcgaccgcataggacagctgttcttcggcgtcccgcccaagcagacgtcttcctacgggggcctgctcgggaaccttctgaccagcctcatgggctcctcagagcaggaggatggggaggagagccccagcgacggcagccccatcgagctggactgaactggccaggccacgtggagacaccacggtcgacgacggctggagggacgtttcagaggcgagtcctgggtggctcctcgccttgggggctcctggccctgaggctggcggtggccgcatgccggcgcgtgtctgtttctgtgcggcggctcagggtggcgcggctgctgctcactgtgctgctgggacccaagagtggggcgtcgcccctgctggccgccgcgtcccccgagattgacccacaataaagcacaggccttaccgcggcgtcaccctctcccactcctttgttctgggtcctttcgggagggctgatgggcagcacaggaggcccgtcctcggggggctgcgcacatcacgctccttgccgggcgtccggcacagctgcggtcaccaaagcaggtgctggccctcggacctgagagcccagccagggcccatgtggtctgcaaatgggagcggctgtttttgaacacggggtcattctgcagtcaggacgaaccggtccccgtcgcagacggagtgcacgtgccctgcgccacatcctcacgctcggtggagggacgcgtgcggcgggacggtgcctacgggtacttgcagctgtgtcccatgtggcatcccagagctgcgccctgctggtctctgtgagcgccacgctgctgtgctggaaatgccgctttaaaaagggataccgtgggactctgcccgtctctttcataacgcaatatttatttgtattgggtgatgattgattctttcgacctaacattttgggttttaaccaaataaccggtccaggagtgagcagctccgttctgtcagatgctactccaaatgttaccagaacgatgacaaaaggggagacgctctattttttcacagttaaatgacagttgtagattgatacgcagttgtgcatgggaaggggaaacgcacagctttatttactgtaaagtggaatttcaggaaggcttgtgtgaaccgttgcgcataaataaaccctttctaccggg

SEQ ID NO: 178791 - DNA, 3474 bp, Homo sapiens
  Payload ID: 15241
  Gene Symbol: SUN1
  Gene Name: Sad1 and UNC84 domain containing 1
  ENST ID: ENST00000433212
  CDS Start-End: 1-1903
atcaaaagctcatgccagttactatgggagaatgaatgtgagagaggttctcagagaggatggccacctcagtgtaaatggggaagcgctgtgcgacgactgtaagggcaagaggcacctcgacgcgcacacagccgcccactcgcagtcgccacggctgcccggtcgggcagggaccctctggcacatctgggcatgtgcaggttacttcttgctgcagattctgcgcaggatcggagctgtgggccaggctgtgtccaggacggcgtggtcggccctttggctggccgtggttgctccagggaaggcagcctctggagtgttctggtggctggggattggatggtaccagtttgttactttgatttcttggctgaatgtgtttcttcttaccaggtgccttcgaaacatctgcaagtttttagtcttgctcatcccactcttccttttactagcaggtctctccttacggggccagggcaatttcttttcgttcttgcccgtgttgaactgggcaagcatgcatagaacacagcgggtggatgacccccaggacgtgtttaaacccacgacttctcgcctgaagcagcctctgcagggtgacagtgaggcttttccgtggcattggatgagtggcgtggagcagcaggtggcctctctgtctggacagtgccaccaccatggtgagaatctccgagagctgaccactttgctacagaagctgcaggctcgggtggaccagatggaaggcggcgctgccgggccgtcagcttcggtcagagacgctgtgggacagcccccgagggagactgactttatggcctttcaccaagaacatgaagtgcgtatgtcacacttggaagatattctgggaaaactgagagaaaaatctgaggccatccagaaggaactagaacagaccaagcaaaaaacaatcagtgcggttggtgagcagctcctgcccacagtcgagcacctccagctggagctggatcagctaaagtcagagctgtccagctggcgacacgtgaagaccggctgtgagacagtggatgccgtacaagaaagagtggacgtgcaagtcagagaaatggtgaaactcctgttttccgaagatcagcaaggcggttctctggaacagctgctgcagaggttctcatcacagtttgtgagcaaaggcgacttgcagacgatgctgcgagacctgcagctgcagatcctgcggaacgtcacccaccacgtttccgtgaccaagcagctcccaacctcagaagccgtggtgtctgctgtgagcgaggcgggggcgtctggaataacagaggcgcaagcacgtgccatcgtgaacagcgccttgaagctgtattcccaagataagaccgggatggtggactttgctctggaatctggtggtggcagcatcttgagtactcgctgttctgaaacttacgaaaccaaaacggcgctgatgagtctgtttgggatcccgctgtggtacttctcgcagtccccgcgcgtggtcatccagcctgacatttaccccggtaactgctgggcatttaaaggctcccaggggtacctggtggtgaggctctccatgatgatccacccagccgccttcactctggagcacatccctaagacgctgtcgccaacaggcaacatcagcagcgcccccaaggacttcgccgtctatggattagaaaatgagtatcaggaagaagggcagcttctgggacagttcacgtatgatcaggatggggagtcgctccagatgttccaggccctgaaaagacccgacgacacagctttccaaatagtggaacttcggattttttctaactggggccatcctgagtatacctgtctgtatcggttcagagttcatggcgaacctgtcaagtgaagacactactcattatttttgtacatttttgtatatactgggacagcgtgaaacactggaatccttcatggacgagggcatatacaatgatgggacagtgccacactccttcaataaacgtggctgctggccagaggacgtgagcgtgtgacgggcgccttggcgccacctgttgggtgctcactgcctctgcaggtgcagaggggtcagcagcaggagaagcgtgttgaacacgtggctctcagacactccttgtttttaacgggaagctctttgcatttgcatttcctcaacaaaggagcaaagcagaggaagctgagagtctggcgtgttcttgacgctttggtcttcagccttgcactggctcttctaaaggacttttggagggcagataatttcatctgttaaatccaacacacatttctttcagggaaaaacaatgtcaccaaattttcagagttctaaactcctttccttcaagccggaattttccttttttcagcaccagtaggtactaagtctccagatggggaaataactaaaatgtgtttttctgctttgttcgctcttacttctgaggaaggtttccagtcaggactcgctgtaccaatatccatggaggaatatgggagcgtttcgctctccttgtaggctgaagtcagtctgacttgaaggggcctggtttggatctaagcaaacacccagatggggttctctggtctcagcaaggcttttcctgttgggagtcacagtaaacagaaacccaaaaatctcatcttgggtgttttcagggcttgttttgagttttgctgaatagggagcgcaagacgccctgagcctccctctcactggtggtgataagaggagccgtctggtgtgtcagggtcacgaacccgttacatttcaggacgatcctttttccttcagcagcatttcttactggctgtggctggaatctgccttttatcacagctgtcaccattctcacgtgattcttgtgagactctttttggttataattactatttaatatttagactattttactgagcagactttataaatgagatatctacaaggcacttaaagtgttacagatgttttaccttaagaattatttaagttgtgttgggttaagacagttttcagtgtaccgtaaatgttgtgttttcagaaaaagacaaaacgatggtgctgactggttttctgtatattgcacaacagtcctcaaatacactgatgtatgaaactattcatacatcaagcagcatttttttcactctccttagaattggaactatgcagttaaggcagataaaatgtacagatgtttcatatattacaggttacatatataaatcaaaatttcctatataaaactgatttgggatttggggtggaaatattttgaatattaatttatttttaaagatgcaagataggactttgtgcaatgtatttttgtaaatgcttttcaaaatatctgtctttggtagtgcttctgctgctgccaccaaattgataagatgctattaagaggtttaaataaagagttttaatttttaaaaggg

SEQ ID NO: 178792 - DNA, 3701 bp, Homo sapiens
  Payload ID: 15241
  Gene Symbol: SUN1
  Gene Name: Sad1 and UNC84 domain containing 1
  ENST ID: ENST00000429178
  CDS Start-End: 1-2133
ggggatgtgggagccgccgccgccaccgcgcacaacggcttctcctgcagcaactgcagcatgctgtccgagcgcaaggacgtgctcacggcgcaccccgcggcccccgggcccgtgtcgagagtttattctagggacaggaatcaaaaatgcggtgcgtctttctacgtgaataggattttgtggctggccagatacactgcatcatctttttcatcatttttagttcaactttttcaagtggttttaatgaagctcagttatgaatcagaaaattacaaattgaaaactcatgaatcaaaagattgtgaatccgaaagctataagtcaaaaagccatgaatcaaaagctcatgccagttactatgggagaatgaatgtgagagaggttctcagagaggatggccacctcagtgtaaatggggaagcgctgtgttacttcttgctgcagattctgcgcaggatcggagctgtgggccaggctgtgtccaggacggcgtggtcggccctttggctggccgtggttgctccagggaaggcagcctctggagtgttctggtggctggggattggatggtaccagtttgttactttgatttcttggctgaatgtgtttcttcttaccaggtgccttcgaaacatctgcaagtttttagtcttgctcatcccactcttccttttactagcaggtctctccttacggggccagggcaatttcttttcgttcttgcccgtgttgaactgggcaagcatgcatagaacacagcgggtggatgacccccaggacgtgtttaaacccacgacttctcgcctgaagcagcctctgcagggtgacagtgaggcttttccgtggcattggatgagtggcgtggagcagcaggtggcctctctgtctggacagtgccaccaccatggtgagaatctccgagagctgaccactttgctacagaagctgcaggctcgggtggaccagatggaaggcggcgctgccgggccgtcagcttcggtcagagacgctgtgggacagcccccgagggagactgactttatggcctttcaccaagaacatgaagtgcgtatgtcacacttggaagatattctgggaaaactgagagaaaaatctgaggccatccagaaggaactagaacagaccaagcaaaaaacaatcagtgcggttggtgagcagctcctgcccacagtcgagcacctccagctggagctggatcagctaaagtcagagctgtccagctggcgacacgtgaagaccggctgtgagacagtggatgccgtacaagaaagagtggacgtgcaagtcagagaaatggtgaaactcctgttttccgaagatcagcaaggcggttctctggaacagctgctgcagaggttctcatcacagtttgtgagcaaaggcgacttgcagacgatgctgcgagacctgcagctgcagatcctgcggaacgtcacccaccacgtttccgtgaccaagcagctcccaacctcagaagccgtggtgtctgctgtgagcgaggcgggggcgtctggaataacagaggcgcaagcacgtgccatcgtgaacagcgccttgaagctgtattcccaagataagaccgggatggtggactttgctctggaatctggtggtggcagcatcttgagtactcgctgttctgaaacttacgaaaccaaaacggcgctgatgagtctgtttgggatcccgctgtggtacttctcgcagtccccgcgcgtggtcatccagcctgacatttaccccggtaactgctgggcatttaaaggctcccaggggtacctggtggtgaggctctccatgatgatccacccagccgccttcactctggagcacatccctaagacgctgtcgccaacaggcaacatcagcagcgcccccaaggacttcgccgtctatggattagaaaatgagtatcaggaagaagggcagcttctgggacagttcacgtatgatcaggatggggagtcgctccagatgttccaggccctgaaaagacccgacgacacagctttccaaatagtggaacttcggattttttctaactggggccatcctgagtatacctgtctgtatcggttcagagttcatggcgaacctgtcaagtgaagacactactcattatttttgtacatttttgtatatactgggacagcgtgaaacactggaatccttcatggacgagggcatatacaatgatgggacagtgccacactccttcaataaacgtggctgctggccagaggacgtgagcgtgtgacgggcgccttggcgccacctgttgggtgctcactgcctctgcaggtgcagaggggtcagcagcaggagaagcgtgttgaacacgtggctctcagacactccttgtttttaacgggaagctctttgcatttgcatttcctcaacaaaggagcaaagcagaggaagctgagagtctggcgtgttcttgacgctttggtcttcagccttgcactggctcttctaaaggacttttggagggcagataatttcatctgttaaatccaacacacatttctttcagggaaaaacaatgtcaccaaattttcagagttctaaactcctttccttcaagccggaattttccttttttcagcaccagtaggtactaagtctccagatggggaaataactaaaatgtgtttttctgctttgttcgctcttacttctgaggaaggtttccagtcaggactcgctgtaccaatatccatggaggaatatgggagcgtttcgctctccttgtaggctgaagtcagtctgacttgaaggggcctggtttggatctaagcaaacacccagatggggttctctggtctcagcaaggcttttcctgttgggagtcacagtaaacagaaacccaaaaatctcatcttgggtgttttcagggcttgttttgagttttgctgaatagggagcgcaagacgccctgagcctccctctcactggtggtgataagaggagccgtctggtgtgtcagggtcacgaacccgttacatttcaggacgatcctttttccttcagcagcatttcttactggctgtggctggaatctgccttttatcacagctgtcaccattctcacgtgattcttgtgagactctttttggttataattactatttaatatttagactattttactgagcagactttataaatgagatatctacaaggcacttaaagtgttacagatgttttaccttaagaattatttaagttgtgttgggttaagacagttttcagtgtaccgtaaatgttgtgttttcagaaaaagacaaaacgatggtgctgactggttttctgtatattgcacaacagtcctcaaatacactgatgtatgaaactattcatacatcaagcagcatttttttcactctccttagaattggaactatgcagttaaggcagataaaatgtacagatgtttcatatattacaggttacatatataaatcaaaatttcctatataaaactgatttgggatttggggtggaaatattttgaatattaatttatttttaaagatgcaagataggactttgtgcaatgtatttttgtaaatgcttttcaaaatatctgtctttggtagtgcttctgctgctgccaccaaattgataagatgctattaagaggtttaaataaagagttttaatttttaaaa

SEQ ID NO: 178793 - DNA, 626 bp, Homo sapiens
  Payload ID: 15241
  Gene Symbol: SUN1
  Gene Name: Sad1 and UNC84 domain containing 1
  ENST ID: ENST00000439679
  CDS Start-End: 220-626
ggggggacgcggggtcgcggcctgggcgccctcagcgcgggctgcgccagggcctcctgggccaacggctgccgcccccgcccgtcccgcgccccgcagctaccccggcccgcgcagtttcttttctgattctgagatgcttgtgagagcttcagccatctaggaacgcatacgctgctgcttgaccacgctgtagcagtatggtttgaagtggtgaacatggatttttctcggcttcacatgtacagtcctccccagtgtgtgccggagaacacgggctacacgtatgcgctcagttccagctattcttcagatgctctggattttgagacggagcacaaattggaccctgtatttgattctccacggatgtcccgccgtagtttgcgcctggccacgacagcatgcaccctgggggatggtgaggctgtgggtgccgacagcggcaccagcagcgctgtctccctgaagaaccgagcggccagaacaacaaaacagcgcagaagcacaaacaaatcagcttttagtatcaaccacgtgtcaaggcaggtcacgtcctctggcgtcagccacggcggcactgtcagcctgcaggatgctgtgactcgacggcctcctgtattgga

SEQ ID NO: 178794 - DNA, 3717 bp, Homo sapiens
  Payload ID: 15241
  Gene Symbol: SUN1
  Gene Name: Sad1 and UNC84 domain containing 1
  Uniprot ID: O94901
  ENST ID: ENST00000452783
  CDS Start-End: 80-2128
agagcgtcttctcgggcctgggcggcgcagacgaggcctgaggcggcggcgcgaggcagtatggtttgaagtggtgaacatggatttttctcggcttcacatgtacagtcctccccagtgtgtgccggagaacacgggctacacgtatgcgctcagttccagctattcttcagatgctctggattttgagacggagcacaaattggaccctgtatttgattctccacggatgtcccgccgtagtttgcgcctggccacgacagcatgcaccctgggggatggtgaggctgtgggtgccgacagcggcaccagcagcgctgtctccctgaagaaccgagcggccagaacaacaaaacagcgcagaagcacaaacaaatcagcttttagtatcaaccacgtgtcaaggcaggtcacgtcctctggcgtcagccacggcggcactgtcagcctgcaggatgctgtgactcgacggcctcctgtattggacgagtcttggattcgtgaacagaccacagtggaccacttctgggggaaggcagcctctggagtgttctggtggctggggattggatggtaccagtttgttactttgatttcttggctgaatgtgtttcttcttaccaggtgccttcgaaacatctgcaagtttttagtcttgctcatcccactcttccttttactaggtctctccttacggggccagggcaatttcttttcgttcttgcccgtgttgaactgggcaagcatgcatagaacacagcgggtggatgacccccaggacgtgtttaaacccacgacttctcgcctgaagcagcctctgcagggtgacagtgaggcttttccgtggcattggatgagtggcgtggagcagcaggtggcctctctgtctggacagtgccaccaccatggtgagaatctccgagagctgaccactttgctacagaagctgcaggctcgggtggaccagatggaaggcggcgctgccgggccgtcagcttcggtcagagacgctgtgggacagcccccgagggagactgactttatggcctttcaccaagaacatgaagtgcgtatgtcacacttggaagatattctgggaaaactgagagaaaaatctgaggccatccagaaggaactagaacagaccaagcaaaaaacaatcagtgcggttggtgagcagctcctgcccacagtcgagcacctccagctggagctggatcagctaaagtcagagctgtccagctggcgacacgtgaagaccggctgtgagacagtggatgccgtacaagaaagagtggacgtgcaagtcagagaaatggtgaaactcctgttttccgaagatcagcaaggcggttctctggaacagctgctgcagaggttctcatcacagtttgtgagcaaaggcgacttgcagacgatgctgcgagacctgcagctgcagatcctgcggaacgtcacccaccacgtttccgtgaccaagcagctcccaacctcagaagccgtggtgtctgctgtgagcgaggcgggggcgtctggaataacagaggcgcaagcacgtgccatcgtgaacagcgccttgaagctgtattcccaagataagaccgggatggtggactttgctctggaatctggtggtggcagcatcttgagtactcgctgttctgaaacttacgaaaccaaaacggcgctgatgagtctgtttgggatcccgctgtggtacttctcgcagtccccgcgcgtggtcatccagcctgacatttaccccggtaactgctgggcatttaaaggctcccaggggtacctggtggtgaggctctccatgatgatccacccagccgccttcactctggagcacatccctaagacgctgtcgccaacaggcaacatcagcagcgcccccaaggacttcgccgtctatggattagaaaatgagtatcaggaagaagggcagcttctgggacagttcacgtatgatcaggatggggagtcgctccagatgttccaggccctgaaaagacccgacgacacagctttccaaatagtggaacttcggattttttctaactggggccatcctgagtatacctgtctgtatcggttcagagttcatggcgaacctgtcaagtgaagacactactcattatttttgtacatttttgtatatactgggacagcgtgaaacactggaatccttcatggacgagggcatatacaatgatgggacagtgccacactccttcaataaacgtggctgctggccagaggacgtgagcgtgtgacgggcgccttggcgccacctgttgggtgctcactgcctctgcaggtgcagaggggtcagcagcaggagaagcgtgttgaacacgtggctctcagacactccttgtttttaacgggaagctctttgcatttgcatttcctcaacaaaggagcaaagcagaggaagctgagagtctggcgtgttcttgacgctttggtcttcagccttgcactggctcttctaaaggacttttggagggcagataatttcatctgttaaatccaacacacatttctttcagggaaaaacaatgtcaccaaattttcagagttctaaactcctttccttcaagccggaattttccttttttcagcaccagtaggtactaagtctccagatggggaaataactaaaatgtgtttttctgctttgttcgctcttacttctgaggaaggtttccagtcaggactcgctgtaccaatatccatggaggaatatgggagcgtttcgctctccttgtaggctgaagtcagtctgacttgaaggggcctggtttggatctaagcaaacacccagatggggttctctggtctcagcaaggcttttcctgttgggagtcacagtaaacagaaacccaaaaatctcatcttgggtgttttcagggcttgttttgagttttgctgaatagggagcgcaagacgccctgagcctccctctcactggtggtgataagaggagccgtctggtgtgtcagggtcacgaacccgttacatttcaggacgatcctttttccttcagcagcatttcttactggctgtggctggaatctgccttttatcacagctgtcaccattctcacgtgattcttgtgagactctttttggttataattactatttaatatttagactattttactgagcagactttataaatgagatatctacaaggcacttaaagtgttacagatgttttaccttaagaattatttaagttgtgttgggttaagacagttttcagtgtaccgtaaatgttgtgttttcagaaaaagacaaaacgatggtgctgactggttttctgtatattgcacaacagtcctcaaatacactgatgtatgaaactattcatacatcaagcagcatttttttcactctccttagaattggaactatgcagttaaggcagataaaatgtacagatgtttcatatattacaggttacatatataaatcaaaatttcctatataaaactgatttgggatttggggtggaaatattttgaatattaatttatttttaaagatgcaagataggactttgtgcaatgtatttttgtaaatgcttttcaaaatatctgtctttggtagtgcttctgctgctgccaccaaattgataagatgctattaagaggtttaaataaagagttttaatttttaaaagggcatgggatataaacagtc

SEQ ID NO: 178795 - DNA, 473 bp, Homo sapiens
  Payload ID: 15241
  Gene Symbol: SUN1
  Gene Name: Sad1 and UNC84 domain containing 1
  ENST ID: ENST00000419312
  CDS Start-End: 1-473
gtggaaataaagctgccattcagggaaacggggatgtgggagccgccgccgccaccgcgcacaacggcttctcctgcagcaactgcagcatgctgtccgagcgcaaggacgtgctcacggcgcaccccgcggcccccgggcccgtgtcgagagtttattctagggacaggaatcaaaaatctcatgccagttactatgggagaatgaatgtgagagaggttctcagagaggatggccacctcagtgtaaatggggaagcgctgtgcgacgactgtaagggcaagaggcacctcgacgcgcacacagccgcccactcgcagtcgccacggctgcccggtcgggcagggaccctctggcacatctgggcatgtgcaggttacttcttgctgcagattctgcgcaggatcggagctgtgggccaggctgtgtccaggacggcgtggtcggccctttggctggccgtggttgctcca

SEQ ID NO: 178796 - DNA, 2725 bp, Homo sapiens
  Payload ID: 15242
  Gene Symbol: SUN2
  Gene Name: Sad1 and UNC84 domain containing 2
  Uniprot ID: Q9UH99
  ENST ID: ENST00000406622
  CDS Start-End: 214-2367
actcttgtttcgctccttgacaaccctggcgggggttcgctggctgcggccccggctccggcccccgcaggagcagctgcccctagggggagacagactcgcctgctgtgcctgggtcggaaggattcccgctgctcatcctcatcctggatacaggtggcaggcgccaagccaggattctcttcaggggaagagtccacatcccacctcatcatgtcccgaagaagccagcgcctcacgcgctactcccagggtgacgatgacggcagcagcagcagcggagggagctcggtggctgggagtcagagcaccctgtttaaagacagtcctctcaggaccttgaagaggaaatccagcaacatgaagcgcctgtccccagcgccacagctgggcccgtcctctgatgcacacacctcctactacagtgagtcgctggtccacgagtcctggttcccacccaggagctccctggaggaactgcatggtgacgccaactggggtgaggacctgcgggtgcggaggaggagaggcacgggtggctcagagagcagcagggccagcgggcttgtggggcgcaaggccaccgaggacttcctgggctcttcctcgggctactcctctgaggacgactacgtgggctactcggatgtggaccagcagagttccagctcgcggctccgaagcgccgtctcacgggcgggctccttactctggatggtggccacttcgccaggccggctcttcagacttctctactggtgggctggcaccacctggtaccgcctgaccacagctgcctccctccttgacgtcttcgttttaaccaggcgcttctcgtccctgaagacgttcctctggttcctgctgccgctgctcttgctgacgtgcctgacgtatggtgcttggtatttctacccctatgggctgcagacattccaccctgctttggtttcctggtgggcagcgaaggacagcaggaggccggatgagggctgggaagccagagactcatcgccacatttccaggctgagcagcgtgttatgtcccgggtacactctctggagcggcgtctggaagctcttgctgctgaattttcctccaactggcagaaggaggccatgcggctggaacgtctggagctgcggcaaggggctcctggccagggaggtggtggtggcctgagccacgaggacaccctggcgctgctggaggggctagtgagccgccgtgaagctgccctgaaggaggatttccgcagggaaactgctgctcgcatccaggaagaactgtctgccctgagagcagagcatcagcaagactcagaagacctcttcaagaagatcgtccgggcctcccaggagtccgaggctcgcatccagcagctgaagtcagagtggcaaagcatgacccaggagtccttccaggagagctctgtgaaggagctgaggcggctggaggaccagctggccggcctgcagcaggagctggcggctctggcactgaagcagagctcggtggcggaagaagtgggcctgctgccccagcagatccaggccgtgcgggacgacgtggaatctcagttcccggcctggatcagtcagttccttgcccgaggtggagggggccgcgtggggctccttcagagagaggagatgcaagctcagctgcgagagctggagagcaagatcctcacccatgtggcagagatgcagggcaagtcggccagggaagccgcggcctccctgagcctgacgctgcagaaagaaggtgtgattggagtgacagaggagcaggtgcaccacatcgtgaagcaggccctgcagcgctacagtgaggaccgcatcgggctggcagactacgccctggagtcaggaggggccagcgtcatcagcacccgatgttctgagacctacgagaccaagacggccctcctcagcctcttcggcatccccctgtggtaccactcccagtcaccccgagtcatcctccagccagatgtgcacccaggcaactgctgggccttccaggggccacaaggcttcgccgtggtccgcctctctgcccgcatccgccccacagccgttaccttagagcatgtgcccaaggccttgtcacccaacagcactatctccagtgcccccaaggacttcgccatctttgggtttgacgaagacctgcagcaggaggggacactccttggcaagttcacttacgatcaggacggcgagcctattcagacgtttcactttcaggcccctacgatggccacgtaccaggtggtggagctgcggatcctgactaactggggccaccccgagtacacctgcatctaccgcttcagagtgcatggggagcccgcccactagccctgcttactggtgcctgctgccagccatctgggagtgggtgaacagcaccccgccgcttcccccacacgcttgctcggcgctctgacttctaggagcacaagagaggagcctgtggccccatgcagatgaaaaggacgggcagggtctcctgagcagcaggtggctcgaggcggttagcaggctccagcagctcccttcttccttccctctgtgcccgtggcgtctgcttcccatcctgggagtgtgtatatatgtagcatatcatgggggactgggaagttgggagaggtaggacctgactggtcttggctggggtcaggggctggtgcctgggagctgatgaagcaggtgccag

SEQ ID NO: 178797 - DNA, 4022 bp, Homo sapiens
  Payload ID: 15242
  Gene Symbol: SUN2
  Gene Name: Sad1 and UNC84 domain containing 2
  Uniprot ID: Q9UH99
  ENST ID: ENST00000405018
  CDS Start-End: 275-2491
cacacgcgcgccgcccggccccactcgcgcagcgcgggcctccgccggccgcattgtccgcccgcccgccttgtcccgcgtcgccgctcttcgcgtgcccgcgcgccccgggcccggccgctgtgtcgccctgagcggagcgccgcccgcgggatccccacgcggaaagggggcgcgccccggcggcggcctggcctcggacgcccccggccgggctagaagccgccgcggcagcagattctcttcaggggaagagtccacatcccacctcatcatgtcccgaagaagccagcgcctcacgcgctactcccagggtgacgatgacggcagcagcagcagcggagggagctcggtggctgggagtcagagcaccctgtttaaagacagtcctctcaggaccttgaagaggaaatccagcaacatgaagcgcctgtccccagcgccacagctgggcccgtcctctgatgcacacacctcctactacagtgagtcgctggtccacgagtcctggttcccacccaggagctccctggaggaactgcatggtgacgccaactggggtgaggacctgcgggtgcggaggaggagaggcacgggtggctcagagagcagcagggccagcgggcttgtggggcgcaaggccaccgaggacttcctgggctcttcctcgggctactcctctgaggacgactacgtggaagacagtgaaggaagaggctcgaaagtgacagagactgagccagtgtcctcgttccccgcaggctactcggatgtggaccagcagagttccagctcgcggctccgaagcgccgtctcacgggcgggctccttactctggatggtggccacttcgccaggccggctcttcagacttctctactggtgggctggcaccacctggtaccgcctgaccacagctgcctccctccttgacgtcttcgttttaaccaggcgcttctcgtccctgaagacgttcctctggttcctgctgccgctgctcttgctgacgtgcctgacgtatggtgcttggtatttctacccctatgggctgcagacattccaccctgctttggtttcctggtgggcagcgaaggacagcaggaggccggatgagggctgggaagccagagactcatcgccacatttccaggctgagcagcgtgttatgtcccgggtacactctctggagcggcgtctggaagctcttgctgctgaattttcctccaactggcagaaggaggccatgcggctggaacgtctggagctgcggcaaggggctcctggccagggaggtggtggtggcctgagccacgaggacaccctggcgctgctggaggggctagtgagccgccgtgaagctgccctgaaggaggatttccgcagggaaactgctgctcgcatccaggaagaactgtctgccctgagagcagagcatcagcaagactcagaagacctcttcaagaagatcgtccgggcctcccaggagtccgaggctcgcatccagcagctgaagtcagagtggcaaagcatgacccaggagtccttccaggagagctctgtgaaggagctgaggcggctggaggaccagctggccggcctgcagcaggagctggcggctctggcactgaagcagagctcggtggcggaagaagtgggcctgctgccccagcagatccaggccgtgcgggacgacgtggaatctcagttcccggcctggatcagtcagttccttgcccgaggtggagggggccgcgtggggctccttcagagagaggagatgcaagctcagctgcgagagctggagagcaagatcctcacccatgtggcagagatgcagggcaagtcggccagggaagccgcggcctccctgagcctgacgctgcagaaagaaggtgtgattggagtgacagaggagcaggtgcaccacatcgtgaagcaggccctgcagcgctacagtgaggaccgcatcgggctggcagactacgccctggagtcaggaggggccagcgtcatcagcacccgatgttctgagacctacgagaccaagacggccctcctcagcctcttcggcatccccctgtggtaccactcccagtcaccccgagtcatcctccagccagatgtgcacccaggcaactgctgggccttccaggggccacaaggcttcgccgtggtccgcctctctgcccgcatccgccccacagccgttaccttagagcatgtgcccaaggccttgtcacccaacagcactatctccagtgcccccaaggacttcgccatctttgggtttgacgaagacctgcagcaggaggggacactccttggcaagttcacttacgatcaggacggcgagcctattcagacgtttcactttcaggcccctacgatggccacgtaccaggtggtggagctgcggatcctgactaactggggccaccccgagtacacctgcatctaccgcttcagagtgcatggggagcccgcccactagccctgcttactggtgcctgctgccagccatctgggagtgggtgaacagcaccccgccgcttcccccacacgcttgctcggcgctctgacttctaggagcacaagagaggagcctgtggccccatgcagatgaaaaggacgggcagggtctcctgagcagcaggtggctcgaggcggttagcaggctccagcagctcccttcttccttccctctgtgcccgtggcgtctgcttcccatcctgggagtgtgtatatatgtagcatatcatgggggactgggaagttgggagaggtaggacctgactggtcttggctggggtcaggggctggtgcctgggagctgatgaagcaggtgccagggctgtgggaggggcaagctacggcctgggctaggtgagctgcctctgcccctgggcaaggaagcgaggccctctgggaggagggtgcttagctccagagcaggatgggacttccccaggcaggaagcacttgatggagagctgcccagctctcctacaaggttagtgccctccacctagggaagcatgaaccacagggtccctgagggccttcgacaaaagtgtgtatttgtcccggggagggtagcagtgggccatggggcttcttgtgccctaaaggggactggctgctgtgatcttctaaggggcccagggccaaccctgtaggcttcccctctgctggggacggtagttgcttttctctctcctgatgctaggttggggcccaccctgctccctgttcctgctagggcctgccagtgcccctgagcttgctttccacattctcccagggtatggagacctagacctgtctttggggccattagcatctggggttatagcaagaagagtggggagcatggaactcctgggctcttgtggggacgttcagggtatcggggtgcgaggtctgtctgcaccggcccccacatctaaccaggccctgatgtaggggtcgtccgctcaggctgcccccttgggctcttgcagctcttgttcaggtagtcgcccttctggtttgttctctgtggggcagttggtgggggctgggggaagaggctggcagaagttaccctggatagggaagggggaggaggggacttttagagccagcaggccccactgtattatgtatatatttttcaaggtctgtttttctaactgaaaagctaagggcttgattcctagccccgttctgtggggcactgggtgatactcagtttcttgttcctggccgtggagaggggcctggggcactggttccggctgtgtctggtggtctggctgcggggaaggggcaagaaggcgggcaggccttcactgcagcactgagcctcaaatccgctctggagcatgaggctggatgcagtggtggtgaggccgccccgctccatcccgaggcagccagggtttgttttgcgctctcctgtcacaaatgctgcactattggttcttaagttttttatctccagatcctaatttatgcctatgcaaaaaataaatgacgcccaa

SEQ ID NO: 178798 - DNA, 4055 bp, Homo sapiens
  Payload ID: 15242
  Gene Symbol: SUN2
  Gene Name: Sad1 and UNC84 domain containing 2
  Uniprot ID: Q9UH99
  ENST ID: ENST00000405510
  CDS Start-End: 360-2513
ggacttcccgggcagcctcccgggaggaggagggcaaaggccgactgccccaacccggccccgggcagcgcctacgggttttgtgccagacaggccgtttccagggacaggcagttcccagcctctgcctgtcagaactcagggcctcagaggaaggcccgttttgttcagttctaaaacaaaacaaaacaaagcaatggggggcgcggtgtgacttagagagccaggaggcgcgcctttggtgacaatttctgcaggtgtcacctccttcagcaggacagaggctaagaggagtccctgtgtgggcagctggagccttcagattctcttcaggggaagagtccacatcccacctcatcatgtcccgaagaagccagcgcctcacgcgctactcccagggtgacgatgacggcagcagcagcagcggagggagctcggtggctgggagtcagagcaccctgtttaaagacagtcctctcaggaccttgaagaggaaatccagcaacatgaagcgcctgtccccagcgccacagctgggcccgtcctctgatgcacacacctcctactacagtgagtcgctggtccacgagtcctggttcccacccaggagctccctggaggaactgcatggtgacgccaactggggtgaggacctgcgggtgcggaggaggagaggcacgggtggctcagagagcagcagggccagcgggcttgtggggcgcaaggccaccgaggacttcctgggctcttcctcgggctactcctctgaggacgactacgtgggctactcggatgtggaccagcagagttccagctcgcggctccgaagcgccgtctcacgggcgggctccttactctggatggtggccacttcgccaggccggctcttcagacttctctactggtgggctggcaccacctggtaccgcctgaccacagctgcctccctccttgacgtcttcgttttaaccaggcgcttctcgtccctgaagacgttcctctggttcctgctgccgctgctcttgctgacgtgcctgacgtatggtgcttggtatttctacccctatgggctgcagacattccaccctgctttggtttcctggtgggcagcgaaggacagcaggaggccggatgagggctgggaagccagagactcatcgccacatttccaggctgagcagcgtgttatgtcccgggtacactctctggagcggcgtctggaagctcttgctgctgaattttcctccaactggcagaaggaggccatgcggctggaacgtctggagctgcggcaaggggctcctggccagggaggtggtggtggcctgagccacgaggacaccctggcgctgctggaggggctagtgagccgccgtgaagctgccctgaaggaggatttccgcagggaaactgctgctcgcatccaggaagaactgtctgccctgagagcagagcatcagcaagactcagaagacctcttcaagaagatcgtccgggcctcccaggagtccgaggctcgcatccagcagctgaagtcagagtggcaaagcatgacccaggagtccttccaggagagctctgtgaaggagctgaggcggctggaggaccagctggccggcctgcagcaggagctggcggctctggcactgaagcagagctcggtggcggaagaagtgggcctgctgccccagcagatccaggccgtgcgggacgacgtggaatctcagttcccggcctggatcagtcagttccttgcccgaggtggagggggccgcgtggggctccttcagagagaggagatgcaagctcagctgcgagagctggagagcaagatcctcacccatgtggcagagatgcagggcaagtcggccagggaagccgcggcctccctgagcctgacgctgcagaaagaaggtgtgattggagtgacagaggagcaggtgcaccacatcgtgaagcaggccctgcagcgctacagtgaggaccgcatcgggctggcagactacgccctggagtcaggaggggccagcgtcatcagcacccgatgttctgagacctacgagaccaagacggccctcctcagcctcttcggcatccccctgtggtaccactcccagtcaccccgagtcatcctccagccagatgtgcacccaggcaactgctgggccttccaggggccacaaggcttcgccgtggtccgcctctctgcccgcatccgccccacagccgttaccttagagcatgtgcccaaggccttgtcacccaacagcactatctccagtgcccccaaggacttcgccatctttgggtttgacgaagacctgcagcaggaggggacactccttggcaagttcacttacgatcaggacggcgagcctattcagacgtttcactttcaggcccctacgatggccacgtaccaggtggtggagctgcggatcctgactaactggggccaccccgagtacacctgcatctaccgcttcagagtgcatggggagcccgcccactagccctgcttactggtgcctgctgccagccatctgggagtgggtgaacagcaccccgccgcttcccccacacgcttgctcggcgctctgacttctaggagcacaagagaggagcctgtggccccatgcagatgaaaaggacgggcagggtctcctgagcagcaggtggctcgaggcggttagcaggctccagcagctcccttcttccttccctctgtgcccgtggcgtctgcttcccatcctgggagtgtgtatatatgtagcatatcatgggggactgggaagttgggagaggtaggacctgactggtcttggctggggtcaggggctggtgcctgggagctgatgaagcaggtgccagggctgtgggaggggcaagctacggcctgggctaggtgagctgcctctgcccctgggcaaggaagcgaggccctctgggaggagggtgcttagctccagagcaggatgggacttccccaggcaggaagcacttgatggagagctgcccagctctcctacaaggttagtgccctccacctagggaagcatgaaccacagggtccctgagggccttcgacaaaagtgtgtatttgtcccggggagggtagcagtgggccatggggcttcttgtgccctaaaggggactggctgctgtgatcttctaaggggcccagggccaaccctgtaggcttcccctctgctggggacggtagttgcttttctctctcctgatgctaggttggggcccaccctgctccctgttcctgctagggcctgccagtgcccctgagcttgctttccacattctcccagggtatggagacctagacctgtctttggggccattagcatctggggttatagcaagaagagtggggagcatggaactcctgggctcttgtggggacgttcagggtatcggggtgcgaggtctgtctgcaccggcccccacatctaaccaggccctgatgtaggggtcgtccgctcaggctgcccccttgggctcttgcagctcttgttcaggtagtcgcccttctggtttgttctctgtggggcagttggtgggggctgggggaagaggctggcagaagttaccctggatagggaagggggaggaggggacttttagagccagcaggccccactgtattatgtatatatttttcaaggtctgtttttctaactgaaaagctaagggcttgattcctagccccgttctgtggggcactgggtgatactcagtttcttgttcctggccgtggagaggggcctggggcactggttccggctgtgtctggtggtctggctgcggggaaggggcaagaaggcgggcaggccttcactgcagcactgagcctcaaatccgctctggagcatgaggctggatgcagtggtggtgaggccgccccgctccatcccgaggcagccagggtttgttttgcgctctcctgtcacaaatgctgcactattggttcttaagttttttatctccagatcctaatttatgcctatgcaaaaaataaatgacgcccaagagctgtggga

SEQ ID NO: 178799 - DNA, 872 bp, Homo sapiens
  Payload ID: 15242
  Gene Symbol: SUN2
  Gene Name: Sad1 and UNC84 domain containing 2
  ENST ID: ENST00000455125
  CDS Start-End: 1-597
gtgcaccacatcgtgaagcaggccctgcagcgctacagtgaggaccgcatcgggctggcagactacgccctggagtcaggaggggccagcgtcatcagcacccgatgttctgagacctacgagaccaagacggccctcctcagcctcttcggcatccccctgtggtaccactcccagtcaccccgagtcatcctccagccagatgtgcacccaggcaactgctgggccttccaggggccacaaggcttcgccgtggtccgcctctctgcccgcatccgccccacagccgttaccttagagcatgtgcccaaggccttgtcacccaacagcactatctccagtgcccccaaggacttcgccatctttgggtttgacgaagacctgcagcaggaggggacactccttggcaagttcacttacgatcaggacggcgagcctattcagacgtttcactttcaggtacgggatgctgctgtgctagcagaagtggcgcagactccccatccaggcagcaggtgctccctgggcacttaccctgccaggcatggggttcagagagggaagccctgctctcctttcccacagctcaagatgtgatatccaaatggggtgtaacacgcatcctgcagacgtcagcacaggggaaggcaccttccagaagggcagcatgagggaagcttcctggaaaaggacaccaggaggtgggctttacacaagaggggttgggtggccaggaaaggaaggccgggagaggcgttcgaggagccgccgccagcacatgccagggcgcgggcattctaccatggccagctggagcctcaggcagtgcatgcggcttaaacttcagtgggcatccgatctcctaagtcagt

SEQ ID NO: 178800 - DNA, 546 bp, Homo sapiens
  Payload ID: 15242
  Gene Symbol: SUN2
  Gene Name: Sad1 and UNC84 domain containing 2
  ENST ID: ENST00000439339
  CDS Start-End: 245-546
tccagggacaggcagttcccagcctctgcctgtcagaactcagggcctcagaggaaggcccgttttgttcagttctaaaacaaaacaaaacaaagcaatggggggcgcggtgtgacttagagagccaggaggcgcgcctttggtgacaatttctgcagcaggacagaggctaagaggagtccctgtgtgggcagctggagccttcagattctcttcaggggaagagtccacatcccacctcatcatgtcccgaagaagccagcgcctcacgcgctactcccagggtgacgatgacggcagcagcagcagcggagggagctcggtggctgggagtcagagcaccctgtttaaagacagtcctctcaggaccttgaagaggaaatccagcaacatgaagcgcctgtccccagcgccacagctgggcccgtcctctgatgcacacacctcctactacagtgagtcgctggtccacgagtcctggttcccacccaggagctccctggaggaactgcatggtgacgccaactggggtgaggacctgcgggt

SEQ ID NO: 178801 - DNA, 454 bp, Homo sapiens
  Payload ID: 15242
  Gene Symbol: SUN2
  Gene Name: Sad1 and UNC84 domain containing 2
  ENST ID: ENST00000430185
  CDS Start-End: 1-431
cggatgtggaccagcagagttccagctcgcggctccgaagcgccgtctcacgggcgggctccttactctggatggtggccacttcgccaggccggctcttcagacttctctactggtgggctggcaccacctggtaccgcctgaccacagctgcctccctccttgacgtcttcgttttaaccaggcgcttctcgtccctgaagacgttcctctggttcctgctgccgctgctcttgctgacgtgcctgacgtatggtgcttggtatttctacccctatgggctgcagacattccaccctgctttggtttcctggtgggcagcgaaggacagcaggaggccggatgagggctgggaagccagagactcatcgccacatttccaggcagggtttcaagagagaaccaaggcaaccagacctttgaggccttgatccagaaccagcacaccgtcact

SEQ ID NO: 178802 - DNA, 1012 bp, Homo sapiens
  Payload ID: 15242
  Gene Symbol: SUN2
  Gene Name: Sad1 and UNC84 domain containing 2
  ENST ID: ENST00000438058
  CDS Start-End: 341-1012
ccacacgcgcgccgcccggccccactcgcgcagcgcgggcctccgccggccgcattgtccgcccgcccgccttgtcccgcgtcgccgctcttcgcgtgcccgcgcgccccgggcccggccgctgtgtcgccctgagcggagcgccgcccgcgggatccccacgcggaaagggggcgcgccccggcggcggcctggcctcggacgcccccggccgggctagaagccgccgcggcagcaggtgtcacctccttcagcaggacagaggctaagaggagtccctgtgtgggcagctggagccttcagattctcttcaggggaagagtccacatcccacctcatcatgtcccgaagaagccagcgcctcacgcgctactcccagggtgacgatgacggcagcagcagcagcggagggagctcggtggctgggagtcagagcaccctgtttaaagacagtcctctcaggaccttgaagaggaaatccagcaacatgaagcgcctgtccccagcgccacagctgggcccgtcctctgatgcacacacctcctactacagtgagtcgctggtccacgagtcctggttcccacccaggagctccctggaggaactgcatggtgacgccaactggggctactcggatgtggaccagcagagttccagctcgcggctccgaagcgccgtctcacgggcgggctccttactctggatggtggccacttcgccaggccggctcttcagacttctctactggtgggctggcaccacctggtaccgcctgaccacagctgcctccctccttgacgtcttcgttttaaccaggcgcttctcgtccctgaagacgttcctctggttcctgctgccgctgctcttgctgacgtgcctgacgtatggtgcttggtatttctacccctatgggctgcagacattccaccctgctttggtttcctggtgggcagcgaaggacagcaggaggccggatgagggctgggaagccagagactcatcgccacatttc

SEQ ID NO: 178803 - DNA, 538 bp, Homo sapiens
  Payload ID: 15242
  Gene Symbol: SUN2
  Gene Name: Sad1 and UNC84 domain containing 2
  ENST ID: ENST00000420859
  CDS Start-End: 157-538
gttttggagaatggggcctcgacctttttcatcttgtgaaacccagactcaatggtgtcacctccttcagcaggacagaggctaagaggagtccctgtgtgggcagctggagccttcagattctcttcaggggaagagtccacatcccacctcatcatgtcccgaagaagccagcgcctcacgcgctactcccagggtgacgatgacggcagcagcagcagcggagggagctcggtggctgggagtcagagcaccctgtttaaagacagtcctctcaggaccttgaagaggaaatccagcaacatgaagcgcctgtccccagcgccacagctgggcccgtcctctgatgcacacacctcctactacagtgagtcgctggtccacgagtcctggttcccacccaggagctccctggaggaactgcatggtgacgccaactggggctactcggatgtggaccagcagagttccagctcgcggctccgaagcgccgtctcacgggcgggctccttactctggatggtggccacttcgccag

SEQ ID NO: 178804 - DNA, 444 bp, Homo sapiens
  Payload ID: 15242
  Gene Symbol: SUN2
  Gene Name: Sad1 and UNC84 domain containing 2
  ENST ID: ENST00000433561
  CDS Start-End: 115-444
ggatccagcctccacccgggtccgcggcccgcgccctgactcacctcctggcccccgccccgcctgccgcgccactgattctcttcaggggaagagtccacatcccacctcatcatgtcccgaagaagccagcgcctcacgcgctactcccagggtgacgatgacggcagcagcagcagcggagggagctcggtggctgggagtcagagcaccctgtttaaagacagtcctctcaggaccttgaagaggaaatccagcaacatgaagcgcctgtccccagcgccacagctgggcccgtcctctgatgcacacacctcctactacagtgagtcgctggtccacgagtcctggttcccacccaggagctccctggaggaactgcatggtgacgccaactggggtgaggacctgcgggtgcggaggaggagaggcacgggtggctca

SEQ ID NO: 178805 - DNA, 545 bp, Homo sapiens
  Payload ID: 15242
  Gene Symbol: SUN2
  Gene Name: Sad1 and UNC84 domain containing 2
  ENST ID: ENST00000417332
  CDS Start-End: 172-545
atttagttcttcccagcggcagcttgggtatggtataaacatgttgccttgtttctgccctgggcaaaggtgtcacctccttcagcaggacagaggctaagaggagtccctgtgtgggcagctggagccttcagattctcttcaggggaagagtccacatcccacctcatcatgtcccgaagaagccagcgcctcacgcgctactcccagggtgacgatgacggcagcagcagcagcggagggagctcggtggctgggagtcagagcaccctgtttaaagacagtcctctcaggaccttgaagaggaaatccagcaacatgaagcgcctgtccccagcgccacagctgggcccgtcctctgatgcacacacctcctactacagtgagtcgctggtccacgagtcctggttcccacccaggagctccctggaggaactgcatggtgacgccaactgggaccccacttttcagaagctcttggaggcccagaagagcccctggttcttccctgcacaggtgaggacctgcgggtgcggaggaggaga

SEQ ID NO: 178806 - DNA, 621 bp, Homo sapiens
  Payload ID: 15242
  Gene Symbol: SUN2
  Gene Name: Sad1 and UNC84 domain containing 2
  ENST ID: ENST00000452294
  CDS Start-End: 188-621
gtagatttcagctcccagaggctcacttcttgttttggagaatggggcctcgacctttttcatcttgtgaaacccagactcaatggtgtcacctccttcagcaggacagaggctaagaggagtccctgtgtgggcagctggagccttcagattctcttcaggggaagagtccacatcccacctcatcatgtcccgaagaagccagcgcctcacgcgctactcccagggtgacgatgacggcagcagcagcagcggagggagctcggtggctgggagtcagagcaccctgtttaaagacagtcctctcaggaccttgaagaggaaatccagcaacatgaagcgcctgtccccagcgccacagctgggcccgtcctctgatgcacacacctcctactacagtgagtcgctggtccacgagtcctggttcccacccaggagctccctggaggaactgcatggtgacgccaactggggtgaggacctgcgggtgcggaggaggagaggcacgggtggctcagagagcagcagggccagcgggcttgtggggcgcaaggccaccgaggacttcctgggctcttcctcgggctactcctctgaggacgactacgtgggtaggcgatg

SEQ ID NO: 178807 - DNA, 1074 bp, Homo sapiens
  Payload ID: 15242
  Gene Symbol: SUN2
  Gene Name: Sad1 and UNC84 domain containing 2
  ENST ID: ENST00000456894
  CDS Start-End: 390-1074
gattcgcagtagtagatttcagctcccagaggctcacttcttgttttggagaatggggcctcgacctttttcatcttgtgaaacccagactcaatggtaaactgttttgtgatgccaggatgccgcaggaaagactgagaggcatctctgggagttctgggagggcggaggcgggtgctgacagttttcagcactccccgctcaacctccatcagaatatttagttcttcccagcggcagcttgggtatggtataaacatgttgccttgtttctgccctgggcaaaggtgtcacctccttcagcaggacagaggctaagaggagtccctgtgtgggcagctggagccttcagattctcttcaggggaagagtccacatcccacctcatcatgtcccgaagaagccagcgcctcacgcgctactcccagggtgacgatgacggcagcagcagcagcggagggagctcggtggctgggagtcagagcaccctgtttaaagacagtcctctcaggaccttgaagaggaaatccagcaacatgaagcgcctgtccccagcgccacagctgggcccgtcctctgatgcacacacctcctactacagtgagtcgctggtccacgagtcctggttcccacccaggagctccctggaggaactgcatggtgacgccaactggggtgaggacctgcgggtgcggaggaggagaggcacgggtggctcagagagcagcagggccagcgggcttgtggggcgcaaggccaccgaggacttcctgggctcttcctcgggctactcctctgaggacgactacgtgggctactcggatgtggaccagcagagttccagctcgcggctccgaagcgccgtctcacgggcgggctccttactctggatggtggccacttcgccaggccggctcttcagacttctctactggtgggctggcaccacctggtaccgcctgaccacagctgcctccctccttgacgtcttcgttttaaccaggcgcttctcgtccctgaagacgttcctctggttcctgctgccgctgctcttgctgacgtgcctgacgtatg

SEQ ID NO: 178808 - DNA, 1416 bp, Homo sapiens
  Payload ID: 15243
  Gene Symbol: SUN3
  Gene Name: Sad1 and UNC84 domain containing 3
  Uniprot ID: Q8TAQ9
  ENST ID: ENST00000297325
  CDS Start-End: 161-1234
tcaaaattccgtcttcaagaagaaacacccgtggaggaagaagacattatacaaaacaaatttagaaactgtatgtatagcttcatgtttttcataaaataggaatgaggacaaatgttgctcttcatcctaccagctgtttgttctttggtaggggatcatgagtggaaaaacaaaggcaagaagggctgccatgttttttagacgttgctctgaagacgccagcggtagcgccagtggcaatgctttgttatcagaggacgaaaatcctgatgcgaatggggtaactcgatcatggaagattattctaagtacaatgcttacactgacttttcttcttgtaggactcctaaatcatcagtggcttaaagaaacagatgttcctcagaaatccagacaattatatgccataattgcagaatatggttcaaggctttataaatatcaggccagacttcgtatgcctaaagagcaactggaacttttaaagaaggaaagccagaatctggaaaacaattttcgtcaaattctatttttgatcgaacaaatagatgtcctgaaggcattgctaagagatatgaaggatggtatggacaataatcacaactggaacacccatggagaccctgtggaggacccggaccacacagaggaagtgtcaaacttggtcaattatgtacttaaaaagttgagagaagaccaagtcgagatggctgattatgccctgaagtcggccggagcctccatcattgaagctgggacctcagaaagttataaaaataataaagcaaaattgtactggcatgggataggtttcctaaatcatgaaatgcctccagatattattcttcagccggatgtctaccctggaaagtgctgggcttttccaggttcccagggtcataccctaatcaagcttgctacaaagatcataccaactgctgttaccatggagcacatctcagagaaggtgtctccgtcaggaaacatctccagtgcacccaaggaattttctgtctatggcatcacaaaaaaatgtgaaggagaagaaattttcctaggtcagtttatatataacaaaacaggaaccaccgttcaaacatttgaactccagcatgcagtttctgaatatttattatgtgtgaaacttaatatctttagcaactggggacacccgaagtatacttgtttatatcgattcagggtccatggcacaccaggcaagcacatctagaagagttggtacagaaggccatgccacatgtccagaatattcaagaatgcttattctcttagatgataccgcacccataggaattgagaattgggagtgggaagaaaacctcaaagtggttcatacttgcctgtaaaaagtaaatgcattttactaataaaaaaatatggaagtaaattaaa

SEQ ID NO: 178809 - DNA, 1348 bp, Homo sapiens
  Payload ID: 15243
  Gene Symbol: SUN3
  Gene Name: Sad1 and UNC84 domain containing 3
  Uniprot ID: Q8TAQ9
  ENST ID: ENST00000395572
  CDS Start-End: 98-1171
aacagaagaatcagaagcttttcaaaattccgtcttcaagaagaaacacccgtggaggaagaagacattatacaaaacaaatttagaaactgggatcatgagtggaaaaacaaaggcaagaagggctgccatgttttttagacgttgctctgaagacgccagcggtagcgccagtggcaatgctttgttatcagaggacgaaaatcctgatgcgaatggggtaactcgatcatggaagattattctaagtacaatgcttacactgacttttcttcttgtaggactcctaaatcatcagtggcttaaagaaacagatgttcctcagaaatccagacaattatatgccataattgcagaatatggttcaaggctttataaatatcaggccagacttcgtatgcctaaagagcaactggaacttttaaagaaggaaagccagaatctggaaaacaattttcgtcaaattctatttttgatcgaacaaatagatgtcctgaaggcattgctaagagatatgaaggatggtatggacaataatcacaactggaacacccatggagaccctgtggaggacccggaccacacagaggaagtgtcaaacttggtcaattatgtacttaaaaagttgagagaagaccaagtcgagatggctgattatgccctgaagtcggccggagcctccatcattgaagctgggacctcagaaagttataaaaataataaagcaaaattgtactggcatgggataggtttcctaaatcatgaaatgcctccagatattattcttcagccggatgtctaccctggaaagtgctgggcttttccaggttcccagggtcataccctaatcaagcttgctacaaagatcataccaactgctgttaccatggagcacatctcagagaaggtgtctccgtcaggaaacatctccagtgcacccaaggaattttctgtctatggcatcacaaaaaaatgtgaaggagaagaaattttcctaggtcagtttatatataacaaaacaggaaccaccgttcaaacatttgaactccagcatgcagtttctgaatatttattatgtgtgaaacttaatatctttagcaactggggacacccgaagtatacttgtttatatcgattcagggtccatggcacaccaggcaagcacatctagaagagttggtacagaaggccatgccacatgtccagaatattcaagaatgcttattctcttagatgataccgcacccataggaattgagaattgggagtgggaagaaaacctcaaagtggttcatacttgcctgtaaaaagtaaatgcattttactaataaaaaaatatggaagtaaa

SEQ ID NO: 178810 - DNA, 801 bp, Homo sapiens
  Payload ID: 15243
  Gene Symbol: SUN3
  Gene Name: Sad1 and UNC84 domain containing 3
  ENST ID: ENST00000453192
  CDS Start-End: 1-801
atgcctaaagagcaactggaacttttaaagaaggaaagccagaatctggaaaacaattttcgtcaaattctatttttgatcgaacaaatagatgtcctgaaggcattgctaagagatatgaaggatggtatggacaataatcacaactggaacacccatggagaccctgtggaggacccggaccacacagaggaagtgtcaaacttggtcaattatgtacttaaaaagttgagagaagaccaagtcgagatggctgattatgccctgaagtcggccggagcctccatcattgaagctgggacctcagaaagttataaaaataataaagcaaaattgtactggcatgggataggtttcctaaatcatgaaatgcctccagatattattcttcagccggatgtctaccctggaaagtgctgggcttttccaggttcccagggtcataccctaatcaagcttgctacaaagatcataccaactgctgttaccatggagcacatctcagagaaggtgtctccgtcaggaaacatctccagtgcacccaaggaattttctgtctatgtaagaagctatatctgttgctttcttatagggcatcacaaaaaagaaggagaagaaattttcctaggtcagtttatatataacaaaacaggaaccaccgttcaaacatttgaactccagcatgcagtttctgaatatttattatgtgtgaaacttaatatctttagcaactggggacacccgaagtatacttgtttatatcgattcagggtccatggcacaccaggcaagcacatctag

SEQ ID NO: 178811 - DNA, 1027 bp, Homo sapiens
  Payload ID: 15243
  Gene Symbol: SUN3
  Gene Name: Sad1 and UNC84 domain containing 3
  ENST ID: ENST00000453071
  CDS Start-End: 1-845
tatatgccataattgcagaatatggttcaaggctttataaatatcaggccagacttcgtatgcctaaagagcaactggaacttttaaagaaggaaagccagaatctggaaaacaattttcgtcaaattctatttttgatcgaacaaatagatgtcctgaaggcattgctaagagatatgaaggatggtatggacaataatcacaactggaacacccatggagaccctgtggaggacccggaccacacagaggtcctggatgaggaagtgtcaaacttggtcaattatgtacttaaaaagttgagagaagaccaagtcgagatggctgattatgccctgaagtcggccggagcctccatcattgaagctgggacctcagaaagttataaaaataataaagcaaaattgtactggcatgggataggtttcctaaatcatgaaatgcctccagatattattcttcagccggatgtctaccctggaaagtgctgggcttttccaggttcccagggtcataccctaatcaagcttgctacaaagatcataccaactgctgttaccatggagcacatctcagagaaggtgtctccgtcaggaaacatctccagtgcacccaaggaattttctgtctatggcatcacaaaaaaatgtgaaggagaagaaattttcctaggtcagtttatatataacaaaacaggaaccaccgttcaaacatttgaactccagcatgcagtttctgaatatttattatgtgtgaaacttaatatctttagcaactggggacacccgaagtatacttgtttatatcgattcagggtccatggcacaccaggcaagcacatctagaagagttggtacagaaggccatgccacatgtccagaatattcaagaatgcttattctcttagatgataccgcacccataggaattgagaattgggagtgggaagaaaacctcaaagtggttcatacttgcctgtaaaaagtaaatgcattttactaataaaaaaatatggaagtaaattaaa

SEQ ID NO: 178812 - DNA, 1456 bp, Homo sapiens
  Payload ID: 15243
  Gene Symbol: SUN3
  Gene Name: Sad1 and UNC84 domain containing 3
  ENST ID: ENST00000449896
  CDS Start-End: 111-380
acaaaacaaatttagaaactgtatgtatagcttcatgtttttcataaaataggaatgaggacaaatgttgctcttcatcctaccagctgtttgttctttggtaggggatcatgagtggaaaaacaaaggcaagaagggctgccatgttttttagacgttgctctgaagacgccagcggtagcgccagtggcaatgctttgttatcagaggacgaaaatcctgatgcgaatggggtaactcgatcatggaagattattctaagtacaatgcttacactgacttttcttcttgtaggctggagtgcagtggtgcgatcttggctcactgcaacctccacctcctgggttcaagcatttctcctgcctcagcctcccgagtagctgggaccacaggactcctaaatcatcagtggcttaaagaaacagatgttcctcagaaatccagacaattatatgccataattgcagaatatggttcaaggctttataaatatcaggccagacttcgtatgcctaaagagcaactggaacttttaaagaaggaaagccagaatctggaaaacaattttcgtcaaattctatttttgatcgaacaaatagatgtcctgaaggcattgctaagagatatgaaggatggtatggacaataatcacaactggaacacccatggagaccctgtggaggacccggaccacacagaggaagtgtcaaacttggtcaattatgtacttaaaaagttgagagaagaccaagtcgagatggctgattatgccctgaagtcggccggagcctccatcattgaagctgggacctcagaaagttataaaaataataaagcaaaattgtactggcatgggataggtttcctaaatcatgaaatgcctccagatattattcttcagccggatgtctaccctggaaagtgctgggcttttccaggttcccagggtcataccctaatcaagcttgctacaaagatcataccaactgctgttaccatggagcacatctcagagaaggtgtctccgtcaggaaacatctccagtgcacccaaggaattttctgtctatggcatcacaaaaaaatgtgaaggagaagaaattttcctaggtcagtttatatataacaaaacaggaaccaccgttcaaacatttgaactccagcatgcagtttctgaatatttattatgtgtgaaacttaatatctttagcaactggggacacccgaagtatacttgtttatatcgattcagggtccatggcacaccaggcaagcacatctagaagagttggtacagaaggccatgccacatgtccagaatattcaagaatgcttattctcttagatgataccgcacccataggaattgagaattgggagtgggaagaaaacctcaaagtggttcatacttgcctgtaaaaagtaaatgcattttactaataaaaaaatatggaagt

SEQ ID NO: 178813 - DNA, 630 bp, Homo sapiens
  Payload ID: 15243
  Gene Symbol: SUN3
  Gene Name: Sad1 and UNC84 domain containing 3
  ENST ID: ENST00000412371
  CDS Start-End: 1-513
gaagaccaagtcgagatggctgattatgccctgaagtcggccggagcctccatcattgaagctgggacctcagaaagttataaaaataataaagcaaaattgtactggcatgggataggtttcctaaatcatgaaatgcctccagatattattcttcagccggatgtctaccctggaaagtgctgggcttttccaggttcccagggtcataccctaatcaagcttgctacaaagatcataccaactgctgttaccatggagcacatctcagagaaggtgtctccgtcaggaaacatctccagtgcacccaaggaattttctgtctatggcatcacaaaaaaatgtgaaggagaagaaattttcctaggtcagtttatatataacaaaacaggaaccaccgttcaaacatttgaactccagggtccatggcacaccaggcaagcacatctagaagagttggtacagaaggccatgccacatgtccagaatattcaagaatgcttattctcttagatgataccgcacccataggaattgagaattgggagtgggaagaaaacctcaaagtggttcatacttgcctgtaaaaagtaaatgcattttactaataaaaaaatatggaagtaaatt

SEQ ID NO: 178814 - DNA, 810 bp, Homo sapiens
  Payload ID: 15243
  Gene Symbol: SUN3
  Gene Name: Sad1 and UNC84 domain containing 3
  Uniprot ID: Q8TAQ9
  ENST ID: ENST00000438771
  CDS Start-End: 1-810
atgcctaaagagcaactggaacttttaaagaaggaaagccagaatctggaaaacaattttcgtcaaattctatttttgatcgaacaaatagatgtcctgaaggcattgctaagagatatgaaggatggtatggacaataatcacaactggaacacccatggagaccctgtggaggacccggaccacacagaggaagtgtcaaacttggtcaattatgtacttaaaaagttgagagaagaccaagtcgagatggctgattatgccctgaagtcggccggagcctccatcattgaagctgggacctcagaaagttataaaaataataaagcaaaattgtactggcatgggataggtttcctaaatcatgaaatgcctccagatattattcttcagccggatgtctaccctggaaagtgctgggcttttccaggttcccagggtcataccctaatcaagcttgctacaaagatcataccaactgctgttaccatggagcacatctcagagaaggtgtctccgtcaggaaacatctccagtgcacccaaggaattttctgtctatgttcagaggtatatgtgcaggtttgttatacaggcgggcatcacaaaaaaatgtgaaggagaagaaattttcctaggtcagtttatatataacaaaacaggaaccaccgttcaaacatttgaactccagcatgcagtttctgaatatttattatgtgtgaaacttaatatctttagcaactggggacacccgaagtatacttgtttatatcgattcagggtccatggcacaccaggcaagcacatctag

SEQ ID NO: 178815 - DNA, 1448 bp, Homo sapiens
  Payload ID: 15243
  Gene Symbol: SUN3
  Gene Name: Sad1 and UNC84 domain containing 3
  Uniprot ID: Q8TAQ9
  ENST ID: ENST00000412142
  CDS Start-End: 232-1269
aacagaagaatcagaagcttttcaaaattccgtcttcaagaagaaacacccgtggaggaagaagacattatacaaaacaaatttagaaactgggatcatgagtggaaaaacaaaggcaagaagggctgccatgttttttagacgttgctctgaagacgccagcggtagcgccagtggcaatgctttgttatcagaggacgaaaatcctgatgcgaatggggtaactcgatcatggaagattattctaagtacaatgcttacactgacttttcttcttgtaggctggagtgcagtggtgcgatcttggctcactgcaacctccacctcctgggttcaagcatttctcctgcctcagcctcccgagtagctgggaccacaggactcctaaatcatcagtggcttaaagaaacagatgttcctcagaaatccagacaattatatgccataattgcagaatatggttcaaggctttataaatatcaggccagacttcgtatgcctaaagagcaactggaacttttaaagaaggaaagccagaatctggaaaacaattttcgtcaaattctatttttgatcgaacaaatagatgtcctgaaggcattgctaagagatatgaaggatggtatggacaataatcacaactggaacacccatggagaccctgtggaggacccggaccacacagaggaagtgtcaaacttggtcaattatgtacttaaaaagttgagagaagaccaagtcgagatggctgattatgccctgaagtcggccggagcctccatcattgaagctgggacctcagaaagttataaaaataataaagcaaaattgtactggcatgggataggtttcctaaatcatgaaatgcctccagatattattcttcagccggatgtctaccctggaaagtgctgggcttttccaggttcccagggtcataccctaatcaagcttgctacaaagatcataccaactgctgttaccatggagcacatctcagagaaggtgtctccgtcaggaaacatctccagtgcacccaaggaattttctgtctatggcatcacaaaaaaatgtgaaggagaagaaattttcctaggtcagtttatatataacaaaacaggaaccaccgttcaaacatttgaactccagcatgcagtttctgaatatttattatgtgtgaaacttaatatctttagcaactggggacacccgaagtatacttgtttatatcgattcagggtccatggcacaccaggcaagcacatctagaagagttggtacagaaggccatgccacatgtccagaatattcaagaatgcttattctcttagatgataccgcacccataggaattgagaattgggagtgggaagaaaacctcaaagtggttcatacttgcctgtaaaaagtaaatgcattttactaataaaaaaatatggaagtaaatt

SEQ ID NO: 178816 - DNA, 1254 bp, Homo sapiens
  Payload ID: 15244
  Gene Symbol: SUN5
  Gene Name: Sad1 and UNC84 domain containing 5
  Uniprot ID: Q8TC36
  ENST ID: ENST00000356173
  CDS Start-End: 94-1233
acttttcaggggacattcagaggcatcagccccttcctcctcaccagctcccagagttcccatctccatccccaatcctaaagaaggaaatcgatgccacggtcctcaaggagccctggggacccaggcgccctactcgaagatgtggcccacaatcccagaccccggaggattgcccagcgaggccggaacaccagcaggatggcagaggacacctccccaaacatgaatgacaacatcctgttgcctgtccgcaacaatgaccaagccctaggcctgactcagtgcatgctgggatgtgtgtcctggttcacctgttttgcctgctccctgagaactcaggcccagcaggttctgtttaacacgtgcagatgcaagctgctgtgccagaagctcatggagaagacaggcattctgctcctctgtgctttcggattctggatgttttctattcacttaccatcgaaaatgaaagtctggcaggatgacagcataaatggtccactgcagagcttgaggttgtaccaggagaaggtgcgacatcacagtggggaaatccaggacctccgaggtagcatgaaccagctcattgccaagctccaggagatggaagccatgtccgatgagcaaaaaatggcccagaaaataatgaagatgatacacggagattacatcgaaaagccagactttgccctgaagtctataggggccagcattgactttgagcacacgtcagtcacctataaccatgagaaggcccactcctactggaactggatccagctgtggaactacgcacagcccccagacgtgatccttgagcccaacgtgacacctggcaattgctgggcctttgagggtgaccgcggccaggtgaccatccaattggctcagaaggtttacctgtccaacctcacgctgcagcacatccccaagaccatctcattgtcaggcagcctggacaccgcccccaaggacttcgtcatctatggcatggagggctcccccaaggaggaggtgttcctgggggcatttcagtttcagccagaaaacatcatccagatgttcccactccagaaccagccggcccgggctttcagtgcggtcaaggtgaagatctcaagcaactgggggaacccaggcttcacttgcctgtaccgcgtgcgagtgcatggctctgtggccccgcccagagagcagcctcaccagaacccctaccctaagagagattaaaatttattctttacccccaga

SEQ ID NO: 178817 - DNA, 513 bp, Homo sapiens
  Payload ID: 15244
  Gene Symbol: SUN5
  Gene Name: Sad1 and UNC84 domain containing 5
  ENST ID: ENST00000375519
  CDS Start-End: 20-388
atcctaaagaaggaaatcgatgccacggtcctcaaggagccctggggacccaggcgccctactcgaagatgtggcccacaatcccagaccccggaggattgcccagcgaggccggaacaccagcaggatggcagaggacacctccccaaacatgaatgacaacatcctgttgcctgtccgcaacaatgaccaagccctaggcctgactcagtgcatgctgggatgtgtgtatgcaagctgctgtgccagaagctcatggagaagacaggcattctgctcctctgtgctttcggtgtgtcccagggccctgcccagtcccaggtggaggtatccctgggccctggcactgattataggacactgggcaagacactgcactgccacgtgactcagtttccccatctgcctgatgggtgttgctgtgagaattatgaaatgaaatgatgaccatgaaaatattgtagaagccaagaaatgcttcagaagttataaagctctccccaaaccgtgtta

SEQ ID NO: 178818 - DNA, 1153 bp, Homo sapiens
  Payload ID: 15244
  Gene Symbol: SUN5
  Gene Name: Sad1 and UNC84 domain containing 5
  ENST ID: ENST00000375523
  CDS Start-End: 68-1132
cagccccttcctcctcaccagctcccagagttcccatctccatccccaatcctaaagaaggaaatcgatgccacggtcctcaaggagccctggggacccaggcgccctactcgaagatgtggcccacaatcccagaccccggaggattgcccagcgaggccggaacaccagcaggatggcagaggacacctccccaaacatgacctggttcacctgttttgcctgctccctgagaactcaggcccagcaggttctgtttaacacgtgcagatgcaagctgctgtgccagaagctcatggagaagacaggcattctgctcctctgtgctttcggattctggatgttttctattcacttaccatcgaaaatgaaagtctggcaggatgacagcataaatggtccactgcagagcttgaggttgtaccaggagaaggtgcgacatcacagtggggaaatccaggacctccgaggtagcatgaaccagctcattgccaagctccaggagatggaagccatgtccgatgagcaaaaaatggcccagaaaataatgaagatgatacacggagattacatcgaaaagccagactttgccctgaagtctataggggccagcattgactttgagcacacgtcagtcacctataaccatgagaaggcccactcctactggaactggatccagctgtggaactacgcacagcccccagacgtgatccttgagcccaacgtgacacctggcaattgctgggcctttgagggtgaccgcggccaggtgaccatccaattggctcagaaggtttacctgtccaacctcacgctgcagcacatccccaagaccatctcattgtcaggcagcctggacaccgcccccaaggacttcgtcatctatggcatggagggctcccccaaggaggaggtgttcctgggggcatttcagtttcagccagaaaacatcatccagatgttcccactccagaaccagccggcccgggctttcagtgcggtcaaggtgaagatctcaagcaactgggggaacccaggcttcacttgcctgtaccgcgtgcgagtgcatggctctgtggccccgcccagagagcagcctcaccagaacccctaccctaagagagattaaaatttattctttacccccaga

SEQ ID NO: 178819 - DNA, 528 bp, Homo sapiens
  Payload ID: 15244
  Gene Symbol: SUN5
  Gene Name: Sad1 and UNC84 domain containing 5
  ENST ID: ENST00000420875
  CDS Start-End: 1-459
ggcgccctactcgaagatgtggcccacaatcccagaccccggaggattgcccagcgaggccggaacaccagcaggatggcagaggacacctccccaaacatgaatgacaacatcctgttgcctgtccgcaacaatgaccaagccctaggcctgactcagtgcatgctgggatgtgtgtcctggttcacctgttttgcctgctccctgagaactcaggcccagcaggttctgtttaacacgtgcagatgcaagctgctgtgccagaagctcatggagaagacaggcattctgctcctctgtgctttcggtgtgtcccagggccctgcccagtcccaggtggaggtatccctgggccctggcactgattataggacactgggcaagacactgcactgccacgtgactcagtttccccatctgcctgatgggtgttgctgtgagaattatgaaatgaaatgatgaccatgaaaatattgtagaagccaagaaatgcttcagaagttataaagctctccccaaaccgtgtta

SEQ ID NO: 178820 - DNA, 1373 bp, Homo sapiens
  Payload ID: 15245
  Gene Symbol: SLTM
  Gene Name: SAFB-like, transcription modulator
  ENST ID: ENST00000249736
  CDS Start-End: 15-1373
gctgctcttctaagatggctgccgctaccggtgcggtggcagcctcggccgcctcgggtcaggcggaaggtaaaaagatcaccgatctgcgggtcatcgatctgaagtccgagctgaagcggcggaacttagacatcaccggagtcaagaccgtgctcatctcccgactcaagcaggctattgaagaggaaggaggcgatccagataatattgaattaactgtttcaactgatactccaaacaagaaaccaactaaaggcaaaggtaaaaaacatgaagcagatgagttgagtggagatgcttctgtggaagatgatgcttttatcaaggactgtgaattggagaatcaagaggcacatgagcaagatggaaatgatgaactaaaggactctgaagaatttggtgaaaatgaagaagaaaatgtgcattccaaggagttactctctgcagaagaaaacaagagagctcatgaattaatagaggcagaaggaatagaagatatagaaaaagaggacatcgaaagtcaggaaattgaagctcaagaaggtgaagatgatacctttctaacagcccaagatggtgaggaagaagaaaatgagaaagaagggagcctagctgaggctgatcacacagctcatgaagagatggaagctcatacgactgtgaaagaagctgaggatgacaacatctcggtcacaatccaggctgaagatgccatcactctggattttgatggtgatgacctcctagaaacaggtaaaaatgtgaaaattacagattctgaagcaagtaagccaaaagatgggcaggacgccattgcacagagcccggagaaggaaagcaaggattatgagatgaatgcgaaccataaagatggtaagaaggaagactgcgtgaagggtgaccctgtcgagaaggaagccagagaaagttctaagaaagcagaatctggagacaaagaaaaggatactttgaagaaagggccctcgtctactggggcctctggtcaagcaaagagctcttcaaaggaatctaaagacagcaagacatcatctaaagatgacaaaggaagtacaagtagtactagtggtagcagtggaagctcaactaaaaatatctgggttagtggactttcatctaataccaaagctgctgatttgaagaacctctttggcaaatatggaaaggttctgagtgcaaaagtagttacaaatgctcgaagtcctggggcaaaatgctatggcattgtaactatgtcttcaagcacagaggtgtccaggtgtattgcacatcttcatcgcactgagctgcatggacagctgatttctgttgaaaaagtaaaaggtgatccctctaagaaagaaatgaagaaa

SEQ ID NO: 178821 - DNA, 4147 bp, Homo sapiens
  Payload ID: 15245
  Gene Symbol: SLTM
  Gene Name: SAFB-like, transcription modulator
  Uniprot ID: Q9NWH9
  ENST ID: ENST00000380516
  CDS Start-End: 89-3193
gcggccgccgaggcctgggtggaagttggcgctgctgccgccgccctgcagcccactcgctgcctcggcagcgcgctgctcttctaagatggctgccgctaccggtgcggtggcagcctcggccgcctcgggtcaggcggaaggtaaaaagatcaccgatctgcgggtcatcgatctgaagtccgagctgaagcggcggaacttagacatcaccggagtcaagaccgtgctcatctcccgactcaagcaggctattgaagaggaaggaggcgatccagataatattgaattaactgtttcaactgatactccaaacaagaaaccaactaaaggcaaaggtaaaaaacatgaagcagatgagttgagtggagatgcttctgtggaagatgatgcttttatcaaggactgtgaattggagaatcaagaggcacatgagcaagatggaaatgatgaactaaaggactctgaagaatttggtgaaaatgaagaagaaaatgtgcattccaaggagttactctctgcagaagaaaacaagagagctcatgaattaatagaggcagaaggaatagaagatatagaaaaagaggacatcgaaagtcaggaaattgaagctcaagaaggtgaagatgatacctttctaacagcccaagatggtgaggaagaagaaaatgagaaagatatagcaggttctggtgatggtacacaagaagtatctaaacctcttccttcagaagggagcctagctgaggctgatcacacagctcatgaagagatggaagctcatacgactgtgaaagaagctgaggatgacaacatctcggtcacaatccaggctgaagatgccatcactctggattttgatggtgatgacctcctagaaacaggtaaaaatgtgaaaattacagattctgaagcaagtaagccaaaagatgggcaggacgccattgcacagagcccggagaaggaaagcaaggattatgagatgaatgcgaaccataaagatggtaagaaggaagactgcgtgaagggtgaccctgtcgagaaggaagccagagaaagttctaagaaagcagaatctggagacaaagaaaaggatactttgaagaaagggccctcgtctactggggcctctggtcaagcaaagagctcttcaaaggaatctaaagacagcaagacatcatctaaagatgacaaaggaagtacaagtagtactagtggtagcagtggaagctcaactaaaaatatctgggttagtggactttcatctaataccaaagctgctgatttgaagaacctctttggcaaatatggaaaggttctgagtgcaaaagtagttacaaatgctcgaagtcctggggcaaaatgctatggcattgtaactatgtcttcaagcacagaggtgtccaggtgtattgcacatcttcatcgcactgagctgcatggacagctgatttctgttgaaaaagtaaaaggtgatccctctaagaaagaaatgaagaaagaaaatgatgaaaagagtagttcaagaagttctggagataaaaaaaatacgagtgatagaagtagcaagacacaagcctctgtcaaaaaagaagagaaaagatcgtctgagaaatctgaaaaaaaagaaagcaaggatactaagaaaatagaaggtaaagatgagaagaatgataatggagcaagtggccaaacatcagaatcgattaaaaaaagtgaagaaaagaagcgaataagttccaagagtccaggacatatggtaatactagaccaaactaaaggagatcattgtagaccatcaagaagaggaagatatgagaaaattcatggaagaagtaaggaaaaggagagagctagtctagataaaaaaagagataaagactacagaaggaaagagatcttgccttttgaaaagatgaaggaacaaaggttgagagaacatttagttcgttttgaaaggctgcgacgagcaatggaacttcgaagacgaagagagattgcagagagagagcgtcgagagcgagaacgcattagaataattcgtgaacgggaagaacgggaacgcttacagagagagagagagcgcctagaaattgaaaggcaaaaactagagagagagagaatggaacgcgaacgcttggaaagggaacgcattcgtattgaacaggaacgtcgtaaggaagctgaacggattgctcgagaaagagaggaactcagaaggcaacaacagcagcttcgttatgaacaagaaaaaaggaattccttgaaacgcccacgtgatgtagatcataggcgagatgatccttactggagcgagaataaaaagttgtctctagatacagatgcacgatttggccatggatccgactactctcgccaacagaacagatttaatgactttgatcaccgagagaggggcaggtttcctgagagttcagcagtacagtcttcatcttttgaaaggcgggatcgctttgttggtcaaagtgaggggaaaaaagcacgacctactgcacgaagggaagatccaagcttcgaaagatatcccaaaaatttcagtgactccagaagaaatgagcctccaccaccaagaaatgaacttagagaatcagacaggcgagaagtacgaggggagcgagacgaaaggagaacggtgattattcatgacaggcctgatatcactcatcctagacatcctcgagaggcagggcccaatccttccagacccaccagctggaaaagtgaaggaagcatgtccactgacaaacgggaaacaagagttgaaaggccagaacgatctgggagagaagtatcagggcacagtgtgagaggcgctccccctgggaatcgtagcagcgcttcggggtacgggagcagagagggagacagaggagtcatcacagaccgaggaggtggatcacagcactatcctgaggagcgacatgtggttgaacgccatggacgggacacaagcggaccaaggaaagagtggcatggtccaccctctcaagggcctagctatcatgatacgaggcgaatgggtgacggccgggcaggagcaggcatgataacccaacattcaagtaacgcatccccaattaatagaattgtacaaatcagtggcaattccatgccaagaggaagtggctccggatttaagccatttaagggtggacctccgcgacgattctgaaaatgagctctctgccaaggttttaagataatttattgaaatctcctgtaaactttacttgactacttatgaagaggacctctgacttgcttgagagttctgtcagacttttctttttaaaaatttaacatgattgcttttctcaattttggagaagatgtttaaatagttctgttgtaacttttaatagttttgtgtatcattcaactttttttcttgcagcaccgaggcacatttgaaaagatggaattgaagtcgttttgtttaacgctgtgtgaatataaagagtagtttgcagctgtgtggtagtggtttaatttgcagccttagctctgtggtgtctggctctagagttacttctttttaccaagcattttcagcctccattttgaaggctgtctacacttaagaagtcttagctgtctaatttttagagaataagattgttcattgcatttctgagtattatgtaacctatttttgcagaaggtactgttacattaagtgcatctgtgtatcctggtttaaaaaaatgtaatcttttttgaaataaaccttcatattctgtatagttgctaaagtgttgagaacctttttaattgtaaaatgagaaccgattttcagtttagtgtagcagcacacttgttcaggtttgcatggtatgaaaccaaatagattcatgaaaccttggccatgaggtttgtttcacaaggttcttagaccgagttgtgcaggtaagtgcacttttaggtaatctgcactgtttgtttgatggataaattccatctctgggaattgtgtgggtattaatgtttccatgttcccaactatgttgagaagtggaaaaaaacccaggttctagatgggtgaatcagttgggttttgtaaatacttgtatgtggggaagacattgttgtctttttgtgaaaataaaaatccacacctggaagtgta

SEQ ID NO: 178822 - DNA, 2383 bp, Homo sapiens
  Payload ID: 15245
  Gene Symbol: SLTM
  Gene Name: SAFB-like, transcription modulator
  ENST ID: ENST00000432750
  CDS Start-End: 1-1803
ggaaaggttctgagtgcaaaagtagttacaaatgctcgaagtcctggggcaaaatgctatggcattgtaactatgtcttcaagcacagaggtgtccaggtgtattgcacatcttcatcgcactgagctgcatggacagctgatttctgttgaaaaagtaaaaggtgatccctctaagaaagaaatgaagaaagaaaatgatgaaaagagtagttcaagaagttctggagataaaaaaaatacgagtgatagaagtagcaagacacaagcctctgtcaaaaaagaagagaaaagatcgtctgagaaatctgaaaaaaaagaaagcaaggatactaagaaaatagaaggttccaagagtccaggacatatggtaatactagaccaaactaaaggagatcattgtagaccatcaagaagaggaagatatgagaaaattcatggaagaagtaaggaaaaggagagagctagtctagataaaaaaagagataaagactacagaaggaaagagatcttgccttttgaaaagatgaaggaacaaaggttgagagaacatttagttcgttttgaaaggctgcgacgagcaatggaacttcgaagacgaagagagattgcagagagagagcgtcgagagcgagaacgcattagaataattcgtgaacgggaagaacgggaacgcttacagagagagagagagcgcctagaaattgaaaggcaaaaactagagagagagagaatggaacgcgaacgcttggaaagggaacgcattcgtattgaacaggaacgtcgtaaggaagctgaacggattgctcgagaaagagaggaactcagaaggcaacaacagcagcttcgttatgaacaagaaaaaaggaattccttgaaacgcccacgtgatgtagatcataggcgagatgatccttactggagcgagaataaaaagttgtctctagatacagatgcacgatttggccatggatccgactactctcgccaacagaacagatttaatgactttgatcaccgagagaggggcaggtttcctgagagttcagcagtacagtcttcatcttttgaaaggcgggatcgctttgttggtcaaagtgaggggaaaaaagcacgacctactgcacgaagggaagatccaagcttcgaaagatatcccaaaaatttcagtgactccagaagaaatgagcctccaccaccaagaaatgaacttagagaatcagacaggcgagaagtacgaggggagcgagacgaaaggagaacggtgattattcatgacaggcctgatatcactcatcctagacatcctcgagaggcagggcccaatccttccagacccaccagctggaaaagtgaaggaagcatgtccactgacaaacgggaaacaagagttgaaaggccagaacgatctgggagagaagtatcagggcacagtgtgagaggcgctccccctgggaatcgtagcagcgcttcggggtacgggagcagagagggagacagaggagtcatcacagaccgaggaggtggatcacagcactatcctgaggagcgacatgtggttgaacgccatggacgggacacaagcggaccaaggaaagagtggcatggtccaccctctcaagggcctagctatcatgatacgaggcgaatgggtgacggccgggcaggagcaggcatgataacccaacattcaagtaacgcatccccaattaatagaattgtacaaatcagtggcaattccatgccaagaggaagtggctccggatttaagccatttaagggtggacctccgcgacgattctgaaaatgagctctctgccaaggttttaagataatttattgaaatctcctgtaaactttacttgactacttatgaagaggacctctgacttgcttgagagttctgtcagacttttctttttaaaaatttaacatgattgcttttctcaattttggagaagatgtttaaatagttctgttgtaacttttaatagttttgtgtatcattcaactttttttcttgcagcaccgaggcacatttgaaaagatggaattgaagtcgttttgtttaacgctgtgtgaatataaagagtagtttgcagctgtgtggtagtggtttaatttgcagccttagctctgtggtgtctggctctagagttacttctttttaccaagcattttcagcctccattttgaaggctgtctacacttaagaagtcttagctgtctaatttttagagaataagattgttcattgcatttctgagtattatgtaacctatttttgcagaaggtactgttacattaagtgcatctgtgtatcctggtttaaaaaaatgtaatcttttttgaaataaaccttcatattctgtatagttgctaaa

SEQ ID NO: 178823 - DNA, 674 bp, Homo sapiens
  Payload ID: 15245
  Gene Symbol: SLTM
  Gene Name: SAFB-like, transcription modulator
  ENST ID: ENST00000560494
  CDS Start-End: 1-303
ggagtcatcacagaccgaggaggtggatcacagcactatcctgaggagcgacatgtggttgaacgccatggacgggacacaagcggaccaaggaaagagtggcatggtccaccctctcaagggcctagctatcatgatacgaggcgaatgggtgacggccgggcaggagcaggcatgataacccaacattcaagtaacgcatccccaattaatagaattgtacaaatcagtggcaattccatgccaagaggaagtggctccggatttaagccatttaagggtggacctccgcgacgattctgaaaatgagctctctgccaagcaccgaggcacatttgaaaagatggaattgaagtcgttttgtttaacgctgtgtgaatataaagagtagtttgcagctgtgtggtagtggtttaatttgcagccttagctctgtggtgtctggctctagagttacttctttttaccaagcattttcagcctccattttgaaggctgtctacacttaagaagtcttagctgtctaatttttagagaataagattgttcattgcatttctgagtattatgtaacctatttttgcagaaggtactgttacattaagtgcatctgtgtatcctggtttaaaaaaatgtaatcttttttgaaataaaccttcatattctgtatagtt

SEQ ID NO: 178824 - DNA, 896 bp, Homo sapiens
  Payload ID: 15245
  Gene Symbol: SLTM
  Gene Name: SAFB-like, transcription modulator
  ENST ID: ENST00000558756
  CDS Start-End: 1-616
agacatcaccggagtcaagaccgtgctcatctcccgactcaagcaggctattgaagaggaaggaggcgatccagataatattgaattaactgtttcaactgatactccaaacaagaaaccaactaaaggcaaaggtaaaaaacatgaagcagatgagttgagtggagatgcttctgtggaagatgatgcttttatcaaggactgtgaattggagaatcaagaggcacatgagcaagatggaaatgatgaactaaaggactctgaagaatttggtgaaaatgaagaagaaaatgtgcattccaaggagttactctctgcagaagaaaacaagagagctcatgaattaatagaggcagaaggaatagaagatatagaaaaagaggacatcgaaagtcaggaaattgaagctcaagaaggtgaagatgatacctttctaacagcccaagatggtgaggaagaagaaaatgagaaagctcttcaaaggaatctaaagacagcaagacatcatctaaagatgacaaaggaagtacaagtagtactagtggtagcagtggaagctcaactaaaaatatctgggttagtggactttcatctaataccaaagctgctgatttgaagaacctctttggcaaatatggaaaggttctgagtgcaaaagtagttacaaatgctcgaagtcctggggcaaaatgctatggcattgtaactatgtcttcaagcacagaggtgtccaggtgtattgcacatcttcatcgcactgagctgcatggacagctgatttctgttgaaaaagtaaaaggtgatccctctaagaaagaaatgaagaaagaaaatgatgaaaagagtagttcaagaagttctggagataaaaaaaatacgagtgatagaagtagcaa

SEQ ID NO: 178825 - DNA, 717 bp, Homo sapiens
  Payload ID: 15245
  Gene Symbol: SLTM
  Gene Name: SAFB-like, transcription modulator
  ENST ID: ENST00000559880
  CDS Start-End: 30-717
ctgcctcggcagcgcgctgctcttctaagatggctgccgctaccggtgcggtggcagcctcggccgcctcgggtcaggcggaaggtaaaaagatcaccgatctgcgggtcatcgatctgaagtccgagctgaagcggcggaacttagacatcaccggagtcaagaccgtgctcatctcccgactcaagcaggctattgaagaggaaggaggcgatccagataatattgaattaactgtttcaactgatactccaaacaagaaaccaactaaaggcaaaggtaaaaaacatgaagcagatgagttgagtggagatgcttctgtggaagatgatgcttttatcaaggactgtgaattggagaatcaagaggcacatgagcaagatggaaatgatgaactaaaggactctgaagaatttggtgaaaatgaagaagaaaatgtgcattccaaggagttactctctgcagaagaaaacaagagagctcatgaattaatagaggcagaaggaatagaagatatagaaaaagaggacatcgaaagtcaggaaattgaagctcaagaaggtgaagatgatacctttctaacagcccaagatggtgaggaagaagaaaatgagaaagattctgaagcaagtaagccaaaagatgggcaggacgccattgcacagagcccggagaaggaaagcaaggattatgagatgaatgcgaaccataaagatg

SEQ ID NO: 178826 - DNA, 585 bp, Homo sapiens
  Payload ID: 15245
  Gene Symbol: SLTM
  Gene Name: SAFB-like, transcription modulator
  ENST ID: ENST00000558486
  CDS Start-End: 10-585
tcttctaagatggctgccgctaccggtgcggtggcagcctcggccgcctcgggtcaggcggaaggtaaaaagatcaccgatctgcgggtcatcgatctgaagtccgagctgaagcggcggaacttagacatcaccggagtcaagaccgtgctcatctcccgactcaagcaggctattgaagaggaaggaggcgatccagataatattgaattaactgtttcaactgatactccaaacaagaaaccaactaaaggcaaaggtaaaaaacatgaagcagatgagttgagtggagatgcttctgtggaagatgatgcttttatcaaggatggtgaggaagaagaaaatgagaaagatatagcaggttctggtgatggtacacaagaagtatctaaacctcttccttcagaagggagcctagctgaggctgatcacacagctcatgaagagatggaagctcatacgactgtgaaagaagctgaggatgacaacatctcggtcacaatccaggctgaagatgccatcactctggattttgatggtgatgacctcctagaaacaggtaaaaatgtgaaaattacagattct

SEQ ID NO: 178827 - DNA, 559 bp, Homo sapiens
  Payload ID: 15245
  Gene Symbol: SLTM
  Gene Name: SAFB-like, transcription modulator
  ENST ID: ENST00000559305
  CDS Start-End: 12-200
gctcttctaagatggctgccgctaccggtgcggtggcagcctcggccgcctcgggtcaggcggaaggtaaaaagatcaccgatctgcgggtcatcgatctgaagtccgagctgaagcggcggaacttagacatcaccggagtcaagaccgtgctcatctcccgactcaagcaggtaaaaaacatgaagcagatgagttgagtggagatgcttctgtggaagatgatgcttttatcaaggatggtgaggaagaagaaaatgagaaagctcttcaaaggaatctaaagacagcaagacatcatctaaagatgacaaaggaagtacaagtagtactagtggtagcagtggaagctcaactaaaaatatctgggttagtggactttcatctaataccaaagctgctgatttgaagaacctctttggcaaatatggaaaggttctgagtgcaaaagtagttacaaatgctcgaagtcctggggcaaaatgctatggcattgtaactatgtcttcaagcacagaggtgtccaggtgtattgcacatcttcatcgcactgagctgc

SEQ ID NO: 178828 - DNA, 334 bp, Homo sapiens
  Payload ID: 15245
  Gene Symbol: SLTM
  Gene Name: SAFB-like, transcription modulator
  ENST ID: ENST00000557791
  CDS Start-End: 1-334
agcttcgttatgaacaagaaaaaaggaattccttgaaacgcccacgtgatgtagatcatagcaaatatttctcttcaaggcgagatgatccttactggagcgagaataaaaagttgtctctagatacagatgcacgatttggccatggatccgactactctcgccaacagaacagatttaatgactttgatcaccgagagaggggcaggtttcctgagagttcagcagtacagtcttcatcttttgaaaggcgggatcgctttgttggtcaaagtgaggggaaaaaagcacgacctactgcacgaagggaagatccaagcttcgaaagatatcc

SEQ ID NO: 178829 - DNA, 3022 bp, Homo sapiens
  Payload ID: 15245
  Gene Symbol: SLTM
  Gene Name: SAFB-like, transcription modulator
  ENST ID: ENST00000492526
  CDS Start-End: 15-548
gctgctcttctaagatggctgccgctaccggtgcggtggcagcctcggccgcctcgggtcaggcggaaggtaaaaagatcaccgatctgcgggtcatcgatctgaagtccgagctgaagcggcggaacttagacatcaccggagtcaagaccgtgctcatctcccgactcaagcaggctattgaagaggaaggaggcgatccagataatattgaattaactgtttcaactgatactccaaacaagaaaccaactaaaggcaaaggtaaaaaacatgaagcagatgagttgagtggagatgcttctgtggaagatgatgcttttatcaaggaaattgaagctcaagaaggtgaagatgatacctttctaacagcccaagatggtgaggaagaagaaaatgagaaagctcttcaaaggaatctaaagacagcaagacatcatctaaagatgacaaaggaagtacaagtagtactagtggtagcagtggaagctcaactaaaaatatctgggttagtggactttcatctaataccaaagctgctgatttgaagaacctctttggcaaatatggaaaggttctgagtgcaaaagtagttacaaatgctcgaagtcctggggcaaaatgctatggcattgtaactatgtcttcaagcacagaggtgtccaggtgtattgcacatcttcatcgcactgagctgcatggacagctgatttctgttgaaaaagtaaaaggtgatccctctaagaaagaaatgaagaaagaaaatgatgaaaagagtagttcaagaagttctggagataaaaaaaatacgagtgatagaagtagcaagacacaagcctctgtcaaaaaagaagagaaaagatcgtctgagaaatctgaaaaaaaagaaagcaaggatactaagaaaatagaaggtaaagatgagaagaatgataatggagcaagtggccaaacatcagaatcgattaaaaaaagtgaagaaaagaagcgaataagttccaagagtccaggacatatggtaatactagaccaaactaaaggagatcattgtagaccatcaagaagaggaagatatgagaaaattcatggaagaagtaaggaaaaggagagagctagtctagataaaaaaagagataaagactacagaaggaaagagatcttgccttttgaaaagatgaaggaacaaaggttgagagaacatttagttcgttttgaaaggctgcgacgagcaatggaacttcgaagacgaagagagattgcagagagagagcgtcgagagcgagaacgcattagaataattcgtgaacgggaagaacgggaacgcttacagagagagagagagcgcctagaaattgaaaggcaaaaactagagagagagagaatggaacgcgaacgcttggaaagggaacgcattcgtattgaacaggaacgtcgtaaggaagctgaacggattgctcgagaaagagaggaactcagaaggcaacaacagcagcttcgttatgaacaagaaaaaaggaattccttgaaacgcccacgtgatgtagatcataggcgagatgatccttactggagcgagaataaaaagttgtctctagatacagatgcacgatttggccatggatccgactactctcgccaacagaacagatttaatgactttgatcaccgagagaggggcaggtttcctgagagttcagcagtacagtcttcatcttttgaaaggcgggatcgctttgttggtcaaagtgaggggaaaaaagcacgacctactgcacgaagggaagatccaagcttcgaaagatatcccaaaaatttcagtgactccagaagaaatgagcctccaccaccaagaaatgaacttagagaatcagacaggcgagaagtacgaggggagcgagacgaaaggagaacggtgattattcatgacaggcctgatatcactcatcctagacatcctcgagaggcagggcccaatccttccagacccaccagctggaaaagtgaaggaagcatgtccactgacaaacgggaaacaagagttgaaaggccagaacgatctgggagagaagtatcagggcacagtgtgagaggcgctccccctgggaatcgtagcagcgcttcggggtacgggagcagagagggagacagaggagtcatcacagaccgaggaggtggatcacagcactatcctgaggagcgacatgtggttgaacgccatggacgggacacaagcggaccaaggaaagagtggcatggtccaccctctcaagggcctagctatcatgatacgaggcgaatgggtgacggccgggcaggagcaggcatgataacccaacattcaagtaacgcatccccaattaatagaattgtacaaatcagtggcaattccatgccaagaggaagtggctccggatttaagccatttaagggtggacctccgcgacgattctgaaaatgagctctctgccaaggttttaagataatttattgaaatctcctgtaaactttacttgactacttatgaagaggacctctgacttgcttgagagttctgtcagacttttctttttaaaaatttaacatgattgcttttctcaattttggagaagatgtttaaatagttctgttgtaacttttaatagttttgtgtatcattcaactttttttcttgcagcaccgaggcacatttgaaaagatggaattgaagtcgttttgtttaacgctgtgtgaatataaagagtagtttgcagctgtgtggtagtggtttaatttgcagccttagctctgtggtgtctggctctagagttacttctttttaccaagcattttcagcctccattttgaaggctgtctacacttaagaagtcttagctgtctaatttttagagaataagattgttcattgcatttctgagtattatgtaacctatttttgcagaaggtactgttacattaagtgcatctgtgtatcctggtttaaaaaaatgtaatcttttttgaaataaaccttcatattctgtat

SEQ ID NO: 178830 - DNA, 708 bp, Homo sapiens
  Payload ID: 15245
  Gene Symbol: SLTM
  Gene Name: SAFB-like, transcription modulator
  ENST ID: ENST00000559261
  CDS Start-End: 36-305
cactcgctgcctcggcagcgcgctgctcttctaagatggctgccgctaccggtgcggtggcagcctcggccgcctcgggtcaggcggaaggtaaaaagatcaccgatctgcgggtcatcgatctgaagtccgagctgaagcggcggaacttagacatcaccggagtcaagaccgtgctcatctcccgactcaagcaggctattgaagaggaaggaggcgatccagataatattgaattaactgtttcaactgatactccaaacaagaaaccaactaaaggcaaagattacaagctgaaacattaaatgtccagtgtgattgtattgtaacagctgttggaaacagtatgggacagcaaagttagaccatttttacataccccagtgctgcctcttgttgcctgtgcgtcatcgtcattgggcaacccattttccttctttcgcaggtaaaaaacatgaagcagatgagttgagtggagatgcttctgtggaagatgatgcttttatcaaggactgtgaattggagaatcaagaggcacatgagcaagatggaaatgatgaactaaaggactctgaagaatttggtgaaaatgaagaagaaaatgtgcattccaaggagttactctctgcagaagaaaacaagagagctcatgaattaatagaggcagaaggaatagaagatatagaaaaagaggacatcgaaagtcag

SEQ ID NO: 178831 - DNA, 495 bp, Homo sapiens
  Payload ID: 15245
  Gene Symbol: SLTM
  Gene Name: SAFB-like, transcription modulator
  ENST ID: ENST00000560682
  CDS Start-End: 12-495
gctcttctaagatggctgccgctaccggtgcggtggcagcctcggccgcctcgggtcaggcggaaggtaaaaagatcaccgatctgcgggtcatcgatctgaagtccgagctgaagcggcggaacttagacatcaccggagtcaagaccgtgctcatctcccgactcaagcaggctattgaagaggaaggaggcgatccagataatattgaattaactgtttcaactgatactccaaacaagaaaccaactaaaggcaaaggtaaaaaacatgaagcagatgagttgagtggagatgcttctgtggaagatgatgcttttatcaaggaaattgaagctcaagaaggtgaagatgatacctttctaacagcccaagatggtgaggaagaagaaaatgagaaagaagggagcctagctgaggctgatcacacagctcatgaagagatggaagctcatacgactgtgaaagaagctgaggatgacaacatctcggtca

SEQ ID NO: 178832 - DNA, 3021 bp, Homo sapiens
  Payload ID: 15245
  Gene Symbol: SLTM
  Gene Name: SAFB-like, transcription modulator
  ENST ID: ENST00000557924
  CDS Start-End: 35-223
actcgctgcctcggcagcgcgctgctcttctaagatggctgccgctaccggtgcggtggcagcctcggccgcctcgggtcaggcggaaggtaaaaagatcaccgatctgcgggtcatcgatctgaagtccgagctgaagcggcggaacttagacatcaccggagtcaagaccgtgctcatctcccgactcaagcaggtaaaaaacatgaagcagatgagttgagtggagatgcttctgtggaagatgatgcttttatcaaggactgtgaattggagaatcaagaggcacatgagcaagatggaaatgatgaactaaaggactctgaagaatttggtgaaaatgaagaagaaaatgtgcattccaaggagttactctctgcagaagaaaacaagagagctcatgaattaatagaggcagaaggaatagaagatatagaaaaagaggacatcgaaagtcaggaaattgaagctcaagaaggtgaagatgatacctttctaacagcccaagatggtgaggaagaagaaaatgagaaagctcttcaaaggaatctaaagacagcaagacatcatctaaagatgacaaaggaagtacaagtagtactagtggtagcagtggaagctcaactaaaaatatctgggttagtggactttcatctaataccaaagctgctgatttgaagaacctctttggcaaatatggaaaggttctgagtgcaaaagtagttacaaatgctcgaagtcctggggcaaaatgctatggcattgtaactatgtcttcaagcacagaggtgtccaggtgtattgcacatcttcatcgcactgagctgcatggacagctgatttctgttgaaaaagtaaaaggtgatccctctaagaaagaaatgaagaaagaaaatgatgaaaagagtagttcaagaagttctggagataaaaaaaatacgagtgatagaagtagcaagacacaagcctctgtcaaaaaagaagagaaaagatcgtctgagaaatctgaaaaaaaagaaagcaaggatactaagaaaatagaaggtaaagatgagaagaatgataatggagcaagtggccaaacatcagaatcgattaaaaaaagtgaagaaaagaagcgaataagttccaagagtccaggacatatggtaatactagaccaaactaaaggagatcattgtagaccatcaagaagaggaagatatgagaaaattcatggaagaagtaaggaaaaggagagagctagtctagataaaaaaagagataaagactacagaaggaaagagatcttgccttttgaaaagatgaaggaacaaaggttgagagaacatttagttcgttttgaaaggctgcgacgagcaatggaacttcgaagacgaagagagattgcagagagagagcgtcgagagcgagaacgcattagaataattcgtgaacgggaagaacgggaacgcttacagagagagagagagcgcctagaaattgaaaggcaaaaactagagagagagagaatggaacgcgaacgcttggaaagggaacgcattcgtattgaacaggaacgtcgtaaggaagctgaacggattgctcgagaaagagaggaactcagaaggcaacaacagcagcttcgttatgaacaagaaaaaaggaattccttgaaacgcccacgtgatgtagatcataggcgagatgatccttactggagcgagaataaaaagttgtctctagatacagatgcacgatttggccatggatccgactactctcgccaacagaacagatttaatgactttgatcaccgagagaggggcaggtttcctgagagttcagcagtacagtcttcatcttttgaaaggcgggatcgctttgttggtcaaagtgaggggaaaaaagcacgacctactgcacgaagggaagatccaagcttcgaaagatatcccaaaaatttcagtgactccagaagaaatgagcctccaccaccaagaaatgaacttagagaatcagacaggcgagaagtacgaggggagcgagacgaaaggagaacggtgattattcatgacaggcctgatatcactcatcctagacatcctcgagaggcagggcccaatccttccagacccaccagctggaaaagtgaaggaagcatgtccactgacaaacgggaaacaagagttgaaaggccagaacgatctgggagagaagtatcagggcacagtgtgagaggcgctccccctgggaatcgtagcagcgcttcggggtacgggagcagagagggagacagaggagtcatcacagaccgaggaggtggatcacagcactatcctgaggagcgacatgtggttgaacgccatggacgggacacaagcggaccaaggaaagagtggcatggtccaccctctcaagggcctagctatcatgatacgaggcgaatgggtgacggccgggcaggagcaggcatgataacccaacattcaagtaacgcatccccaattaatagaattgtacaaatcagtggcaattccatgccaagaggaagtggctccggatttaagccatttaagggtggacctccgcgacgattctgaaaatgagctctctgccaaggttttaagataatttattgaaatctcctgtaaactttacttgactacttatgaagaggacctctgacttgcttgagagttctgtcagacttttctttttaaaaatttaacatgattgcttttctcaattttggagaagatgtttaaatagttctgttgtaacttttaatagttttgtgtatcattcaactttttttcttgcagcaccgaggcacatttgaaaagatggaattgaagtcgttttgtttaacgctgtgtgaatataaagagtagtttgcagctgtgtggtagtggtttaatttgcagccttagctctgtggtgtctggctctagagttacttctttttaccaagcattttcagcctccattttgaaggctgtctacacttaagaagtcttagctgtctaatttttagagaat

SEQ ID NO: 178833 - DNA, 1040 bp, Homo sapiens
  Payload ID: 15245
  Gene Symbol: SLTM
  Gene Name: SAFB-like, transcription modulator
  ENST ID: ENST00000628684
  CDS Start-End: 34-222
ctcgctgcctcggcagcgcgctgctcttctaagatggctgccgctaccggtgcggtggcagcctcggccgcctcgggtcaggcggaaggtaaaaagatcaccgatctgcgggtcatcgatctgaagtccgagctgaagcggcggaacttagacatcaccggagtcaagaccgtgctcatctcccgactcaagcaggtaaaaaacatgaagcagatgagttgagtggagatgcttctgtggaagatgatgcttttatcaaggactgtgaattggagaatcaagaggcacatgagcaagatggaaatgatgaactaaaggactctgaagaatttggtgaaaatgaagaagaaaatgtgcattccaaggagttactctctgcagaagaaaacaagagagctcatgaattaatagaggcagaaggaatagaagatatagaaaaagaggacatcgaaagtcaggaaattgaagctcaagaaggtgaagatgatacctttctaacagcccaagatggtgaggaagaagaaaatgagaaagatatagcaggttctggtgatggtacacaagaagtatctaaacctcttccttcagaagggagcctagctgaggctgatcacacagctcatgaagagatggaagctcatacgactgtgaaagaagctgaggatgacaacatctcggtcacaatccaggctgaagatgccatcactctggattttgatggtgatgacctcctagaaacaggtaaaaatgtgaaaattacagattctgaagcaagtaagccaaaagatgggcaggacgccattgcacagagcccggagaaggaaagcaaggattatgagatgaatgcgaaccataaagatggtaagaaggaagactgcgtgaagggtgaccctgtcgagaaggaagccagagaaagttctaagaaagcagaatctggagacaaagaaaaggatactttgaagaaagggccctcgtctactggggcctctggtcaagcaaagagctcttcaaaggaatctaaagacagcaagacatcatct

SEQ ID NO: 178834 - DNA, 1153 bp, Homo sapiens
  Payload ID: 15246
  Gene Symbol: SGF29
  Gene Name: SAGA complex associated factor 29
  Uniprot ID: Q96ES7
  ENST ID: ENST00000317058
  CDS Start-End: 188-1069
cgcgcgactacgctcataaaaggaaaaaaaagcgtgtgcggttctcgacgtgccgccaatcttcgaacgcaggtctgtgatcatccgcagactccgaaaaagggttcgaggaacgcgcctgctcccctcgtcgcagtttccagcccgacgagcttgttttgtcccggactcggtgcccctgtagacaatggccctcgtgtctgccgattcccgcattgcagaacttctcacagagctccatcagctgatcaaacaaacccaggaagagcgttcgcggagcgaacacaacttagtgaacatccagaagacccatgagcggatgcagacagagaacaagatttctccctattaccggacaaagctgcgtggcctctacacaaccgccaaggccgatgcagaggctgagtgcaacatccttcggaaagctctggacaagatcgcggaaatcaagtctctgttggaagagaggcggattgcggccaagattgccggtctctacaatgactcggagccaccccggaagaccatgcgcagaggggtgctgatgaccctgctgcagcagtcggccatgaccctgcccctgtggatcgggaagcctggtgacaagcccccacccctctgtggggccatccctgcctcaggagactacgtggccagacctggagacaaggtggctgcccgggtgaaggccgtggatggggacgagcagtggatcctggccgaggtggtcagttacagccatgccaccaacaagtatgaggtagatgacatcgatgaagaaggcaaagagagacacaccctgagccggcgccgtgtcatcccgctgccccagtggaaggccaacccggagacggaccctgaggccttgttccagaaggagcagctcgtgctggccctgtatccccagactacctgcttctaccgcgccctgatccatgcgcccccacagcggccccaggatgactactcggtcctgtttgaagacacctcctatgcagatggctattcccctcccctcaatgtggctcagagatacgtggtggcttgtaaggaacccaagaaaaagtgatgccgcctggcagactcgccatcccccaacgacacagggcaggacagcagaggacgtgctgggattaaacacattccccctcta

SEQ ID NO: 178835 - DNA, 354 bp, Homo sapiens
  Payload ID: 15246
  Gene Symbol: SGF29
  Gene Name: SAGA complex associated factor 29
  ENST ID: ENST00000564023
  CDS Start-End: 1-272
atggggacgagcagtggatcctggccgaggtggtcagttacagccatgccaccaacaagtatgaggccttgttccagaaggagcagctcgtgctggccctgtatccccagactacctgcttctaccgcgccctgatccatgcgcccccacagcggccccaggatgactactcggtcctgtttgaagacacctcctatgcagatggctattcccctcccctcaatgtggctcagagatacgtggtggcttgtaaggaacccaagaaaaagtgatgccgcctggcagactcgccatcccccaacgacacagggcaggacagcagaggacgtgctgggattaaacacattccccctc

SEQ ID NO: 178836 - DNA, 788 bp, Homo sapiens
  Payload ID: 15246
  Gene Symbol: SGF29
  Gene Name: SAGA complex associated factor 29
  ENST ID: ENST00000567564
  CDS Start-End: 142-540
gacgtgccgccaatcttcgaacgcaggtctgtgatcatccgcagactccgaaaaagggttcgaggaacgcgcctgctcccctcgtcgcagtttccagcccgacgagcttgttttgtcccggactcggtgcccctgtagacaatggccctcgtgtctgccgattcccgcattgcagaacttctcacagagctccatcagctgatcaaacaaacccaggaagagcgttcgcggagcgaacacaacttagtgaacatccagaagacccatgagcggatgcagacagagaacaagatttctccctattaccggacaaagctgcgtggcctctacacaaccgccaaggccgatgcagaggctgagtgcaagttggagtgcaatgacgcgatctcggttcactgcaacctctgcctcccaggttcaagcgattctcttgcctcagcctcccaacatccttcggaaagctctggacaagatcgcggaaatcaagtctctgttggaagagaggcggattgcggccaagattgccggtctctacaatgactcggagccaccccggaagaccatgcgcagaggggtgctgatgaccctgctgcagcagtcggccatgaccctgcccctgtggatcgggaagcctggtgacaagcccccacccctctgtggggccatccctgcctcaggagactacgtggccagacctggagacaaggtggctgcccgggtgaaggccgtggatggggacgagcagtggatcctggccgaggtggtcagttacagccatgccaccaaca

SEQ ID NO: 178837 - DNA, 445 bp, Homo sapiens
  Payload ID: 15247
  Gene Symbol: STH
  Gene Name: saitohin
  Uniprot ID: Q8IWL8
  ENST ID: ENST00000537309
  CDS Start-End: 31-417
gcatgtgtctgctgctccctagtctgggccatgagtgagggtggaggccaagtctcatgcatttttgcagcccccacaagactgtgcaggtggccggccctcattgaatgcggggttaatttaactcagcctctgtgtgagtggatgattcaggttgccagagacagaaccctcagcttagcatgggaagtagcttccctgttgaccctgagttcatctgaggttggcttggaaggtgtgggcaccatttggcccagttcttacagctctgaagagagcagcaggaatggggctgagcagggaagacaactttccattgaaggcccctttcagggccagaactgtccctcccaccctgcagctgccctgcctctgcccatgaggggtgagagtcaggcgacctcatgccaagtgtagaaaggggcagatgggagccccaggttat

SEQ ID NO: 178838 - DNA, 445 bp, Homo sapiens
  Payload ID: 15247
  Gene Symbol: STH
  Gene Name: saitohin
  ENST ID: ENST00000629377
  CDS Start-End: 31-417
gcatgtgtctgctgctccctagtctgggccatgagtgagggtggaggccgagtctcatgcatttttgcagcccccacaagactgtgcaggtggccggccctcattgaatgcggggttaatttaactcagcctctgtgtgagtggatgattcaggttgccagagacagaaccctcagcttagcatgggaagtagcttccctgttgaccctgagttcatctgaggttggcttggaaggtgtgggcaccatttggcccagttcttacagctctgaagagagcagcaggaatggggctgagcagggaagacaactttccattgaaggcccctttcagggccagaactgtccctcccaccctgcagctgccctgcctctgcccatgaggggtgagagtcaggcgacctcatgccaagtgtagaaaggggcagacgggagccccaggttat

SEQ ID NO: 178839 - DNA, 4712 bp, Homo sapiens
  Payload ID: 15248
  Gene Symbol: SIK1
  Gene Name: salt-inducible kinase 1
  Uniprot ID: P57059
  ENST ID: ENST00000270162
  CDS Start-End: 134-2485
atgcggcgcggccccggaggcagcagcagcggcggcggcagccggagcagtaggcacccgagcagcgccagcggccgagcgggcggcttcctggcctgggcgctccggtggcggcggaggtgcgcgcggagccatggttatcatgtcggagttcagcgcggaccccgcgggccagggtcagggccagcagaagcccctccgggtgggtttttacgacatcgagcggaccctgggcaaaggcaacttcgcggtggtgaagctggcgcggcatcgagtcaccaaaacgcaggttgcaataaaaataattgataaaacacgattagattcaagcaatttggagaaaatctatcgtgaggttcagctgatgaagcttctgaaccatccacacatcataaagctttaccaggttatggaaacaaaggacatgctttacatcgtcactgaatttgctaaaaatggagaaatgtttgattatttgacttccaacgggcacctgagtgagaacgaggcgcggaagaagttctggcaaatcctgtcggccgtggagtactgtcacgaccatcacatcgtccaccgggacctcaagaccgagaacctcctgctggatggcaacatggacatcaagctggcagattttggatttgggaatttctacaagtcaggagagcctctgtccacgtggtgtgggagccccccgtatgccgccccggaagtctttgaggggaaggagtatgaaggcccccagctggacatctggagcctgggcgtggtgctgtacgtcctggtctgcggttctctccccttcgatgggcctaacctgccgacgctgagacagcgggtgctggagggccgcttccgcatccccttcttcatgtctcaagactgtgagagcctgatccgccgcatgctggtggtggaccccgccaggcgcatcaccatcgcccagatccggcagcaccggtggatgcgggctgagccctgcttgccgggacccgcctgccccgccttctccgcacacagctacacctccaacctgggcgactacgatgagcaggcgctgggtatcatgcagaccctgggcgtggaccggcagaggacggtggagtcactgcaaaacagcagctataaccactttgctgccatttattacctcctccttgagcggctcaaggagtatcggaatgcccagtgcgcccgccccgggcctgccaggcagccgcggcctcggagctcggacctcagtggtttggaggtgcctcaggaaggtctttccaccgaccctttccgacctgccttgctgtgcccgcagccgcagaccttggtgcagtccgtcctccaggccgagatggactgtgagctccagagctcgctgcagtggcccttgttcttcccggtggatgccagctgcagcggagtgttccggccccggcccgtgtccccaagcagcctgctggacacagccatcagtgaggaggccaggcaggggccgggcctagaggaggagcaggacacgcaggagtccctgcccagcagcacgggccggaggcacaccctggccgaggtctccacccgcctctccccactcaccgcgccatgtatagtcgtctccccctccaccacggcaagtcctgcagagggaaccagctctgacagttgtctgaccttctctgcgagcaaaagccccgcggggctcagtggcaccccggccactcaggggctgctgggcgcctgctccccggtcaggctggcctcgcccttcctggggtcgcagtccgccaccccagtgctgcaggctcaggggggcttgggaggagctgttctgctccctgtcagcttccaggagggacggcgggcgtcggacacctcactgactcaagggctgaaggcctttcggcagcagctgaggaagaccacgcggaccaaagggtttctgggactgaacaaaatcaaggggctggctcgccaggtgtgccaggcccccgccagccgggccagcaggggcggcctgagccccttccacgcccctgcacagagcccaggcctgcacggcggcgcagccggcagccgggagggctggagcctgctggaggaggtgctagagcagcagaggctgctccagttacagcaccacccggccgctgcacccggctgctcccaggccccccagccggcccctgccccgtttgtgatcgccccctgtgatggccctggggctgccccgctccccagcaccctcctcacgtcggggctcccgctgctgccgcccccactcctgcagaccggcgcgtccccggtggcctcagcggcgcagctcctggacacacacctgcacattggcaccggccccaccgccctccccgctgtgcccccaccacgcctggccaggctggccccaggttgtgagcccctggggctgctgcagggggactgtgagatggaggacctgatgccctgctccctaggcacgtttgtcctggtgcagtgagggcagccctgcatcctggcacggacactgactcttacagcaataacttcagaggaggtgaagacatctggcctcaaagccaagaactttctagaagcgaaataagcaatacgttaggtgttttggctttttagtttatttttgttttatttttttcttgcactgagtgacctcaactttgagtagggactggaaactttaggaagaaagataattgaggggcgtgtctgggggcgggggcaggaggggagcggggtggagggaacacgtgcagtgccgtggtgtggggatctcggcccctctctctgggttcgtcgtggttgagatgattacctcggacgtctacggaaacgagcgggcgcattgttgtccgcttgtgtgtgtgtgtgtgtgtgtgtgtgtgcgcgtgcattgattactatccatttctttagtcaacgctctccacttcctgatttctgctttaaggaaaactgtgaactttctgcttcatgtatcagttttaaagcagcccaggcaaagatcatctacagattctaggaattctctcccctgaaatcaaaacctggaagacttttttttcttattttagttgagaagtttcataaactgctcaaggattagttttccaggactctgcggaggaacggcaggaagaacctcagagagggcagaggtgacttcaaagtgctggggactccgtcctgagggtcacttggccctgagcccctgcgtgcccttgcggaagcccagaagcttcttcctgctgcacctcccgtttccgctgctgctgacgtttatgcatttcatgatggggtccaacaagaacacctgacttgggtgaagttgtgcaatattggaggctgactgtagggctgggcagctgggagacaggctcatggctcatggctcatggctcagggcggtgcctgccctgggccgggacccccctccccaccccccacctaggctttttgggttttgttcaaggaaggtaaagtgagaggtttaggtcagtgtttttaagtttttgttttttttttaaagcaaatcctgtatatgtatctacatgggagacaggtagacactacttatttgttacattttgtactatacgtttgtgttccaggtttcagcttccctcgctcctgttgttaagaagcgtccctgtcagcacaggtgtgcattgaggaaggggccccagggccttcgctccctcagcactggggtggaggcggcaggaaggggcggcccttacctggcaggtctgggcgcacctttagcaggtggactccgtggggctccaccagccagaagcctctggaaggcaacgaaggcaatgctgctccctgagtccagtccccgcccccaaacccagcccaggtgccttcagctacttcggcttcttaaaccctgcagtgttaaacagaggcattgagaaaggggaaaggcgggtatttttaaaagccaaagattgacccagttacttgagggtagggaggcgggcccagtgcaggaggctgcatccctggcctgctggtgcccaccgggggctgtgcctgtgccgggccgcagggaagctggctgcccccattcctgctgctgctgctgctgctgctctgtggctgtttcaaagactgggcgaaaggctgtccggagggcagaccaggtgccttgccgcagagaaaacaccaaagtctcctgttcgctcataaagaagtttttgggatgggagagaatccagaccatcttggggcagccaggcccttgccttcatttttacagaggtagcacaactgattccaacacaaaaccccttcccctttttaaaatgatttctgttctaatgccatagatcaaaggcctcagaaaccattgtgtgtttcctctttgaagcaatgacaagcactttactttcacggtggtttttgttttttcttattgctgtggaacctcttttggaggacgttaaaggcgtgttttacttgtttttttaagagtgtgtgatgtgtgttttgtagatttcttgacagtgctgtaatacagacggcaatgcaatagcctatttaaagacactacgtgatctgattgagatgtacatagtttttttttttaccataactgaattattttatctcttatgttaacatgagaaatgtatgccaaatgattagttgatgtatgttttttaatttaatatttaaataaaatatttggaaggaaaaaa

SEQ ID NO: 178840 - DNA, 9678 bp, Homo sapiens
  Payload ID: 15249
  Gene Symbol: SIK2
  Gene Name: salt-inducible kinase 2
  Uniprot ID: Q9H0K1
  ENST ID: ENST00000304987
  CDS Start-End: 174-2954
gacgtcggcgcacgtcagcggcggcgcgcgcctggctgggccctggggagcgggagggaaggagcgaaggagcgaaggagcaagcggagcggccgtcgcccaagccaagccgcgctgccaaccctcccgcccgcccgcgctcctgtccgccgtgtctagcagcggggcccagcatggtcatggcggatggcccgaggcacttgcagcgcgggccggtccgggtggggttctacgacatcgagggcacgctgggcaagggcaacttcgctgtggtgaagctggggcggcaccggatcaccaagacggaggtggcaataaaaataatcgataagtctcagctggatgcagtgaaccttgagaaaatctaccgagaagtacaaataatgaaaatgttagaccaccctcacataatcaaactttatcaggtaatggagaccaaaagtatgttgtaccttgtgacagaatatgccaaaaatggagaaatttttgactatcttgctaatcatggccggttaaatgagtctgaagccaggcgaaaattctggcaaatcctgtctgctgttgattattgtcatggtcggaagattgtgcaccgtgacctcaaagctgaaaatctcctgctggataacaacatgaatatcaaaatagcagatttcggttttggaaatttctttaaaagtggtgaactgctggcaacatggtgtggcagccccccttatgcagccccagaagtctttgaagggcagcagtatgaaggaccacagctggacatctggagtatgggagttgttctttatgtccttgtctgtggagctctgccctttgatggaccgactcttccaattttgaggcagagggttctggaaggaagattccggattccgtatttcatgtcagaagattgcgagcaccttatccgaaggatgttggtcctagacccatccaaacggctaaccatagcccaaatcaaggagcataaatggatgctcatagaagttcctgtccagagacctgttctctatccacaagagcaagaaaatgagccatccatcggggagtttaatgagcaggttctgcgactgatgcacagccttggaatagatcagcagaaaaccattgagtctttgcagaacaagagctataaccactttgctgccatttatttcttgttggtggagcgcctgaaatcacatcggagcagtttcccagtggagcagagacttgatggccgccagcgtcggcctagcaccattgctgagcaaacagttgccaaggcacagactgtggggctcccagtgaccatgcattcaccgaacatgaggctgctgcgatctgccctcctcccccaggcatccaacgtggaggccttttcatttccagcatctggctgtcaggcggaagctgcattcatggaagaagagtgtgtggacactccaaaggtcaatggctgtctgcttgaccctgtgcctcctgtcctggtgcggaagggatgccagtcactgcccagcaacatgatggagacctccattgacgaagggctggagacagaaggagaggccgaggaagaccccgctcatgcctttgaggcatttcagtccacacgcagcgggcagagacggcacactctgtcagaagtgaccaatcaactggtcgtgatgcctggggcagggaaaattttctccatgaatgacagcccctcccttgacagtgtggactctgagtatgatatggggtctgttcagagggacctgaactttctggaagacaacccttcccttaaggacatcatgttagccaatcagccttcaccccgcatgacatctcccttcataagcctgagacctaccaacccagccatgcaggctctgagctcccagaaacgagaggtccacaacaggtctccagtgagcttcagagagggccgcagagcatcagatacctccctcacccagggaattgtagcatttagacaacatcttcagaatctggctagaaccaaaggaattctagagttgaacaaagtgcagttgttgtatgaacaaataggaccggaggcagaccctaacctggcgccggcggctcctcagctccaggaccttgctagcagctgccctcaggaagaagtttctcagcagcaggaaagcgtctccactctccctgccagcgtgcatccccagctgtccccacggcagagcctggagacccagtacctgcagcacagactccagaagcccagccttctgtcaaaggcccagaacacctgtcagctttattgcaaagaaccaccgcggagccttgagcagcagctgcaggaacataggctccagcagaagcgactctttcttcagaagcagtctcaactgcaggcctattttaatcagatgcagatagcagagagctcctacccacagccaagtcagcagctgccccttccccgccaggagactccaccgccttctcagcaggccccaccgttcagcctgacccagcccctgagccccgtcctggagccttcctccgagcagatgcaatacagccctttcctcagccagtaccaagagatgcagcttcagcccctgccctccacttccggtccccgggctgctcctcctctgcccacgcagctacagcagcagcagccgccaccgccaccaccccctccaccaccacgacagccaggagctgccccagcccccttacagttctcctatcagacttgtgagctgccaagcgctgcttcccctgcgccagactatcccactccctgtcagtatcctgtggatggagcccagcagagcgacctaacggggccagactgtcccagaagcccaggactgcaagaggccccctccagctacgacccactagccctctctgagctacctggactctttgattgtgaaatgctagacgctgtggatccacaacacaacgggtatgtcctggtgaattagtctcagcacaggaattgaggtgggtcaggtgaaggaagagtgtatgttcctatttttattccagccttttaaatttaaagcttattttcttgccctctccctaacggggagaaatcgagccacccaactggaatcagagggtctggctggggtggatgttgcttcctcctggttctgccccaccacaaagttttctgtggcaagtgctggaacatagttgtaggctgaggctcctgcccttcggtcgagtggagcaagctctcgagggcagcactgacaaatgtgttcctaagaagacattcagacccaggtgttatgcaggattacatccgtttattatcaagggcaaccttggtgaaagcagaaagggtgtgtgctattgcatatatatgggggaaaaggcaatatatttttcactgaagctgagcaaccacatattgctacaaggcaaatcaagaagacatcaggaaatcagatgcacaggaaataaaggaaagctgtgctttgtcattgaatcctaagttcttagctgctgatgcaagttgtcccccaaggccatcacaaagcagtggggcatgagctgtgtttcaggggccactaaataacagctggtactgaccccagaaaccgccttcatctccattcggaagcaggtgacacaccccttcagaaggtgccctgggttgccgagtgtcagaatatactcaggactccagaggtgtcacacgtggaactgacaggagacccgccaccgtggaggcagggggcaagaaactcaagaacgcatcaagagcaccagccctgggccagggaagacaggctcttcctgcagtttctcgtggacactgctggcttgcgggcagtcggtctccagggtacctgttgtctcttttccgatgtaataactactttgaccttacactatatgttgctagtagtttattgagctttgtatatttggacagtttcatatagggcttagagattttaaggacatgataaatgaacttttctgtcccatgtgaagtggtagtgcggtgcctttcccccagatcatgctttaattctttcttttctgtagaaaccaacagtttccatttatgtcaatgctaaatccaaagtcacttcagagtttgttttccaccatgtgggaatcagcattcttaatttcgttaaagttttgacttgtaatgaaatgttcaagtattacagcaatattcaaagaaagaaccacagatgtgttaaccatttaagcagatcatctgccaaacattatattactaataaaacttaaccaacacttacaattcagtcatcaaagtaagtaaaaattagatgctacagctagctaactgtatccctagaaatgatgaataatttgccatttggacagttaacatccaggtgttacaaagtcagtgttaattctaaagatgatcatttctgccctttagaatggcttgtcccatcagcagatgaatgtgttaagcacaaagcatcttccttaaagcacaaagagagggactaactgatgctgcatctagaaaacacctttaagttgcctttcctctttgtagttagcgttcaggcaggtgacgtgtggaaagtctagggggttccattctggccatgcgagcccagctcctaccaacgtcggtaacttgagcagtccctgttgctggccagagactgcctggtcgccagcgctcaccatgggtgccaggatgcttcgcagaggcactgtgctcacggttggacttggtgtcagtgggaaagggcagtgtggggactgtcatttttgtgatttaataacacacagtgaaaatccaggaagaatgaattaagcttcttctgggagttgtttattcctgctcgtgcttaagattgatgatttcgtgaaataaagaacatcatttcatttaagagatcatttcattaagatctctaatctgttttgagtctttacaaaatagccagttataaaatggggcttgatttgtttagactgaaggaagacgttttcccaaaatatactacagaagtgctacaatatttgcgatattaaaatgcctgcagattgaaaatgggggccactcatttcagaactgcaggaatggtgtagttacagatcgacataaactcctgccccccaacaatgccatgagctgcttagcccaggagacctgggagctatggcaggacggttaggccagccgatgagggactgcagagaggctactggaaggttaaggacccagagagaaatcgagaggtgccctacagcagccaggcctatcaggatccgtcacacacggcagcggcgtggacaccggcctgatgcagagcgtgacccctcctgctgggacctgtgttgtaagctcctatttgcttatcttgtttatttcaagcagaaatcaataaattccataaccctctgtattgactgcaatgtaagctgctgaggagactggttctgttggtcagtcaggtgtttgctcagccctgtctgatcacctgtgctgctctgtccctaactagtgacccatggaagcttccaagcagttttctcttcatcactactaacaaacaaaacactaagaaggcttagtatcgctctttttctgcggggctactctgaagtactgacttgctttccagtctgattcacgttagcagtgtgtacactactgtatcatcatcagcttcatcaccctgtaaaccaggctcctctgaagagactttggtgagatgaacgtgaggtaaaaatttcgttcggcaaaaagtgcaatatgtgtggtactttattttttatgttctttttttaaatctggggtattagtctgtgctttgggagaaatgcactagctctgcaattcccagctgggcaagtgtgtctctagtatctccacgcaactgatacactggtccctgtaaggcaaacagcatgttagcccgacaggaagagggggcccactttcacattcccggtgacactgaccgtccccagctgccccctcgccacctctgcctgcactgccttctgtcaccgtgggaaaaggaggctgatggttctctacaccatccaccttgagaatccctgcgtgggagagcatcagggcccaccaggggagtggggatggggctcaggggctgttcatgcccatctgagcaaaccccttctctcttccatccacttttgcctcctaggaaagaaaaagtcagtggccctttcttcctcagatatcaagaactcccaagtgtttaaaccgtatgctggagtcagtggttgggacagacaggagcccaagactgaagccagcccttgcctcttgtgtcccttcccaactctggtgctggagtaatggggtgctctgcattttgatggggagcaaggggggaccccccctgtaggagtatcggcctctcccctgccccctaccctctctcgtggaccaaagtctccagcagaagagactcatcataagactgacgactcccccacctccacccacacaccgagtgtcatcagtcctaaaggcagggaaacgctcacagaattctgcccacgggttagatgtggggagaaggatattctcagctccagagtgattaggtgatcagccagaaactaaggcaaggtgacaagcagcagcctggagtcacagttggtcccaggcgtgtgggcactaagcagcctctggagacatgcgggcagttgaggatgcaaggacacagtgagtgagtggcgctcctttttggggtcctccagcctctagtcaagccccaggttcgtaaatatgtttgtattacattttaaaacctgtatcaacagtcacatttaagctccctattggtttaaagaaaattcatactccaggtaactttttcccattcgacctcctatagagacaatatgcagtgtgtcatttcacagtctcagtccctgtgaacagtggctgacaccggtgccagggctgacctgctacactcaaactcctaaactgggctgcctctaactgcctcctgggaagccacccgagccactcggtctctttgtgcctaaacatgaaaggtgaaaattggagaacagggaagctcgtaagttggagtcattgtacaggcagggatctttgatcattttgttgcttctggaatttatttaattttttttttttttgagacagagtctcgctctgtcacccaggctggaatgcagtggcgtgatttcagctcactgcaacctccacctcctgggttcaagccattctcctgcctcagcctcccaagtagctgggactacaggtgtgtgctaccgcatccagctagtttgtatatttttagtagagatggggtttcaccatgttgtccaggctgatcttgaactcctgacctcaggtgacccacccaccttggcctcccaaagtactgggattacaggtgtgagccaccacacccgacctggaatttttttatagaacttatcttcagagcaatgtatgaaagacaagagcagtatcagccgggcgcggtggctcacgcctgtaatcccaacactttgggaggccaaggcaggcggatcacgaggtcaggagattgagaccatcctaacacagtgaaacgccgtctctactaaaaatacaaaaaattagccgggcgtggtggtgggcgcctgtagttccagctactcgggaggctgaggcaggagaatggcgtgaacccgggaggtggagcttgcagtgagccaagatcgtgccactgcactccagcctgggcgacagagcaagactccacctcaaaaaaaaaaaaaaagacaagagcagtatcatctgcctctgtttctaaactggacaaagagattttcttaaagtttctatcatctcccttctgacaggttctacagtgtggtctgaagcacctgtaatgtcagagcccttgtctggcccttggtggcaggtgaacgaaagcagtggagcctctcaccttccagtagcctctcacattcttattttaccatttttgtcctaattaaggtagcctagctgattctagaagacagccatcctacgtgcacccccaccttgtgtccacatcttctccaggcaggtttcaacctatcagcagactcaggcacacactggggcacagatagagaaccaggcggcagcagtgctcgcagacccacccagggagagctgtgatgggttctgcccagatactctgctcgcccacccacaagggagcaatagcttatatttgtacattagttttaccaagcactttctcttctaaccctcacaacaattctatgaaattagctggggagatactgtccttatttttcacagctgaagaaaccaaagctttgggaagtttgtgacttctctgagatcacagctggtgatagaaggagctgggacacgcgcttgggttgactggcttctggttttggttctctggcttctagtgctggaagaagccctctctttcccttctctttcctcagtagcatctgactcttttcataagcaaacagctgtataaacaaagcccccattttggtcaagcacagggtgaatgtgatattgttcccacaaccttattctccactcaacagccgcctggctttggggaagaggccgccttcaggtgacagtgcagctgtccaggtggccgtgcactgaaccaggctgagggagacaaaaaccccgcagacccgcctgcctttcagcgtccagttaactgcagaagtttaggctcacctcaaagatgtctagtttttccaagttacaatacagcagtttcctacagaacacccccttcctcaattgccaaggggccgcatcgcacggcatcaggccaccactgcaggccagcagattccaccccaggaacggtcatgaactcagcctttgtctcaacgaggggcgtaacatttccttacagtcaagccccatcaactagaagtgcttattacttttaggattaaaaaagtaataacagactttgacttaatactctgtcttttcagaggcaaagtgggtgggtagaggggagctttaaaaatagaagtacaaaacaacatcctggaaacatatgaccccagatggaataatgtcacattccccagtgcagataatgggctgctgctggctctgtggtgtctgtctgcagaagatttgctcagtcaaggaaattcaagtggtgagacctttccaccatgggtggtaagagaaacctgccttcaccaaaatctctgaaggggaaagaagtggagagaaaggtttgcttcacttcggggactgcagtttgagaaataaaagggatacagagatatctgcactttgtagaaagggcaagattatttgcttatatctgaagggaggtgggtggttttgctggatgtttggtctgaaagagttacttttgataaagttaatctaactgtagttatattttctgtgtgcttttttttaattactaagaaaaaaattggtgagttcagtagctttggtattatgagtgcaaatcataatagctccaatgtgaaaaaaaaaatcaaaagtataacttgtcacttaatgttagaaaattgcctaaaatgcagtgtaataaataatctctgtaccaaatagtaatttaaatggggtaattttctgcaaggaaaatgtactgtttttatgtttccaaccctcttgaattaaaataaaaacaacttcttttctaa

SEQ ID NO: 178841 - DNA, 3063 bp, Homo sapiens
  Payload ID: 15250
  Gene Symbol: SAV1
  Gene Name: salvador family WW domain containing protein 1
  Uniprot ID: Q9H4B6
  ENST ID: ENST00000324679
  CDS Start-End: 365-1516
acgggatgtaggcggcggcggcggtagtggtagcggttattcggcggcccgcggcggaccatggccctggccctggcccggcgtcgctgggctttcctcacggcgtccccgagcagcgtcgcagagcgggccgacttccgggaaggaactgaccagcgactgagcggcggccggcgcgcttagcgccctgaacatgcggcagtccctgcgggcgaccccgggctccggacaggcggcggcggaggcggcggctcgggagggaaggaggcggcggcgccggcggaggtggcggcggagacggccggcgcccggcgcggagccctagggaggcagttcagcgcggcctcgggcctcgtcgagaaggatgctgtcccgaaagaaaaccaaaaacgaagtgtccaagccggccgaggtgcaggggaagtacgtgaagaaggagacgtcgcctctgcttcggaatcttatgccttcattcatccggcatggtccaacaattccaagacgaactgatatctgtcttccagattcaagccctaatgccttttcaacttctggagatgtagtttcaagaaaccagagtttccttagaactccaattcaaagaacacctcatgaaataatgagaagagaaagcaacagattatctgcaccttcttatcttgccagaagtctagcagatgtccctagagagtatggttcttctcagtcatttgtaacggaagttagttttgctgttgaaaatggagactctggttcccgatattattattcagacaatttttttgatggtcagagaaagcggccacttggagatcgtgcacatgaagactacagatattatgaatacaaccatgatctcttccaaagaatgccacagaatcaggggaggcatgcttcaggtattgggagagttgctgctacatctttaggaaatttgactaaccatggttctgaagatttaccccttcctcctggctggtctgtggactggacaatgagagggagaaaatattatatagatcataacacaaatacaactcactggagccatcctcttgagcgagaaggacttcctcctggatgggaacgagttgagtcatccgaatttggaacctattatgtagatcacacaaataagaaggcccaatacaggcatccctgtgctcctagtgtacctcggtatgatcaaccacctcctgtcacataccagccacagcaaactgaaagaaatcagtcccttctggtacctgcaaatccatatcatactgcagaaattcctgactggcttcaggtttacgcacgagcccctgtgaaatatgaccacattctgaagtgggaactcttccagctggctgacctggatacataccagggaatgctaaagttgctcttcatgaaagaattggagcagattgttaaaatgtatgaagcatacagacaagcccttcttacagagttggaaaaccgaaagcagagacagcagtggtatgcccaacaacatggaaaaaatttttgagctgattttttaaaaatttaagttttgtaagagctttaaaatattttcacagataaaaaattgcaaacaagtactctggttaataaatgctgcttcctttgtggaaattataaaattctaactttacatgtattttgttattagaaattttcttttattgaatgagaaaaattagtctatcattttaagagccaatatggcaaacactttcaaatactgtatattaggaaactgttttggtattcttgatggaaaaaaacgcagcggaaatgtcattatgaacagatgttaaataggaaattattacttgttaacttcttacagcagtagtaccttctttaaaaaaaaaaaagaatctgcggtatttttttaaaaaaaaagtttaccgctgtagtgtgaaatattgtctggaaagggatggtttaaatattaccatgatgtagttgaaatataaaataggatttggaaccttattgtgataaatatttatatatgatgtatgtttgtctcccctctccaaagtaaggaacccagctgggcgtggtggctcactcctgtaatcccagcattttgggaggccgaggtgggtggaccgcttgagtccacgagtttaagaccagcctgggcaacatggtgaagccccatctctacaaaaaatacaaaaaaattagccgggtatgatggtgtgtgcctctagtcccagctacttgggaggctgaggtcagaggatggcttgagcccaagaggcagaggttgcagggtcaagatcgcaccacttgcactgcagcctgagagagagagagccagaccttgtctcaaaaaataaaaaataaaaaaataaaaacaaaataaggaatccttttaaagcatgttgagaaagtattttttggtatgaatgggtgacgggccttttaatctttcaggaatacatataagcaggaatacttagcctgtattgggaaggtgcgtgaaactcaaagttgctaacatcatcttccttattttcagccagtgctgttactgcatttagcatggctctgacgaggcagtggagagttcctgacagcatagcatactgccttctgacagactgggttaagctaccaaaaatgacaaccagggattcaaaaaaaatttttggtcattaaatcgaatgtatattattactttttaattttctaagtatttatcacaggactttaacaccatatatttccctcccagtttttctccccttttggtttaatagttaaaacatttttcataattagtgctgtacatttgattgcaaacaaattggtgatacttctaaactataactataaatctctagaattctgtgaatttcaacattatttgaagtagttcttcagttatatttacatgtgttgtaaatatgtaaatatacttttagcttaggaagtcttccagaatacaaactactcccagttagatatcagtgagtttgaataactgaagaaatgttgacaatgttaagtgtttgattttatataacaagcttattaaatatatttttgtggaaacta

SEQ ID NO: 178842 - DNA, 744 bp, Homo sapiens
  Payload ID: 15250
  Gene Symbol: SAV1
  Gene Name: salvador family WW domain containing protein 1
  ENST ID: ENST00000553731
  CDS Start-End: 1-204
gtaacggaagttagttttgctgttgaaaatggagactctggttcccgatattattattcagacaatttttttgatggtcagagaaagcggccacttggagatcgtgcacatgaagactacagatattatgaatacaaccatgatctcttccaaagaatgccacagaatcaggggaggcatgcttcagatatgaccacattctgaagtgggaactcttccagctggctgacctggatacataccagggaatgctaaagttgctcttcatgaaagaattggagcagattgttaaaatgtatgaagcatacagacaagcccttcttacagagttggaaaaccgaaagcagagacagcagtggtatgcccaacaacatggaaaaaatttttgagctgattttttaaaaatttaagttttgtaagagctttaaaatattttcacagataaaaaattgcaaacaagtactctggttaataaatgctgcttcctttgtggaaattataaaattctaactttacatgtattttgttattagaaattttcttttattgaatgagaaaaattagtctatcattttaagagccaatatggcaaacactttcaaatactgtatattaggaaactgttttggtattcttgatggaaaaaaacgcagcggaaatgtcattatgaacagatgttaaataggaaattattacttgttaacttcttacagcagtagtaccttctttaaaaaaaaaaaagaa

SEQ ID NO: 178843 - DNA, 3034 bp, Homo sapiens
  Payload ID: 15250
  Gene Symbol: SAV1
  Gene Name: salvador family WW domain containing protein 1
  ENST ID: ENST00000555720
  CDS Start-End: 1-939
agaaaccagagtttccttagaactccaattcaaagaacacctcatgaaataatgagaagagaaagcaacagattatctgcaccttcttatcttgccagaagtctagcagatgtccctagagagtatggttcttctcagtcatttgtaacggaagttagttttgctgttgaaaatggagactctggttcccgatattattattcagacaatttttttgatggtcagagaaagcggccacttggagatcgtgcacatgaagactacagatattatgaatacaaccatgatctcttccaaagaatgccacagaatcaggggaggcatgcttcaggtattgggagagttgctgctacatctttaggaaatttgactaaccatggttctgaagatttaccccttcctcctggctggtctgtggactggacaatgagagggagaaaatattatatagatcataacacaaatacaactcactggagccatcctcttgagcgagaaggacttcctcctggatgggaacgagttgagtcatccgaatttggaacctattatgtagatcacacaaataagaaggcccaatacaggcatccctgtgctcctagtgtacctcggtatgatcaaccacctcctgtcacataccagccacagcaaactgaaagaaatcagtcccttctggtacctgcaaatccatatcatactgcagaaattcctgactggcttcaggtttacgcacgagcccctgtgaaatatgaccacattctgaagtgggaactcttccagctggctgacctggatacataccagggaatgctaaagttgctcttcatgaaagaattggagcagattgttaaaatgtatgaagcatacagacaagcccttcttacagagttggaaaaccgaaagcagagacagcagtgccagtgctgttactgcatttagcatggctctgacgaggcagtggagagttcctgacagcatagcatactgccttctgacagactgggttaagctaccaaaaatgacaaccagggattcaaaaaaaatttttggtcattaaatcgaatgtatattattactttttaattttctaagtatttatcacaggactttaacaccatatatttccctcccagtttttctccccttttggtttaatagttaaaacatttttcataattagtgctgtacatttgattgcaaacaaattggtgatacttctaaactataactataaatctctagaattctgtgaatttcaacattatttgaagtagttcttcagttatatttacatgtgttgtaaatatgtaaatatacttttagcttaggaagtcttccagaatacaaactactcccagttagatatcagtgagtttgaataactgaagaaatgttgacaatgttaagtgtttgattttatataacaagcttattaaatatatttttgtggaaactaagcgcgtggtttttgagtccatgttttagacatagtgctgtatttcatttttctgttcaaaaggccatagacaaaggaatcaatataattgaaaggggtaatgaaaaggggtattgaaaaatgaaagtgtggctagtggaattttatcactgggaaaagataatttgctgaacttgtgatcagacttttctaagatgtcagtatatatatcttatgaactcccacactcctctatcttaattgttctttcctgtcacttcttactttatatcgctacttaattatggtgtagccatttctgtgacagtctttagaagtttctctgttttggacctcctagataagtattacttttttcattaacacactttccttcttcctctaagaagtctgttcagtgaaactccactagagattttagtcattaagaactagaagttacctaaaggaattagcatgttttgtaaaatagaaacttaagtttgtactgatgtcaacattaaataaaatgcatcttgagtctaaaaaaagagataaaccttcatcattctatatcagcacctctcattttcaaattcagtaagcatttgtttttaatcttaggaaccagagtaaactttaataatagttcacatattaaaagaataaacctatgaagaatacattctttgtgtaccaaatgaaaaaatatacaatgcagtgaaactcacatatacaaagtgattttttgtgcattttttatcaagaggtttatattctattaaaccatgtaaaagcaatatctggtttttgataaagcaactaaggaactctaaaatgtgcttaaaaataagattgtgatatatataagatgatacagattaaatccagcctgctgagttatgatgctgtgttttaacaaatggctaatgtgaaataatttaaaattttttctgtagaaattaaatgagcatatccaaacgtggaatatcacatgatttaattataacccagtagtagaatttagtaaattcaagcagaacacgtgtactgttatcataaatagacaaatactttataacagcatttttgaagaaaaatcaggaaattgtacatgttaacaaaatagtataaccatgcatacatacatctgcttattaaacactgaagtaaaagaactaatccagtttgcagtcttcagaggtgtttagtattttactccgttctgatggaagcactttgaatgtttgcatggagacataaaactgaatatttaattgacaattggtcatgcacctgtatttcttaaaatttgcattacatttttttcttttctgattgttcagtagattccgactttggtgtagggaaagcttgatgatacagatgtctgtgggttgctgctgcactgtaaagcttgtacaaagcctagaataaaagcatcaaaattataaaacattttattaaacacacagatgtaaaattttttcctttttagtttatcgtactgtataaaatttagcatgttgaatttgaaatcttttttaatcgatatataaattattatcttaaaattcaaaagtattttcaactcctcaa

SEQ ID NO: 178844 - DNA, 562 bp, Homo sapiens
  Payload ID: 15250
  Gene Symbol: SAV1
  Gene Name: salvador family WW domain containing protein 1
  ENST ID: ENST00000556735
  CDS Start-End: 331-562
ggttattcggcggcccgcggcggaccatggccctggccctggcccggcgtcgctgggctttcctcacggcgtccccgagcagcgtcgcagagcgggccgacttccgggaaggaactgaccagcgactgagcggcggccggcgcgcttagcgccctgaacatgcggcagtccctgcgggcgaccccgggctccggacaggcggcggcggaggcggcggctcgggagggaaggaggcggcggcgccggcggaggtggcggcggagacggccggcgcccggcgcggagccctagggaggcagttcagcgcggcctcgggcctcgtcgagaaggatgctgtcccgaaagaaaaccaaaaacgaagtgtccaagccggccgaggtgcaggggaagtacgtgaagaaggagacgtcgcctctgcttcggaatgcgtcgagatgtgcgtcatgtttgcaaacattgcgggtgtctctcgactgtgctgcaagttgtgcgaactctggggcagaattccttagtcctgctgccggatgcagacttgagaagatcttatgccttcattcat

SEQ ID NO: 178845 - DNA, 338 bp, Homo sapiens
  Payload ID: 15250
  Gene Symbol: SAV1
  Gene Name: salvador family WW domain containing protein 1
  ENST ID: ENST00000557458
  CDS Start-End: 1-268
atttggaacctattatgtagatcacacaaataagaaggcccaatacaggcatccctgtgctcctagatatgaccacattctgaagtgggaactcttccagctggctgacctggatacataccagggaatgctaaagttgctcttcatgaaagaattggagcagattgttaaaatgtatgaagcatacagacaagcccttcttacagagttggaaaaccgaaagcagagacagcagtggtatgcccaacaacatggaaaaaatttttgagctgattttttaaaaatttaagttttgtaagagctttaaaatattttcacagataaaaaattgcaaacaa

SEQ ID NO: 178846 - DNA, 7711 bp, Homo sapiens
  Payload ID: 15251
  Gene Symbol: SASH1
  Gene Name: SAM and SH3 domain containing 1
  Uniprot ID: O94885
  ENST ID: ENST00000367467
  CDS Start-End: 476-4219
attttgaagagaggggtcccggggagctccctccaagatctagaggctccgcggccacccctgccgggtcctgccaagacttgctagaaggaacgagtcgcgtgccttagttagttggttcccgtcacaggaagaaacgcctttgcagtgggtttaattgcttctgggccgagcgaattccccgccgtacaactcagtggtgcggactttgcctcctgctaccctgttgctgcgccgagcggggtgggaaagtttctggagttgtcagtcgcgcagcccgtggccacctagacccgaggtgcgggcgcctgcgaagggcccccgcggggtggccggggccgccggggcatgcagcgcgggggcgcggctcggtgacgccgcgggcggggacccggcatccgggcaggctgcgcgcgggtgcggggcgagggcgccgcggggactgggacgcacggcccgcgcgcgggacacggccatggaggacgcgggagcagctggcccggggccggagcctgagcccgagcccgagccggagcccgagcccgcgccggagccggaaccggagcccaagccgggtgctggcacatccgaggcgttctcccgactctggaccgacgtgatgggtatcctggacggttcactgggaaacatcgatgacctggcgcagcagtatgcagattattacaacacctgtttctccgacgtgtgcgagaggatggaggagctgcggaaacggcgggtttcccaggacctggaagtggagaaacccgatgctagccccacgtcacttcagctgcggtcccagatcgaagagtcgcttggcttctgtagcgccgtgtcaaccccagaagtggaaagaaagaaccctcttcataaatcaaactcagaagacagctctgtaggaaaaggagactggaagaagaaaaataagtatttctggcagaacttccgaaagaaccagaaaggaataatgagacagacttcaaaaggagaagacgttggttatgttgccagtgaaataacgatgagcgatgaggagcggattcagctaatgatgatggtcaaagaaaagatgatcacaattgaggaagcacttgctaggctcaaggaatacgaggcccagcaccggcagtcggctgccctggaccctgctgactggccagatggttcttacccaacgtttgatggctcatcaaactgcaattcaagagaacaatcggatgatgagactgaggagtcggtgaagtttaagaggttacacaagctggtaaactccactcgcagagtcagaaagaaactaattagggtggaagaaatgaaaaaacccagcactgaaggtggggaggagcacgtgtttgagaattcgccggtcctggatgaacggtccgccctctactctggcgtgcacaagaagccccttttctttgatggctctcctgagaaacctcccgaagatgactcagactctctcaccacgtctccatcctccagcagcctggacacctggggggctggccggaagttggtcaaaaccttcagcaaaggagagagccggggcctgattaagccccccaagaagatggggacattcttctcctacccagaagaagaaaaggcccagaaagtgtcccgctccctcaccgagggggagatgaagaagggtctcgggtccctaagccacgggagaacctgcagttttggaggatttgacttgacgaatcgctctctgcacgttggcagtaataattctgacccaatgggtaaagaaggagactttgtgtacaaagaagtcatcaaatcacctactgcctctcgcatctctcttgggaaaaaggtgaaatcagtgaaagagacgatgagaaagagaatgtctaaaaaatacagcagctctgtctctgagcaggactcgggccttgatggaatgcctggctcccctccgccttcacagcccgaccccgaacacttggacaagcccaagctcaaggccgggggttctgtagaaagtcttcgcagttctctcagtgggcagagctccatgagcggtcaaacagtgagcaccactgattcctcaaccagcaaccgggaaagcgtcaagtcggaagatggggatgacgaagagccgccttaccgaggcccgttctgcgggcgtgccagggtgcacaccgacttcacccccagtccctatgacacagactcactcaagctcaagaaaggagatatcatcgatataatcagcaagccacccatggggacctggatgggcctgctgaacaacaaagtcggcacgttcaagttcatctacgtggacgtgctcagtgaagacgaggagaaacccaaacgccccaccaggaggcgtcggaaaggacgaccaccccagcccaagtctgtggaggatctcctggatcggattaacctaaaagagcacatgcccactttcctgttcaatggatatgaagatttggacacctttaagctgctggaggaggaagacttggatgagttaaatatcagggacccggaacacagagctgttctcttgacagcagtggagctgttacaagagtatgacagtaacagcgaccagtcaggatcccaggagaagctgctcgttgacagccagggcctgagtggatgctcaccccgagactcaggatgctacgaaagcagtgagaacctggaaaacggcaagactcggaaagctagcctcctatctgccaagtcatccaccgagcccagcttgaagtcttttagcagaaaccagttgggcaattacccaacattgcctttaatgaaatcaggggatgcactgaagcagggacaggaggagggcaggctgggtggtggccttgccccagacacgtccaagagctgtgacccacctggtgtgactggtttgaataaaaaccgaagaagcctcccagtttccatctgccggagctgtgagaccctggagggcccccagactgtggacacttggccccgatcccattccctggatgaccttcaagtggagcctggtgctgagcaagacgtgcctaccgaggtgacagaaccgccccctcagattgtacctgaagtgccacagaagacgaccgcctcttccacgaaggcccagcccctggagcaagactctgctgtcgacaatgcattgctactgacccaaagcaagagattttctgaacctcagaaattgacaactaagaaactggagggctcaatcgcagcctctggtcgcggcctgtcaccccctcagtgtttgcccagaaactatgatgctcagcctcctggagctaaacacggtttagcaaggacgcctctggagggccacagaaaaggacacgagtttgaaggaacacaccatcccctgggcaccaaagaaggggtagatgctgagcagagaatgcagcccaaaattccatcacagcctccacctgttcctgccaaaaagagcagagaacgccttgctaacggactccaccctgttcccatgggccccagtggggccctccccagtcccgatgcgccatgcctgccagtgaaaaggggcagccccgccagccccaccagccctagcgactgtcccccagcactggctcccaggcctctctcagggcaggcgcctggcagcccaccaagcacaaggccgcccccctggctctcagagctccccgagaacacaagcctccaggagcacggtgtgaagctgggcccggctttgaccaggaaggtctcctgtgcccggggagtggatctagaaacgctcactgaaaacaagctgcacgctgaaggcatcgatctcacggaggagccgtattctgataagcatggccgctgtgggattcctgaagccctggtgcagagatacgcagaggacttggatcagcccgagcgggacgtcgccgccaacatggaccagatccgggtgaagcagcttcggaagcagcaccgcatggcgattccaagtggtggactcacggaaatctgccgaaagcccgtctctcctgggtgcatttcgtctgtgtcagattggctcatttccatcggtctgcccatgtacgccggcaccctctccaccgcgggcttcagcacactgagccaagtgccttctctgtctcacacttgccttcaggaggccggcatcacagaggagagacacataagaaagctcctatctgcagccagactcttcaaactgccgccaggccctgaggccatgtagccaggcccggaatgggcctctctggacaagagccaccctttcactgtgcatatgatgctgatgcaattcctccatcatctctggacgtgcagaccagatccagaagaaaggcctggcgtgtggccaaacagcgtgaaaccttggcacaggactgaggatcctctcctccagaaaagccccctcgaggaaataaattagtgcggttctctttgacccccaaagacaagacaagcacttatttttattttcagaagacaaaagaaccaagatgccaactggctgcgaatgctctatctccagtctgtctctgtgtactggtagaggctgggaggagtagggggcagcctgttccatttctgatagtgcccttgctcttctgtctgtcatcttgcaggatgcccgagggccagatgggcttagctaggccaaagtaacagactcaagagttattgtacattactgaccacgctcatttgttcaaaagttagaacatctggctgcaccaggaaaaaaaaaaaaaaaaagtcctgttcttctttagataaacaagagacattttcataattgctttctagcaatcagcttttatttgccttaatataagcttttaagcagttatctaactagtgtccacaaccctgtaaccatacttccacatcttcagcttaggcagacatcgaacctctctgggatgtttccagcaaaagtgagcttttctaatcgtctcattgtaacatggcttattttgtagaggtattcatcagccacacacttcatgttggtttttggtttttaagctaactacaaatctagtaaaaagctatctgaaattcacaaatatcatgtgtgtgcgtgcgtgcgtgcgcgtgtgtgtctgtattcatagtgactgcttttggttttaaccagtttagtatcgttactgtgtggatcgtcgcgctgcagtattgacttggaatcctgaccatgtccatcccaaaattcagtcctcagttaacggatcatgtttgcaaaaggtcactgtgaggctgcatatttcagaaagatgtccttaataagggaagtcatgtataagatgttttctaaaagacttttcagtattacaactaatactattattatccttctttttttatttagataattcttttaatttaaacaaaggttcactatggaaccagacaaatctcattagccatgtgttaagtatttgctactttaaattgttttacaactgatttcagcacattctatccttttttttttttgaaatggagtttcgctcttgtcacccaggctggagtgcaatggcacgatcttggctcactgcaacctcagtctcccaggttcaagtgattctcctgccttagcctcccgagtagctgggattataggcacccaccaccacgcccagctaatttttgtattattagtagagacagggtttcaccatgttggccaggctggtctcaaactcaactcctgacctcaggtggtccacccgcctcagcctcccaaagtgctgggattacaggtgtgagccaccgcacctggcctctgtcctcttttagtctagtgtctggttttctagcaaacagtaaatttaaacaagtaaactattatggtttccattgcttacaaaatgattttcctttacattcttatcatgaacactattttaagcatcaaatgcaatcatctaaaatataaaggtcaatcatttataatagaaacaccttgaccacaagcccttgattgaacattttataatatttcatctacttattaaaacaaataatttcccttgggttggaggggaagtgatttcataaattaattagaaagccatctttagcatattgcttatgtctggatccatgtttctgaggaaaaagacattctcaggtgatgtatttttttcatgcattagtatgcatttttaaaaaataatgcatgtttctttaataattaattttcatcttctataagatgccatgtgaagaagttgtggaaatgtagaataaaaagctaaagctgccaaatttctgttgaactcttaaaaacagctcatgtttgtttgtcctctcgggttgtggcctagcctatttgcaatgtaatgaagctgcagggttcttgtatagctaaagcgttcaatgcatttcacgtgctgtggtggatgtgggtgctgtagacaggcttcttctcttcctgctctcaaaatacctcggcttgacatttggacagatcctgtcattgtttaagctgagcaaaaaaccacacaaaagttgtgtaagagatgagataacaaaggagcgagagaaatctcatgtgaatttccaagttttaattcgttctccatgaaggattttcatttcagtgaaagtcgcagcagaagagggaactttctggagtttttgagaatgccaaaccacatttttatcacacttctttggaaatcaatgcctttgcatagaaaatcaaattcagggaccacaaagaattttcagtgggaatgtctagtctgaggggtctgaggttgtttttactttattgtgttgtttaaatattttaaaaatatctttagcgtttggtcttttttttttctgtaaacatttaatttggtctgagaaaagctgaatgtttgggtgtgacgtttgactgaggtggattggggctgcctgtggacattagtgaacaggtggtaggcttcaggaatatccagttttaatcagttgcatttggtacagaattttgagtaatggtgaaaattgttgtctttggaaagcacaaaagaaacctggaaaggcagttcggctcaggtagctacacataacattgtgtatgattttcacttcaaagctgtctggaaggaaatgcagtcagctccagctagtactatttatgtacccagataactaagatattgtttcatggccttgccttagtcagaggcccttttctctgtcctgaacccccaggtatgggtgaaattggaaattactaatctattggaaatcagttcctgacatagtaaagtttgctttcataactgcagcaaaaaaggtcaacttgccaagtcactgctgccatgtgtgtactgtattattttcagaaaaaaatataatagtctgagtccaagttatcttgatttaaaattgatagagaaaagaaactgtcgagcaagttatataacaactaacaacattgcactttctgtatatgaaatcaatatttaaataacttatttttctccattgctgttcttaaaaacattgtaagtagctgtaatataccagtaccaatatgttcttgcaattgcttcagcccaagaaagctgtgtattgttttaaaaattgtaaaaattattgtgatgattcatttagcataaagagaggtggacggaagggttttcctatgtatcaaaacttgtctataattatgtcatctatgtacctagaaaaaagtaaataaatttcttcagttgaatatgcc

SEQ ID NO: 178847 - DNA, 591 bp, Homo sapiens
  Payload ID: 15251
  Gene Symbol: SASH1
  Gene Name: SAM and SH3 domain containing 1
  ENST ID: ENST00000367469
  CDS Start-End: 54-308
gagtcagagaggaagtcagagaccatttgaacgtatggccagcagctcacttcatggaggaacaagattgcagggacggttcactgggaaacatcgatgacctggcgcagcagtatgcagattattacaacacctgtttctccgacgtgtgcgagaggatggaggagctgcggaaacggcgggtttcccaggacctggaagtggagaaacccgatgctagccccacgtcacttcagctgcggtcccagatcgaagagtcgcttggcttctgtagcgccgtgtcaaccccagaagtggaaagaaagtaagtctttctccctctgcccaggaccaccttccaagaaggtgtcttttaggtccatgctgacggaaatcaaacaggcgatcatgtgcgtatgtactatggagttatgcgatgtcattttccttaacatgttgcatgcatgtgtgtgtatctaggtggctaagagtgtgttttgtaatgcagttggtgatgtctgaggattttgtgaagagttactgattttacacttattgtgaataaaccctaaataaatctccggaaatagaaagggaaaggataggtgcatt

SEQ ID NO: 178848 - DNA, 5075 bp, Homo sapiens
  Payload ID: 15251
  Gene Symbol: SASH1
  Gene Name: SAM and SH3 domain containing 1
  ENST ID: ENST00000622663
  CDS Start-End: 1304-3277
agtggcttttactagaaaaacaacagtgaatttgaatcaagttctgcaaatacagaaatcactaagatataagcagttccgtgaagtttgcaaccacctaaaaggataataaagttttcattctttataacatcagcattgttcctactgaaattaaaaagtgtggtcaaacacagtcactgaatcaaccgttttctttctgggcaaatgtggcatcttcattcactgagagaaaagggtcaccatgaattaacttgggcagttcgatgggaaagttaccagcgtttttggctaggatggggaagcggtgagtgagtaattctcttggcctgattggacaactgtaaacataaccttctccccccctcttctcagcgatttaaagctaaacaaaatgaaagtctgtttgaaaagcttgctgttggtgtcagagccgtgggatttcaaacctgggttttcaggatgcctgagtacatggatcctctaacacatatcccttcattatctctactgaatgtagctgatgttaggggaagttctgtgctggagacagggaatctcacagcactggactcatggagggtttttcttttgttttttaggctttttaaaaaaaatggttggtttttgcatgttaaggggattctagacctctggggtaggcagagttccagtggcctgtgaaagggaaaaatgagtgaagtttccttacgacatgactcatgtgtttttttctcatcatttctcgttttctactttcatcctgtccacgtatttgtgattcagagatgtcctgcaaacggggactgctgggttggtgcactgccggctggcttaagcataactgaagtttttctgccctaccctcttttccacagagaacctgcagttttggaggatttgacttgacgaatcgctctctgcacgttggcagtaataattctgacccaatgggtaaagaaggagactttgtgtacaaagaagtcatcaaatcacctactgcctctcgcatctctcttgggaaaaaggtgaaatcagtgaaagagacgatgagaaagagaatgtctaaaaaatacagcagctctgtctctgagcaggcggtcaaacagtgagcaccactgattcctcaaccagcaaccgggaaagcgtcaagtcggaagatggggatgacgaagagccgccttaccgaggcccgttctgcgggcgtgccagggtgcacaccgacttcacccccagtccctatgacacagactcactcaagctcaagaaaggagatatcatcgatataatcagcaagccacccatggggacctggatgggcctgctgaacaacaaagtcggcacgttcaagttcatctacgtggacgtgctcagtgaagacgaggagaaacccaaacgccccaccaggaggcgtcggaaaggacgaccaccccagcccaagtctgtggaggatctcctggatcggattaacctaaaagagcacatgcccactttcctgttcaatggatatgaagatttggacacctttaagctgctggaggaggaagacttggatgagttaaatatcagggacccggaacacagagctgttctcttgacagcagtggagctgttacaagagtatgacagtaacagcgaccagtcaggatcccaggagaagctgctcgttgacagccagggcctgagtggatgctcaccccgagactcaggatgctacgaaagcagtgagaacctggaaaacggcaagactcggaaagctagcctcctatctgccaagtcatccaccgagcccagcttgaagtcttttagcagaaaccagttgggcaattacccaacattgcctttaatgaaatcaggggatgcactgaagcagggacaggaggagggcaggctgggtggtggccttgccccagacacgtccaagagctgtgacccacctggtgtgactggtttgaataaaaaccgaagaagcctcccagtttccatctgccggagctgtgagaccctggagggcccccagactgtggacacttggccccgatcccattccctggatgaccttcaagtggagcctggtgctgagcaagacgtgcctaccgaggtgacagaaccgccccctcagattgtacctgaagtgccacagaagacgaccgcctcttccacgaaggcccagcccctggagcaagactctgctgtcgacaatgcattgctactgacccaaagcaagagattttctgaacctcagaaattgacaactaagaaactggagggctcaatcgcagcctctggtcgcggcctgtcaccccctcagtgtttgcccagaaactatgatgctcagcctcctggagctaaacacggtttagcaaggacgcctctggagggccacagaaaaggacacgagtttgaaggaacacaccatcccctgggcaccaaagaaggggtagatgctgagcagagaatgcagcccaaaattccatcacagcctccacctgttcctgccaaaaagagcagagaacgccttgctaacggactccaccctgttcccatgggccccagtggggccctccccagtcccgatgcgccatgcctgccagtgaaaaggggcagccccgccagccccaccagccctagcgactgtcccccagcactggctcccaggcctctctcagggcaggcgcctggcagcccaccaagcacaaggccgcccccctggctctcagagctccccgagaacacaagcctccaggagcacggtgtgaagctgggcccggctttgaccaggaaggtctcctgtgcccggggagtggatctagaaacgctcactgaaaacaagctgcacgctgaaggcatcgatctcacggaggagccgtattctgataagcatggccgctgtgggattcctgaagccctggtgcagagatacgcagaggacttggatcagcccgagcgggacgtcgccgccaacatggaccagatccgggtgaagcagcttcggaagcagcaccgcatggcgattccaagtggtggactcacggaaatctgccgaaagcccgtctctcctgggtgcatttcgtctgtgtcagattggctcatttccatcggtctgcccatgtacgccggcaccctctccaccgcgggcttcagcacactgagccaagtgccttctctgtctcacacttgccttcaggaggccggcatcacagaggagagacacataagaaagctcctatctgcagccagactcttcaaactgccgccaggccctgaggccatgtagccaggcccggaatgggcctctctggacaagagccaccctttcactgtgcatatgatgctgatgcaattcctccatcatctctggacgtgcagaccagatccagaagaaaggcctggcgtgtggccaaacagcgtgaaaccttggcacaggactgaggatcctctcctccagaaaagccccctcgaggaaataaattagtgcggttctctttgacccccaaagacaagacaagcacttatttttattttcagaagacaaaagaaccaagatgccaactggctgcgaatgctctatctccagtctgtctctgtgtactggtagaggctgggaggagtagggggcagcctgttccatttctgatagtgcccttgctcttctgtctgtcatcttgcaggatgcccgagggccagatgggcttagctaggccaaagtaacagactcaagagttattgtacattactgaccacgctcatttgttcaaaagttagaacatctggctgcaccaggaaaaaaaaaaaaaaaaagtcctgttcttctttagataaacaagagacattttcataattgctttctagcaatcagcttttatttgccttaatataagcttttaagcagttatctaactagtgtccacaaccctgtaaccatacttccacatcttcagcttaggcagacatcgaacctctctgggatgtttccagcaaaagtgagcttttctaatcgtctcattgtaacatggcttattttgtagaggtattcatcagccacacacttcatgttggtttttggtttttaagctaactacaaatctagtaaaaagctatctgaaattcacaaatatcatgtgtgtgcgtgcgtgcgtgcgcgtgtgtgtctgtattcatagtgactgcttttggttttaaccagtttagtatcgttactgtgtggatcgtcgcgctgcagtattgacttggaatcctgaccatgtccatcccaaaattcagtcctcagttaacggatcatgtttgcaaaaggtcactgtgaggctgcatatttcagaaagatgtccttaataagggaagtcatgtataagatgttttctaaaagacttttcagtattacaactaatactattattatccttctttttttatttagataattcttttaatttaaacaaaggttcactatggaaggaaatgcagtcagctccagctagtactatttatgtacccagataactaagatattgtttcatggccttgccttagtcagaggcccttttctctgtcctgaacccccaggtatgggtgaaattggaaattactaatctattggaaatcagttcctgacatagtaaagtttgctttcataactgcagcaaaaaaggtcaacttgccaagtcactgctgccatgtgtgtactgtattattttcagaaaaaaatataatagtctgagtccaagttatcttgatttaaaattgatagagaaaagaaactgtcgagcaagttatataacaactaacaacattgcactttctgtatatgaaatcaatatttaaataacttatttttctccattgctgttcttaaaaacattgtaagtagctgtaatataccagtaccaatatgttcttgcaattgcttcagcccaagaaagctgtgtattgttttaaaaattgtaaaaattattgtgatgattcatttagcataaagagaggtggacggaagggttttcctatgtatcaaaacttgtctataattatgtcatctatgtacctagaaaaaagtaaataaatttcttcagttgaatatg

SEQ ID NO: 178849 - DNA, 2626 bp, Homo sapiens
  Payload ID: 15252
  Gene Symbol: SASH3
  Gene Name: SAM and SH3 domain containing 3
  Uniprot ID: O75995
  ENST ID: ENST00000356892
  CDS Start-End: 115-1257
gctgaaggctcggttcatgccgtgcccccgggcagttctggtgaggctaagcaagaggcctctgcatcttgacacctaggagagcagggacggagtctcccagggtggaggaccatgctgcgccgcaagccctccaatgccagtgagaaggagcccactcagaagaaaaagctctcccttcagcgctccagcagcttcaaggattttgccaaatccaaacccagctcccccgtggtgagcgagaaggagtttaatctggatgataacattccagaagatgactcaggtgtccccaccccagaagatgctgggaagagtggcaaaaagctggggaagaagtggagggcagtgatttcccgaaccatgaacaggaagatgggcaagatgatggtgaaggccctgtcagaagagatggcagacactctggaggagggctctgcctccccgacatctccagactacagcctggacagccctggccctgagaagatggcgctggccttttctgagcaagaggagcatgaacttccggtgctcagccgccaggcatcaacaggcagtgagctctgcagccccagcccaggttctggcagcttcggggaggaaccacctgccccccagtacacagggcctttctgtggccgggcacgagtccacaccgacttcactcccagcccctatgaccacgactcgctgaaactgcagaaaggagatgtgatccagatcattgaaaagccacctgtgggcacgtggctgggcctactcaatggcaaggtgggctctttcaaattcatctatgtggatgtgctgcccgaggaggccgtggggcatgcccgccccagccgccgacagagcaagggcaagaggcccaagcctaagaccctgcatgagctgctggagcgcatcggcctggaggagcacacatccaccctcctgctcaatggctaccagacactggaagacttcaaagagctgcgagaaacacacctcaatgagctgaacatcatggatccacagcaccgggccaagctgctcacggccgccgagctgctgctggactatgacactggcagtgaggaggctgaagagggcgccgagagcagccaggagccagtggcacacacagtgtcggaacccaaggtggacatcccgcgcgactcaggctgctttgagggctcggagagcgggcgcgatgacgcagagctggcaggcactgaggagcagctgcaaggcctctccctggccggggcaccttgaggtggcggtggcaataggccaaggctgggacccagctgcaaaggctgtaggagtgggcccagcctcccgtggtggcccaggtcctgaggactggcactgagcctggccctgcttccccagggacacttagggccacagaggccaggccagggccctacaggttccaggctcagctggagtggttggggagtcgcccaagggcacatcccacctgcctgagccccgccctccaccagcgactgacagcgcagcccctcctggcaccaactgctcccctgccatggccacggccacagcaagtggggcactgggaaaccctgcccatgtccctcaccaacaaggcctccaaatcctcctcacccccacaccacctacccctgtcgcactgctcctgaaaagggggccaagtcaatgtttcaggtcagtctaaaaaccctagggaagctggccatttaaaagaacccaaactgaccatgggtaaatccagttcccctaaataaggcctgaagaaatccacaggtaccattcccactttccttctccctagctttcttagaggtttggccactaaatcttatgagacttgaaccaagtggcttcctctttctaggcttaggacgggttggggttagaaagggtgatcactgaaggccttgcctgctctgacattctgtgacattaaatgtctattctcctgttacctgtggcctgggacaccagtggggtttatcgaggggaccagaggggcctcaggctttcagatgaaatggctcctcctactcacccactttattcctctccatgtaattcaggacaagctgcaacttcccccagcttaacacaatgcccatacctcatacgatatgcgccctcccgttccatccctggccccctcaaacgagacttctcacaaggctgattacagatggtcaaacctggcttccaaggacagaattgcctctcggaagccagctgtggatctgagtccagagttggccacttgtgtgggtcctcacaagcaaagagagcactaaacttgacattgggggtccaccactccaactttgctttctgaaggttttggtgtacattgagccccagaaggaaaggagagtatctgtgagtgggggcctcccttgaccccagtacgaagtctatgccctgaatccccagagtagcccttcctggtgcccaactggcctggggacaaacagcgtccactacatctaggactgccggctaagtggacacacttcttgacctcctaccaggaactttggtaaaagctagctttggggaaggggttgggtgtaaatatgagagggtggagggagaccagctggtagcaataaacatgggtagaactaaa

SEQ ID NO: 178850 - DNA, 4784 bp, Homo sapiens
  Payload ID: 15253
  Gene Symbol: SAMHD1
  Gene Name: SAM domain and HD domain 1
  Uniprot ID: Q9Y3Z3
  ENST ID: ENST00000262878
  CDS Start-End: 201-2081
attgcgcctgcgcagggagcccaaggcaagagccgctaggctgccctgcccgaagggctcaactgtcagtgagcctgcgcaggaggccaataggctgccaatactccttggactccccgccagggccctgctgtcagtgcgcctgcgcgcgggtccggcgccgaggttcttgactgctgtgccggacgccaggtgtagccatgcagcgagccgattccgagcagccctccaagcgtccccgttgcgatgacagcccgagaaccccctcaaacaccccttccgcagaggcagactggtccccgggcctggaactccatcccgactacaagacatggggtccggagcaggtgtgctccttcctcaggcgcggtggctttgaagagccggtgctgctgaagaacatccgagaaaatgaaatcacaggcgcattactgccttgtcttgatgagtctcgttttgaaaatcttggagtaagttccttgggggagaggaagaagctgcttagttatatccagcgattggttcaaatccacgttgatacaatgaaggtaattaatgatcctatccatggccacattgagctccaccctctcctcgtccgaatcattgatacacctcaatttcaacgtcttcgatacatcaaacagctgggaggtggttactatgtttttccaggagcttcacacaatcgatttgagcatagtctaggggtggggtatctagcaggatgtctagttcacgcactgggtgaaaaacaaccagagctgcagataagtgaacgagatgttctctgtgttcagattgctggactttgtcatgatctcggtcatgggccattttctcacatgtttgatggacgatttattccacttgctcgcccggaggtgaaatggacgcatgaacaaggctcagttatgatgtttgagcaccttattaattctaatggaattaagcctgtcatggaacaatatggtctcatccctgaagaagatatttgctttataaaggaacaaattgtaggaccacttgaatcacctgtcgaagattcattgtggccatataaagggcgtcctgaaaacaaaagcttcctttatgagatagtatctaataaaagaaatggcattgatgtggacaaatgggattattttgccagggactgccatcatcttggaatccaaaataattttgattacaagcgctttattaagtttgcccgtgtctgtgaagtagacaatgagttgcgtatttgtgctagagataaggaagttggaaatctgtatgacatgttccacactcgcaactctttacaccgtagagcttatcaacacaaagttggcaacattattgatacaatgattacagatgctttcctcaaagcagatgactacatagagattacaggtgctggaggaaaaaagtatcgcatttctacagcaattgacgacatggaagcctatactaagctgacagataacatttttctggagattttatactctactgatcccaaattgaaagacgcacgagagattttaaaacaaattgaataccgtaatctattcaagtatgtgggtgagacgcagccaacaggacaaataaagattaaaagggaggactatgaatctcttccaaaagaggttgccagtgctaaacccaaagtattgctagacgtgaaactgaaggctgaagattttatagtggatgttatcaacatggattatggaatgcaagaaaagaatccaattgatcatgttagcttctattgtaagactgcccccaacagagcaatcaggattactaaaaaccaggtttcacaacttctgccagagaaatttgcagagcagctgattcgagtatattgtaagaaggtggacagaaagagtttgtatgccgcaagacaatattttgttcagtggtgtgcagacagaaatttcaccaagccgcaggatggcgatgttatagccccactcataacacctcaaaaaaaggaatggaacgacagtacttcagtccaaaatccaactcgcctccgagaagcatccaaaagcagagtccagctttttaaagatgacccaatgtgaatgtctgtagtcagttgtttacaaactccctctcctgcacaattcatttagaggcttcaatcatagaattctgcaaattaatgacaactcatgctttaattttgtattttgaatgtacacgcatgctgaagctaagtaacttttaatcaaagaaataagatggtattaggcaaatcttactatactatgaaaagcattaccttgcctatttttaatattattaaagcctttctccttcagtagtctattttcttagaataacaactcttttatctattctgaactctattttttttcttttttaagagacaaggttttgctctgttgcccagcttggactcgaactttcctgggctcaagcgaccctcctgcctcagccccccaagtagctgggactaaagtcatgtgccaccacacccagcttactctgaacttttatgacagatgattgttttttgtttttaatgtagaaatgagacaagggtacaaattggaactagaaattgacattgtcattgacaaacatggctaaaaacaaaacatcaaatcctgcccccgtgaagagttccctgtcacctcaagtttgaggatagtcctctaagagtgacctaagcataagtgaaagacacctcccctcacccttctagccccctacaaggtgccaggttggggtaaagagttggagatgatggccaggagtggcctccaacacgctggtgagaggcctgattaggttttggggaagatctgagagctctggcctcttcgtgagtggaacataaagccgcctcttgttgggagatcctaccccagtgacagaggaatcccccaaactaggctgtgccctggctccgtggcggctccagacccgggtagtgcctttgtcccctgaatactcactcccccggtccagagggccttcccactgcccagcctggagaaggcctcccctgacctgctctctcagtatcctggagagctggccagaggccatcacaggcatcatcctcagagctcctcagacctgggactttgtttttgctggttcagtgcattttgtgtatttaagagcaaacactagccaggcgtggcggcgtgtgcctgtagtcccagctacttgggaggctgaggcaggaggattgctcgaacctgggaggcggaggttgcagtgagcctagatcacgccattgcactccagcctgggtgacagagtgagactccatctccaaaaaaaaaagcacaaacactgcactgcctgtgctgaaattagtgaccacccagtgggctccaggctccgctaggtaacttcgttttcccagcagtggagtgggcaccaccttggtggggcagtgcccctgtgcccagggcacacctcattcccagttctatagcaattcaccaagaacaaagtctgcagttagagccaaagctggtggtggccagagggtgctgaagatacaggccagtggggatgggagccatgagccccgaatgtcttctgctctgatgctccccggactaagcctccctggcacactgggagtgaggggcagcctgagcaagtaggggaactcagaccacaggccagcagatttcccagcagtccatcactggccaccgtgtagccagattctgttccgtccacactggggtgaagagtacttggaatgtctgccatcctgtatgatcaccccaccccctgtccatccatcagtagataataagggttggttacaattcataagagaatagttaaaacacttctcctctcatgcctaccatggtgctgtatcaaggggatttgttcacatatgggctcagcaacgcacaagtgaggtcagccatggcactaggtcattcccattttagccaaggtgcctctataggggtcagacatcatgtgcccagacctaaggtcaggaatgtcatatttttctgttaaaatcattttatttctgtgtatcttacctttaaatcattgtggtttactctgagattctgtagtcctaatattgtatcattgtgctgtctgcaaaacaacttgaatctattttgtttgcatcttttgttacatgtaacgcagctgtactttatgttctttgcaactgtttccattatgagaacgctgtgctatttacaaggttacatttttcttggccaggcgaggtggtcatgcctgtaatcccagcactttgggaggccaaggtgggcggatcacttgaggtaaagagttgagaccagcctggctagcatggcgaaacccagtctctactaaaaatacaaaaattagccgggtgaaattagccgggcgtggtggtgtgtgcttgtaatcccagctactcgggaggctgaggcaggagaatcgcttgaatccgggaggcagaggttgcagtgagccaagatcaggccactgcactccagcctcggggtcaagagcgaaactctgtctcaaacaaaaagaaagaaaggaaggaaggaaggagggaaggaaggaaggaaagagagaaagaaaagaaagaaagaaagaaagaaagagaaagaaatatctttgctatttgtataaaaatggaaattttaacagcttagcctctagagagttactgaacgtggttaccttgggaatgtaaatagaactgcaaattaaaatgactggccacttcaactgggtaagggaaacagctgcaataaagcttcgtgaatata

SEQ ID NO: 178851 - DNA, 2185 bp, Homo sapiens
  Payload ID: 15254
  Gene Symbol: SAMSN1
  Gene Name: SAM domain, SH3 domain and nuclear localization signals 1
  Uniprot ID: Q9NSI8
  ENST ID: ENST00000285670
  CDS Start-End: 176-1501
ggaagctcagcagtgtccactgtcgccattccttggccatagaaaacaatgtatttgaattttgatgtaagcataacaaattgaagatgaagatgacacgttgatttcttgtttgaaattaaccaagtcccgagaaaagaaagtgaatagtgttagcacgaggaggaaggaagaaatggagattagattggatactctttctgcatcactgggtagatccagcactttaaataactgcaacttggaagataaattagcttggtatgaaggtgaagcttacatgtggcatcactggaagccttttcctgaaaaccctctctggacatgtcttgatttccaaatagcacaagttggaccctgggaccactgctcctcttgtattcgccacacacgtctcaagtcttcctgctcagatatggatctcctacattcatggcgaagcagcagttttgggaatttcgatcgttttcggaataattctttatcaaaaccagatgattcaactgaggcacatgaaggagatcccacaaatggaagtggagaacaaagtaaaacttcaaataatggaggcggtttgggtaaaaaaatgagagctatttcatggacaatgaagaaaaaagtgggtaaaaagtacatcaaagccctttctgaggaaaaggatgaggaagatggagagaatgcccacccatatagaaacagtgaccctgtgattgggacccacacagagaaggtgtccctcaaagccagtgactccatggatagtctctacagtggacagagctcatcaagtggcataacaagctgttcagatggtacaagtaaccgggacagctttcgactggatgacgatggcccctattcaggaccattctgtggccgtgccagagtgcatacggatttcacgccaagtccctatgacactgactccctcaaaatcaagaaaggagacatcatagacattatttgcaaaacaccaatggggatgtggacaggaatgttgaacaataaagtgggaaacttcaaattcatttatgtggatgtcatctcagaagaggaagcagcccccaagaaaataaaggcaaaccgaaggagtaacagcaaaaaatccaagactctgcaggagttcctagagaggattcatctgcaggaatacacctcaacacttttgctcaatggttatgagactctagaagatttaaaagatataaaagagagtcacctcattgaattaaatattgaaaacccagatgacagaagaaggttactatcagctgctgaaaacttccttgaagaagaaattattcaagagcaagaaaatgaacctgagcccctatccttgagctcagacatctccttaaataagtcacagttagatgactgcccaagggactctggttgctatatctcatcaggaaattcagataatggcaaagaggatctggagtctgaaaatctgtctgacatggtacataagattattatcacagagccaagtgactgaacacgcattcccaactatatatctacagatgcattccattttaactcttcttgagctaaaacgtcaaataggagaggaagataagataaatatttgtaaataaaacctaaagtttaaatgttttaatctgaataattgtacataaaattttgtatctctaacattccaaattactgtcaataaaatatatatttattattttaaatgctatgtgttaatatttcacttgcttgtattagaaaggcaaaatgtaagactttggtatgtgtgacatatgctttatttggctttattttacaagtacagtatctgcaaaaaacaaagtaaccttttttcatacctgccagttttgaatttatatatgttattgaacaaatagtaatagaggattcgctgttgaaacaagttgtccaagcaatgttatattcatttttatacttattgggaaagtgtgagttaatattggacacattttatcctgatccacagtggagttttagtaattatattttgttgatttcttcattttgttttctggtataaaagtagagataatgtgtagtcacttctgatttagtgaaaccaattgtaataattgtggaaatgttttgtctttaagtgtaaatattttaaaatttgacataccctaatgttaataataaaaagaactatttgcatattgca

SEQ ID NO: 178852 - DNA, 1382 bp, Homo sapiens
  Payload ID: 15254
  Gene Symbol: SAMSN1
  Gene Name: SAM domain, SH3 domain and nuclear localization signals 1
  Uniprot ID: Q9NSI8
  ENST ID: ENST00000400564
  CDS Start-End: 81-698
tagacagcacactgctgactgttttcagttgtttctgtaacagcagaaagtgcactcactaggagtagtcagaattcaaaatgctcaagagaaagccatccaatgtttcagagaaggagaaacatcaaaaaccaaagaaaggagacatcatagacattatttgcaaaacaccaatggggatgtggacaggaatgttgaacaataaagtgggaaacttcaaattcatttatgtggatgtcatctcagaagaggaagcagcccccaagaaaataaaggcaaaccgaaggagtaacagcaaaaaatccaagactctgcaggagttcctagagaggattcatctgcaggaatacacctcaacacttttgctcaatggttatgagactctagaagatttaaaagatataaaagagagtcacctcattgaattaaatattgaaaacccagatgacagaagaaggttactatcagctgctgaaaacttccttgaagaagaaattattcaagagcaagaaaatgaacctgagcccctatccttgagctcagacatctccttaaataagtcacagttagatgactgcccaagggactctggttgctatatctcatcaggaaattcagataatggcaaagaggatctggagtctgaaaatctgtctgacatggtacataagattattatcacagagccaagtgactgaacacgcattcccaactatatatctacagatgcattccattttaactcttcttgagctaaaacgtcaaataggagaggaagataagataaatatttgtaaataaaacctaaagtttaaatgttttaatctgaataattgtacataaaattttgtatctctaacattccaaattactgtcaataaaatatatatttattattttaaatgctatgtgttaatatttcacttgcttgtattagaaaggcaaaatgtaagactttggtatgtgtgacatatgctttatttggctttattttacaagtacagtatctgcaaaaaacaaagtaaccttttttcatacctgccagttttgaatttatatatgttattgaacaaatagtaatagaggattcgctgttgaaacaagttgtccaagcaatgttatattcatttttatacttattgggaaagtgtgagttaatattggacacattttatcctgatccacagtggagttttagtaattatattttgttgatttcttcattttgttttctggtataaaagtagagataatgtgtagtcacttctgatttagtgaaaccaattgtaataattgtggaaatgttttgtctttaagtgtaaatattttaaaatttgacataccctaatgttaataataaaaagaactatttgcatattgca

SEQ ID NO: 178853 - DNA, 1888 bp, Homo sapiens
  Payload ID: 15254
  Gene Symbol: SAMSN1
  Gene Name: SAM domain, SH3 domain and nuclear localization signals 1
  Uniprot ID: Q9NSI8
  ENST ID: ENST00000400566
  CDS Start-End: 83-1204
attagacagcacactgctgactgttttcagttgtttctgtaacagcagaaagtgcactcactaggagtagtcagaattcaaaatgctcaagagaaagccatccaatgtttcagagaaggagaaacatcaaaaaccaaagcgaagcagcagttttgggaatttcgatcgttttcggaataattctttatcaaaaccagatgattcaactgaggcacatgaaggagatcccacaaatggaagtggagaacaaagtaaaacttcaaataatggaggcggtttgggtaaaaaaatgagagctatttcatggacaatgaagaaaaaagtgggtaaaaagtacatcaaagccctttctgaggaaaaggatgaggaagatggagagaatgcccacccatatagaaacagtgaccctgtgattgggacccacacagagaaggtgtccctcaaagccagtgactccatggatagtctctacagtggacagagctcatcaagtggcataacaagctgttcagatggtacaagtaaccgggacagctttcgactggatgacgatggcccctattcaggaccattctgtggccgtgccagagtgcatacggatttcacgccaagtccctatgacactgactccctcaaaatcaagaaaggagacatcatagacattatttgcaaaacaccaatggggatgtggacaggaatgttgaacaataaagtgggaaacttcaaattcatttatgtggatgtcatctcagaagaggaagcagcccccaagaaaataaaggcaaaccgaaggagtaacagcaaaaaatccaagactctgcaggagttcctagagaggattcatctgcaggaatacacctcaacacttttgctcaatggttatgagactctagaagatttaaaagatataaaagagagtcacctcattgaattaaatattgaaaacccagatgacagaagaaggttactatcagctgctgaaaacttccttgaagaagaaattattcaagagcaagaaaatgaacctgagcccctatccttgagctcagacatctccttaaataagtcacagttagatgactgcccaagggactctggttgctatatctcatcaggaaattcagataatggcaaagaggatctggagtctgaaaatctgtctgacatggtacataagattattatcacagagccaagtgactgaacacgcattcccaactatatatctacagatgcattccattttaactcttcttgagctaaaacgtcaaataggagaggaagataagataaatatttgtaaataaaacctaaagtttaaatgttttaatctgaataattgtacataaaattttgtatctctaacattccaaattactgtcaataaaatatatatttattattttaaatgctatgtgttaatatttcacttgcttgtattagaaaggcaaaatgtaagactttggtatgtgtgacatatgctttatttggctttattttacaagtacagtatctgcaaaaaacaaagtaaccttttttcatacctgccagttttgaatttatatatgttattgaacaaatagtaatagaggattcgctgttgaaacaagttgtccaagcaatgttatattcatttttatacttattgggaaagtgtgagttaatattggacacattttatcctgatccacagtggagttttagtaattatattttgttgatttcttcattttgttttctggtataaaagtagagataatgtgtagtcacttctgatttagtgaaaccaattgtaataattgtggaaatgttttgtctttaagtgtaaatattttaaaatttgacataccctaatgttaataataaaaagaactatttgcatattgca

SEQ ID NO: 178854 - DNA, 2028 bp, Homo sapiens
  Payload ID: 15254
  Gene Symbol: SAMSN1
  Gene Name: SAM domain, SH3 domain and nuclear localization signals 1
  ENST ID: ENST00000619120
  CDS Start-End: 431-1345
cttatctgatgctgtgcattagacagcacactgctgactgttttcagttgtttctgtaacagcagaaagtgcactcactaggagtagtcagaattcaaaatgctcaagagaaagccatccaatgtttcagagaaggagaaacatcaaaaaccaaaggctgaagggctcgtccagccggggtggcaagtcagcaaaaggcgttaattgtgtctaacacagctatcatccttggggcaatattctgtatcacactgtctatcaagctaaccccttgccagagcgaagcagcagttttgggaatttcgatcgttttcggaataattctttatcaaaaccagatgattcaactgaggcacatgaaggagatcccacaaatggaagtggagaacaaagtaaaacttcaaataatggaggcggtttgggtaaaaaaatgagagctatttcatggacaatgaagaaaaaagtgggtaaaaagtacatcaaagccctttctgaggaaaaggatgaggaagatggagagaatgcccacccatatagaaacagtgaccctgtgattgggacccacacagagaaggtgtccctcaaagccagtgactccatggatagtctctacagtggacagagctcatcaagtggcataacaagctgttcagatggtacaagtaaccgggacagctttcgactggatgacgatggcccctattcaggaccattctgtggccgtgccagagtgcatacggatttcacgccaagtccctatgacactgactccctcaaaatcaagaaaggagacatcatagacattatttgcaaaacaccaatggggatgtggacaggaatgttgaacaataaagtgggaaacttcaaattcatttatgtggatgtcatctcagaagaggaagcagcccccaagaaaataaaggcaaaccgaaggagtaacagcaaaaaatccaagactctgcaggagttcctagagaggattcatctgcaggaatacacctcaacacttttgctcaatggttatgagactctagaagatttaaaagatataaaagagagtcacctcattgaattaaatattgaaaacccagatgacagaagaaggttactatcagctgctgaaaacttccttgaagaagaaattattcaagagcaagaaaatgaacctgagcccctatccttgagctcagacatctccttaaataagtcacagttagatgactgcccaagggactctggttgctatatctcatcaggaaattcagataatggcaaagaggatctggagtctgaaaatctgtctgacatggtacataagattattatcacagagccaagtgactgaacacgcattcccaactatatatctacagatgcattccattttaactcttcttgagctaaaacgtcaaataggagaggaagataagataaatatttgtaaataaaacctaaagtttaaatgttttaatctgaataattgtacataaaattttgtatctctaacattccaaattactgtcaataaaatatatatttattattttaaatgctatgtgttaatatttcacttgcttgtattagaaaggcaaaatgtaagactttggtatgtgtgacatatgctttatttggctttattttacaagtacagtatctgcaaaaaacaaagtaaccttttttcatacctgccagttttgaatttatatatgttattgaacaaatagtaatagaggattcgctgttgaaacaagttgtccaagcaatgttatattcatttttatacttattgggaaagtgtgagttaatattggacacattttatcctgatccacagtggagttttagtaattatattttgttgatttcttcattttgttttctggtataaaagtagagataatgtgtagtcacttctgatttagtgaaaccaattgtaataattgtggaaatgttttgtctttaagtgtaaatattttaaaatttgacataccctaatgttaataataaaaagaactatttgcatattgc

SEQ ID NO: 178855 - DNA, 1895 bp, Homo sapiens
  Payload ID: 15255
  Gene Symbol: SPDEF
  Gene Name: SAM pointed domain containing ETS transcription factor
  Uniprot ID: O95238
  ENST ID: ENST00000374037
  CDS Start-End: 416-1423
gtctgacttcctcccagcacattcctgcactctgccgtgtccacactgccccacagacccagtcctccaagcctgctgccagctccctgcaagcccctcaggttgggccttgccacggtgccagcaggcagccctgggctgggggtaggggactccctacaggcacgcagccctgagacctcagagggccaccccttgagggtggccaggcccccagtggccaacctgagtgctgcctctgccaccagccctgctggcccctggttccgctggccccccagatgcctggctgagacacgccagtggcctcagctgcccacacctcttcccggcccctgaagttggcactgcagcagacagctccctgggcaccaggcagctaacagacacagccgccagcccaaacagcagcggcatgggcagcgccagcccgggtctgagcagcgtatcccccagccacctcctgctgccccccgacacggtgtcgcggacaggcttggagaaggcggcagcgggggcagtgggtctcgagagacgggactggagtcccagtccacccgccacgcccgagcagggcctgtccgccttctacctctcctactttgacatgctgtaccctgaggacagcagctgggcagccaaggcccctggggccagcagtcgggaggagccacctgaggagcctgagcagtgcccggtcattgacagccaagccccagcgggcagcctggacttggtgcccggcgggctgaccttggaggagcactcgctggagcaggtgcagtccatggtggtgggcgaagtgctcaaggacatcgagacggcctgcaagctgctcaacatcaccgcagatcccatggactggagccccagcaatgtgcagaagtggctcctgtggacagagcaccaataccggctgccccccatgggcaaggccttccaggagctggcgggcaaggagctgtgcgccatgtcggaggagcagttccgccagcgctcgcccctgggtggggatgtgctgcacgcccacctggacatctggaagtcagcggcctggatgaaagagcggacttcacctggggcgattcactactgtgcctcgaccagtgaggagagctggaccgacagcgaggtggactcatcatgctccgggcagcccatccacctgtggcagttcctcaaggagttgctactcaagccccacagctatggccgcttcattaggtggctcaacaaggagaagggcatcttcaaaattgaggactcagcccaggtggcccggctgtggggcatccgcaagaaccgtcccgccatgaactacgacaagctgagccgctccatccgccagtattacaagaagggcatcatccggaagccagacatctcccagcgcctcgtctaccagttcgtgcaccccatctgagtgcctggcccagggcctgaaacccgccctcaggggcctctctcctgcctgccctgcctcagccaggccctgagatgggggaaaacgggcagtctgctctgctgctctgaccttccagagcccaaggtcagggaggggcaaccaactgccccagggggatatgggtcctctggggccttcgggaccctggggcaggggtgcttcctcctcaggcccagctgctcccctggaggacagagggagacagggctgctccccaacacctgcctctgaccccagcatttccagagcagagcctacagaagggcagtgactcgacaaaggccacaggcagtccaggcctctctctgctccatccccctgcctcccattctgcaccacacctggcatggtgcagggagacatctgcacccctgagttgggcagccaggagtgcccccgggaatggataataaagatactagagaactga

SEQ ID NO: 178856 - DNA, 1866 bp, Homo sapiens
  Payload ID: 15255
  Gene Symbol: SPDEF
  Gene Name: SAM pointed domain containing ETS transcription factor
  Uniprot ID: O95238
  ENST ID: ENST00000544425
  CDS Start-End: 435-1394
aactcttcatctcgcggctgtctgacttcctcccagcacattcctgcactctgccgtgtccacactgccccacagacccagtcctccaagcctgctgccagctccctgcaagcccctcaggttgggccttgccacggtgccagcaggcagccctgggctgggggtaggggactccctacaggcacgcagccctgagacctcagagggccaccccttgagggtggccaggcccccagtggccaacctgagtgctgcctctgccaccagccctgctggcccctggttccgctggccccccagatgcctggctgagacacgccagtggcctcagctgcccacacctcttcccggcccctgaagttggcactgcagcagacagctccctgggcaccaggcagctaacagacacagccgccagcccaaacagcagcggcatgggcagcgccagcccgggtctgagcagcgtatcccccagccacctcctgctgccccccgacacggtgtcgcggacaggcttggagaaggcggcagcgggggcagtgggtctcgagagacgggactggagtcccagtccacccgccacgcccgagcagggcctgtccgccttctacctctcctactttgacatgctgtaccctgaggacagcagctgggcagccaaggcccctggggccagcagtcgggaggagccacctgaggagcctgagcagtgcccggtcattgacagccaagccccagcgggcagcctggacttggtgcccggcgggctgaccttggaggagcactcgctggagcaggtgcagtccatggtggtgggcgaagtgctcaaggacatcgagacggcctgcaagctgctcaacatcaccgcagatcccatggactggagccccagcaatgtgcagaagtggctcctgtggacagagcaccaataccggctgccccccatgggcaaggccttccaggagctggcgggcaaggagctgtgcgccatgtcggaggagcagttccgccagcgctcgcccctgggtggggatgtgctgcacgcccacctggacatctggaagtcagcctcgaccagtgaggagagctggaccgacagcgaggtggactcatcatgctccgggcagcccatccacctgtggcagttcctcaaggagttgctactcaagccccacagctatggccgcttcattaggtggctcaacaaggagaagggcatcttcaaaattgaggactcagcccaggtggcccggctgtggggcatccgcaagaaccgtcccgccatgaactacgacaagctgagccgctccatccgccagtattacaagaagggcatcatccggaagccagacatctcccagcgcctcgtctaccagttcgtgcaccccatctgagtgcctggcccagggcctgaaacccgccctcaggggcctctctcctgcctgccctgcctcagccaggccctgagatgggggaaaacgggcagtctgctctgctgctctgaccttccagagcccaaggtcagggaggggcaaccaactgccccagggggatatgggtcctctggggccttcgggaccctggggcaggggtgcttcctcctcaggcccagctgctcccctggaggacagagggagacagggctgctccccaacacctgcctctgaccccagcatttccagagcagagcctacagaagggcagtgactcgacaaaggccacaggcagtccaggcctctctctgctccatccccctgcctcccattctgcaccacacctggcatggtgcagggagacatctgcacccctgagttgggcagccaggagtgcccccgggaatggataataaagatactagagaactga

SEQ ID NO: 178857 - DNA, 1717 bp, Homo sapiens
  Payload ID: 15256
  Gene Symbol: SAMM50
  Gene Name: SAMM50 sorting and assembly machinery component
  Uniprot ID: Q9Y512
  ENST ID: ENST00000350028
  CDS Start-End: 158-1567
cggggaatcatggccgcccccagtgttccgcgtccgggggtttgtgggagttgccttgacctgcagctccgccaccgcggacccgccttctgccctcagcagcagacgctctgtcccgcccgggcagctctgcgaggcagcggctggagagggaaccatggggactgtgcacgcccggagtttggagcctcttccatcaagtggacctgattttggaggattaggagaagaagctgaatttgttgaagttgagcctgaagctaaacaggaaattcttgaaaacaaagatgtggttgttcaacatgttcattttgatggacttggaaggactaaagatgatatcatcatttgtgaaattggagatgttttcaaggccaaaaacctaattgaggtaatgcggaaatctcatgaagcccgtgaaaaattgctccgtcttggaatttttagacaagtggatgttttgattgacacatgtcaaggtgatgacgcacttccaaatgggttagacgttacctttgaagtaactgaattgaggagattaacgggcagttataacaccatggttggaaacaatgaaggcagtatggtacttggcctcaagcttcctaatcttcttggtcgtgcagaaaaggtgacctttcagttttcctatggaacaaaagaaacttcgtatggcctgtccttcttcaaaccacggcccggaaacttcgaaagaaatttctctgtaaacttatataaagttactggacagttcccttggagctcactgcgggagacggacagaggaatgtcagctgagtacagttttcccatatggaagaccagccacactgtcaagtgggaaggcgtatggcgagaactgggctgcctctcaaggacggcgtcatttgctgttcgaaaagaaagcggacattcactgaaatcatctctttcgcacgccatggtcatcgattctcggaattcttccatcttaccaaggagaggtgctttgctgaaagttaaccaggaactggcaggctacactggcggggatgtgagcttcatcaaagaagattttgaacttcagttgaacaagcaactcatatttgattcagttttttcagcgtctttctggggcggaatgttggtacccattggtgataagccgtcaagcattgctgataggttttaccttgggggacccacaagcatccgcggattcagcatgcacagcatcgggccacagagcgaaggagactacctaggtggagaagcgtactgggccggcggcctgcacctctacaccccattacctttccggccaggccagggtggctttggagaacttttccgaacacacttctttctcaacgcaggaaacctctgcaacctcaactatggggagggccccaaagctcatattcgtaagctggctgagtgcatccgctggtcgtacggggccgggattgtcctcaggcttggcaacatcgctcggttggaacttaattactgcgtccccatgggagtacagacaggcgacaggatatgtgatggcgtccagtttggagctgggataaggttcctgtagccgacacccctacaggagaagctctgggactggggcagcagcaaggcgcccatgccacacaccgtctctcgaggaaacgcggttcagcgattctttgactgcggaccctgtgggaaaccccgtcaataaatgttaaagacacactccgag

SEQ ID NO: 178858 - DNA, 1591 bp, Homo sapiens
  Payload ID: 15257
  Gene Symbol: SAG
  Gene Name: S-antigen
  retina and pineal gland (arrestin)
  Uniprot ID: P10523
  ENST ID: ENST00000409110
  CDS Start-End: 231-1448
ctggatgctgggcatcctcgctagatcccctacaaattccccacatacgtaggccaggagcctcagcggtgccccttcaggctcatctggcaagacggtaccagcttgctcagaacaggggctggctattcatcatctcagagcatagagaccctctccttgccacccggcccttcccacctggttggtgacaaatcacaaggtggtagaagttgccagggacagataacatggcagccagcgggaagaccagcaagtccgaaccgaaccatgttatcttcaagaagatctcccgggacaaatcggtgaccatctacctggggaacagagactacatagaccatgtcagccaagtccagcctgtggatggtgtcgtgttggttgatcctgatcttgtgaagggaaagaaagtgtatgtcactctgacctgcgccttccgctatggccaagaggacattgacgtgatcggcttgaccttccgcagggacctgtacttctcccgggtccaggtgtatcctcctgtgggggccgcgagcacccccacaaaactgcaagagagcctgcttaaaaagctggggagcaacacgtacccctttctcctgacgtttcctgactacttgccctgttcagtgatgttgcagccagctccacaagattcagggaagtcctgtggggttgactttgaggtcaaagcattcgccacagacagcaccgatgccgaagaggacaaaatccccaagaagagctccgtgcgattactgatccgcaaagtacagcatgccccacttgagatgggtccccagccccgagctgaggcggcctggcagttcttcatgtctgacaagcccctgcaccttgcggtctctctcaacaaagagatctatttccatggggagcccatccctgtgaccgtgactgtcaccaataacacagagaagaccgtgaagaagattaaagcattcgtggaacaggtggccaatgtggttctctactcgagtgattattacgtcaagcccgtggctatggaggaagcgcaagaaaaagtgccaccaaacagcactttgaccaagacgctgacgctgctgcccttgctggctaacaatcgagaaaggagaggcattgccctggatgggaaaatcaagcacgaggacacaaaccttgcctccagcaccatcattaaggagggcatagaccggaccgtcctgggaatcctggtgtcttaccagatcaaggtgaagctcacagtgtcaggctttctgggagagctcacctccagtgaagtcgccactgaggtcccattccgcctcatgcaccctcagcctgaggacccagctaaggaaagttatcaggatgcaaatttagtttttgaggagtttgctcgccataatctgaaagatgcaggagaagctgaggaggggaagagagacaagaatgacgttgatgagtgaagatgtcggctcaggatgccggaaaatgacctgtagttaccagtgcaacgagcaaagccccacagtttagtcctttggagttatgctgcgtatgaaaggatgagtcttcttccgagaaataaagcttgtttgttctcccctgg

SEQ ID NO: 178859 - DNA, 556 bp, Homo sapiens
  Payload ID: 15257
  Gene Symbol: SAG
  Gene Name: S-antigen
  retina and pineal gland (arrestin)
  ENST ID: ENST00000453143
  CDS Start-End: 127-234
ctctccttgccacccggcccttcccacctggttggtgacaaatcacaaggattgtcttacctttctccaaccctctaacacctgaccaacaccccaaggtggtagaagttgccagggacagataacatggcagccagcgggaagaccagcaagtccgaaccgaaccatgttatcttcaagaagatctcccgggacaaatcgatggtgtcgtgttggttgatcctgatcttgtgaagggaaagaaagtgtatgtcactctgacctgcgccttccgctatggccaagaggacattgacgtgatcggcttgaccttccgcagggacctgtacttctcccgggtccaggtgtatcctcctgtgggggccgcgagcacccccacaaaactgcaagagagcctgcttaaaaagctggggagcaacacgtacccctttctcctgacgtttcctgactacttgccctgttcagtgatgttgcagccagctccacaagattcagggaagtcctgtggggttgactttgaggtcaaagcattcgccacagacagcaccgatgccga

SEQ ID NO: 178860 - DNA, 791 bp, Homo sapiens
  Payload ID: 15257
  Gene Symbol: SAG
  Gene Name: S-antigen
  retina and pineal gland (arrestin)
  ENST ID: ENST00000447536
  CDS Start-End: 285-791
gagacctggatgctgggcatcctcgctagatcccctacaaattccccacatacgtaggccaggagcctcagcggtgccccttcaggctcatctggcaagacggtaccagcttgctcagaacaggggctggctattcatcatctcagagcatagagaccctctccttgccacccggcccttcccacctggttggtgacaaatcacaaggattgtcttacctttctccaaccctctaacacctgaccaacaccccaaggtggtagaagttgccagggacagataacatggcagccagcgggaagaccagcaagtccgaaccgaaccatgttatcttcaagaagatctcccgggacaaatcggtgaccatctacctggggaacagagactacatagaccatgtcagccaagtccagcctgtggatggtgtcgtgttggttgatcctgatcttgtgaagggaaagaaagtgtatgtcactctgacctgcgccttccgctatggccaagaggacattgacgtgatcggcttgaccttccgcagggacctgtacttctcccgggtccaggtgtatcctcctgtgggggccgcgagcacccccacaaaactgcaagagagcctgcttaaaaagctggggagcaacacgtacccctttctcctgacgtttcctgactacttgccctgttcagtgatgttgcagccagctccacaagattcagggaagtcctgtggggttgactttgaggtcaaagcattcgccacagacagcaccgatgccgaagaggacaaaatcccc

SEQ ID NO: 178861 - DNA, 556 bp, Homo sapiens
  Payload ID: 15257
  Gene Symbol: SAG
  Gene Name: S-antigen
  retina and pineal gland (arrestin)
  ENST ID: ENST00000415974
  CDS Start-End: 167-556
agcggtgccccttcaggctcatctggcaagacggtaccagcttgctcagaacaggggctggctattcatcatctcagagcatagagaccctctccttgccacccggcccttcccacctggttggtgacaaatcacaaggtggtagaagttgccagggacagataacatggcagccagcgggaagaccagcaagtccgaaccgaaccatgttatcttcaagaagatctcccgggacaaatcggtgaccatctacctggggaacagagactacatagaccatgtcagccaagtccagcctgtggatggtgtcgtgttggttgatcctgatcttgtgaagggaaagaaaggtgagatgaagccccttgtctcaggctggtttctgggcggagtggactgctctctgggcggctctgggaaggggcatttacatggaaggagagacaggaaggcagaggcagcgctcttgcacatggaaccagtgccaggcccactgacccacactcctgtacctaattcacgtgacataggtcctgttgacaccagagctcactcgctc

SEQ ID NO: 178862 - DNA, 556 bp, Homo sapiens; identical to SEQ ID NO: 178861
  Payload ID: 15257
  Gene Symbol: SAG
  Gene Name: S-antigen
  retina and pineal gland (arrestin)
  ENST ID: ENST00000625330
  CDS Start-End: 167-556

SEQ ID NO: 178863 - DNA, 556 bp, Homo sapiens; identical to SEQ ID NO: 178859
  Payload ID: 15257
  Gene Symbol: SAG
  Gene Name: S-antigen
  retina and pineal gland (arrestin)
  ENST ID: ENST00000630167
  CDS Start-End: 127-234

SEQ ID NO: 178864 - DNA, 1591 bp, Homo sapiens; identical to SEQ ID NO: 178858
  Payload ID: 15257
  Gene Symbol: SAG
  Gene Name: S-antigen
  retina and pineal gland (arrestin)
  Uniprot ID: P10523
  ENST ID: ENST00000631149
  CDS Start-End: 231-1448

SEQ ID NO: 178865 - DNA, 791 bp, Homo sapiens; identical to SEQ ID NO: 178860
  Payload ID: 15257
  Gene Symbol: SAG
  Gene Name: S-antigen
  retina and pineal gland (arrestin)
  ENST ID: ENST00000628376
  CDS Start-End: 285-791

SEQ ID NO: 178866 - DNA, 926 bp, Homo sapiens
  Payload ID: 15258
  Gene Symbol: SARNP
  Gene Name: SAP domain containing ribonucleoprotein
  Uniprot ID: P82979
  ENST ID: ENST00000336133
  CDS Start-End: 56-688
agctcctggaggcggaggccgcgggtgggggcctagtggagtgaggggtaacaagatggcgaccgagacggtggagctccataagctaaagcttgccgaactaaagcaagaatgtcttgctcgtggtttggagaccaagggaataaagcaagatcttatccacagactccaggcatatcttgaagaacatgctgaagaggaggcaaatgaagaagatgtactgggagatgaaacagaggaagaagaaacaaagcccattgagctccctgtcaaagaggaagaaccccctgaaaaaactgttgatgtggcagcagagaagaaagtggtgaaaattacatctgaaataccacagactgagagaatgcagaagagggctgaacgattcaatgtacctgtgagcttggagagtaagaaagctgctcgggcagctaggtttgggatttcttcagttccaacaaaaggtctgtcatctgataacaaacctatggttaacttggataagctgaaggaaagagctcaaagatttggtttgaatgtctcttcaatctccagaaagtctgaagatgatgagaaactgaaaaagaggaaggagcgatttgggattgtcacaagttcagctggaactggaaccacagaggatacagaggcaaagaagaggaaaagagcagagcgctttgggattgcctgatgaaaagttcctgatactttctgttctccagtgttttccatttctctccttcttcttggtcacatatatgcctaaatgcacagtcatgtgcctacgtcctgcctcgcaatgagggagcatgtaccccaggtacatccatgaactgcggcagcagtttgacttattgctgtttcagctttaaggttgttgtgtttttgtttttgattatgttgcttgttaataaaaaaaaatagaaaag

SEQ ID NO: 178867 - DNA, 726 bp, Homo sapiens
  Payload ID: 15258
  Gene Symbol: SARNP
  Gene Name: SAP domain containing ribonucleoprotein
  ENST ID: ENST00000552080
  CDS Start-End: 9-650
gtaacaagatggcgaccgagacggtggagctccataagctaaagcttgccgaactaaagcaagaatgtcttgctcgtggtttggagaccaagggaataaagcaagatcttatccacagactccaggcatatcttgaagaacatgctgaagaggaggcaaatgaagaagatgtactgggagatgaaacagaggaagaagaaacaaagcccattgagctccctgtcaaagaggaagaaccccctgaaaaaactgttgatgtggcagcagagaagaaagtggtgaaaattacatctgaaataccacagactgagagaatgcagaagagggctgaacgattcaatgtacctgtgagcttggagagtaagaaagctgctcgggcagctaggtttgggatttcttcagttccaacaaaaggtctgtcatctgataacaaacctatggttaacttggataagctgaaggaaagagctcaaagatttggtttgaatgtctcttcaatctccagaaagtctgaagatgatgagaaactgaaaaagaggaaggagcgatttgggattgtcacaagttcagctggaactggaaccacagaggatacagaggtaaaaatatacctggaacgcttcatagaccttgaagggaaattagagtgaataaactgaatggagaaatattgtttccccacctatttatttatttatttatttacttatttaagtcgagttgggg

SEQ ID NO: 178868 - DNA, 997 bp, Homo sapiens
  Payload ID: 15258
  Gene Symbol: SARNP
  Gene Name: SAP domain containing ribonucleoprotein
  ENST ID: ENST00000552884
  CDS Start-End: 22-180
agtggagtgaggggtaacaagatggcgaccgagacggtggagctccataagctaaagcttgccgaactaaagcaagaatgtcttgctcgtggtttggagaccaagggaataaagcaagatcttatccacagactccaggcatatcttgaagaacatggaagaagaaacaaagcccattgagctccctgtcaaagaggaagaaccccctgaaaaaactgttgatgtggcagcagagaagaaagtggtgaaaattacatctgaaataccacagactgagagaatgcagaagagggctgaacgattcaatgtacctgtgagcttggagagtaagaaagctgctcgggcagctaggtttgggatttcttcagttccaacaaaaggtctgtcatctgataacaaacctatggttaacttggataagctgaaggaaagagctcaaagatttggtttgaatgtctcttcaatctccagaaagtctgaagatgatgagaaactgaaaaagaggaaggagcgatttgggattgtcacaagttcagctggaactggaaccacagaggatacagaggcaaagaagaggaaaagagcagagcgctttgggattgcctgatgaaaagttcctgatactttctgttctccagtgttttccatttctctccttcttcttggtcacatatatgcctaaatgcacagtcatgtgcctacgtcctgcctcgcaatgagggagcatgtaccccaggttcaagtgctggattgtgtcatgtgaccatcccaaaactcagagcaccctatggccgtctttgccctctgtcacataacttgaaaactgcctgatggcctttttgcagtggttccctccaggaagccttgatctcagttgaagaagttctttcctggcattccaatgcccctgtcagctccatactcctcagacacccttaacaaaggctgtcatgcacacaatgtgacaaatacacaaaataaatgataattacactaa

SEQ ID NO: 178869 - DNA, 1163 bp, Homo sapiens
  Payload ID: 15258
  Gene Symbol: SARNP
  Gene Name: SAP domain containing ribonucleoprotein
  Uniprot ID: P82979
  ENST ID: ENST00000546604
  CDS Start-End: 24-656
ctagtggagtgaggggtaacaagatggcgaccgagacggtggagctccataagctaaagcttgccgaactaaagcaagaatgtcttgctcgtggtttggagaccaagggaataaagcaagatcttatccacagactccaggcatatcttgaagaacatgctgaagaggaggcaaatgaagaagatgtactgggagatgaaacagaggaagaagaaacaaagcccattgagctccctgtcaaagaggaagaaccccctgaaaaaactgttgatgtggcagcagagaagaaagtggtgaaaattacatctgaaataccacagactgagagaatgcagaagagggctgaacgattcaatgtacctgtgagcttggagagtaagaaagctgctcgggcagctaggtttgggatttcttcagttccaacaaaaggtctgtcatctgataacaaacctatggttaacttggataagctgaaggaaagagctcaaagatttggtttgaatgtctcttcaatctccagaaagtctgaagatgatgagaaactgaaaaagaggaaggagcgatttgggattgtcacaagttcagctggaactggaaccacagaggatacagaggcaaagaagaggaaaagagcagagcgctttgggattgcctgatgaaaagttcctgatactttctgttctccagtgttttccatttctctccttcttcttggtcacatatatgcctaaatgcacagtcatgtgcctacgtcctgcctcgcaatgagggagcatgtaccccaggttcaagtgctggattgtgtcatgtgaccatcccaaaactcagagcaccctatggccgtctttgccctctgtcacataacttgaaaactgcctgatggcctttttgcagtggttccctccaggaagccttgatctcagttgaagaagttctttcctggcattccaatgcccctgtcagctccatactcctcagacacccttaacaaaggctgtcatgcacacaatgtgacaaatacacaaaataaatgataattacactaataatgatatgttcagaggggcactggccaggtccacacacatcataaggtgggagggggtgctaactcccactgggttgctgagctgtgccccccaagtcccttcactctgtgcctc

SEQ ID NO: 178870 - DNA, 1272 bp, Homo sapiens
  Payload ID: 15259
  Gene Symbol: SAP30BP
  Gene Name: SAP30 binding protein
  ENST ID: ENST00000293208
  CDS Start-End: 8-715
gaataagatggcggggaagaagaatgttctgtcgtctctcgcagtttacgcggaagattcagagcccgagtctgatggcgaggctggaatcgaggcggtgggcagcgcggctgaggagaaaggcggattggtatctgatgcctatggggaggatgacttttctcgtctagggggtgatgaagatggttatgaagaagaagaagatgagaacagtagacagtcggataatacagaagcagaaaagcgagacccccaggaactcgtggcctccttttctgaaagagttcggaacatgtcgcctgatgaaatcaagatcccgccagaaccccctggcagatgttcaaatcacttgcaagacaagatccagaagctttatgaacgaaagataaaggagggaatggatatgaactacattatccaaaggaagaaagaatttcggaaccctagcatctacgagaagctgatccagttctgtgccattgacgagcttggcaccaactacccaaaggatatgtttgatccccatggctggtctgaggactcctactatgaggcattagccaaggcccagaaaattgagatggacaaattggaaaaggccaaaaaggagcgaacaaaagcttgttgcagggacgtgtctgcagcgcctggggaccggagctgtccttcccctgtgcgggcgggcaccgcctcctcctgggtattgagtttgtgacgggcaccaaaaaaggcaccacgaccaacgccacgtccaccaccactaccactgccagcacagctgttgcagatgctcagaagagaaagagcaagtgggattcggctatcccagtgacaacgatagcccagcccaccatcctcaccaccacagccaccctgccagctgttgtcacggtcaccaccagcgccagcggctccaagaccaccgtcatctctgctgtgggcaccattgtgaagaaggccaagcagtgacctgaggggccaccctaggacttgaaaggaccgtgcagcccagtgaccactgcccagtgggaggcgccactttgtatatttcaggactgggacctactccccagatgccacctgagaggagcttctgtttggcattccagatggaaggacaggcagcacgggagccaggcgctgtggacagggtctgtccacgcaccacctggggtctgccgcctattaaaagtgccgtattcttacctcttggcatctcagatgcactggcctctcctgcattctgtttgcaggcaaatgcttcagctcaca

SEQ ID NO: 178871 - DNA, 2439 bp, Homo sapiens
  Payload ID: 15259
  Gene Symbol: SAP30BP
  Gene Name: SAP30 binding protein
  Uniprot ID: Q9UHR5
  ENST ID: ENST00000355423
  CDS Start-End: 28-906
gagccacgcccgggctgtgggaataagatggcggggaagaagaatgttctgtcgtctctcgcagtttacgcggaagattcagagcccgagtctgatggcgaggctggaatcgaggcggtgggcagcgcggctgaggagaaaggcggattggtatctgatgcctatggggaggatgacttttctcgtctagggggtgatgaagatggttatgaagaagaagaagatgagaacagtagacagtcggataatacagaagcagaaaagcgagacccccaggaactcgtggcctccttttctgaaagagttcggaacatgtcgcctgatgaaatcaagatcccgccagaaccccctggcagatgttcaaatcacttgcaagacaagatccagaagctttatgaacgaaagataaaggagggaatggatatgaactacattatccaaaggaagaaagaatttcggaaccctagcatctacgagaagctgatccagttctgtgccattgacgagcttggcaccaactacccaaaggatatgtttgatccccatggctggtctgaggactcctactatgaggcattagccaaggcccagaaaattgagatggacaaattggaaaaggccaaaaaggagcgaacaaaaattgagtttgtgacgggcaccaaaaaaggcaccacgaccaacgccacgtccaccaccactaccactgccagcacagctgttgcagatgctcagaagagaaagagcaagtgggattcggctatcccagtgacaacgatagcccagcccaccatcctcaccaccacagccaccctgccagctgttgtcacggtcaccaccagcgccagcggctccaagaccaccgtcatctctgctgtgggcaccattgtgaagaaggccaagcagtgacctgaggggccaccctaggacttgaaaggaccgtgcagcccagtgaccactgcccagtgggaggcgccactttgtatatttcaggactgggacctactccccagatgccacctgagaggagcttctgtttggcattccagatggaaggacaggcagcacgggagccaggcgctgtggacagggtctgtccacgcaccacctggggtctgccgcctattaaaagtgccgtattcttacctcttggcatctcagatgcactggcctctcctgcattctgtttgcaggcaaatgcttcagctcacatgtcccccaagactcaatagtcttggttgggactattgcctcagggttgacaacagggtgatggaggcctgggacgctgttcagaggggtgacccaagaagtcaccgttgttatccgtgtatgcctctgggcatggacaggcgggagtccccgagccccacgtatgccccatctgccgccttgatcccaaaacccagccagttctcgggtgatggtggagctgtgctcccttgagtgcacttgagcactccccagaccagatcactttttggacacacccaggaaggcttttgaagtcaagccagtttccagaagggctggggtgagatcctgacctgtgcagagagtggggaggcgtcagcgcctggccagggctgccccagtcctttggtgcccggtgagcgcagccagcaggagctgagcagcgggggagatgaatcacctcctgccttggcgaggcggcagctcattgtttacaggcaagccctgctcctgggagggctcctgccaccccacccttcctctgtgtgttatctctgccccacagcagcccctgggcagcaccagtggccactgggctccccccggggttgaaacgggtttcccagaccaggggttcagaggagactatttacccttcatgatctttggcgattctccactggagcggaagggctgtgtgtcaaaagaaggaagccaggctgtgaagggccgtgttgctttcagtgggtgggcagaggtttagaaaggtggttctgaaatggcacctggtactcttgtgggacctggggaatataaggaactctgtgcatgaggtttcaaaaataaaaattgagtccactctccccgtacacacacactcgggcacttcaggaggtcagttctcaccccttcctcgatggggctttaaagctctggggagaagagctgctccccactcatgccccagagggactgtgaaaaggcttcctgtgacctccgatggcggcccctcattggccaagggcactgtggatgttttgtgggaggcagcatggcaccgtggaaagggcagtagacgtggagccggcacctctggtctggattccacttaaaaccagttgagtggtctcaagcccttaacctctgtaagcctgtttcttctctgaaatcacagtaataaagcgtcgtaagatggttgggaagaaccagaggtgacttatgcaaaagctttataaactgtaaagttcc

SEQ ID NO: 178872 - DNA, 1011 bp, Homo sapiens
  Payload ID: 15259
  Gene Symbol: SAP30BP
  Gene Name: SAP30 binding protein
  ENST ID: ENST00000542343
  CDS Start-End: 18-524
cgggctgtgggaataagatggcggggaagaagaatgttctgtcgtctctcgcagtttacgcggaagattcagagcccgagtctgatggcgaggctggaatcgaggcggtgggcagcgcggctgaggagaaaggcggattggtatctgatgcctatggggaggatgacttttctcgtctagggggtgatgaagatggttatgaagaagaagaagatgagaacagtagacagtcggaagatgacgattcagagactgaaaaacctgaggctgatgacccaaaggataatacagaagcagaaaagcgagacccccaggaactcgtggcctccttttctgaaagagttcggaacatgtcgcctgatgaaatcaagatcccgccagaaccccctggcagatgttcaaatcacttgcaagacaagatccagaagctttatgaacgaaagataaaggagggaatggatatgaactacattatccaaaggaagaaagaatttcggaaccctagccaaggcccagaaaattgagatggacaaattggaaaaggccaaaaaggagcgaacaaaaattgagtttgtgacgggcaccaaaaaaggcaccacgaccaacgccacgtccaccaccactaccactgccagcacagctgttgcagatgctcagaagagaaagagcaagtgggattcggctatcccagtgacaacgatagcccagcccaccatcctcaccaccacagccaccctgccagctgttgtcacggtcaccaccagcgccagcggctccaagaccaccgtcatctctgctgtgggcaccattgtgaagaaggccaagcagtgacctgaggggccaccctaggacttgaaaggaccgtgcagcccagtgaccactgcccagtgggaggcgccactttgtatatttcaggactgggacctactccccagatgccacctgagaggagcttctgtttggcattccagatggaaggacaggcagcacgggagccaggcgctgtggaca

SEQ ID NO: 178873 - DNA, 2722 bp, Homo sapiens
  Payload ID: 15259
  Gene Symbol: SAP30BP
  Gene Name: SAP30 binding protein
  Uniprot ID: Q9UHR5
  ENST ID: ENST00000584667
  CDS Start-End: 258-1184
cacaaccccaactcagagaagccaaagcgctgggaattcagctttaggcagaacccacgcaatcttatatccgtcgcgcagtgatgacgtagcgcgagcgctggcatgagggcggagccaggcgcaggaaactgccgttttgattggtttccagtgtggcgcgggggtctcctgggatccgaaagaacctgcctttccgcccggaagtcggcgtcttgagtcataggagtgagccacgcccgggctgtgggaataagatggcggggaagaagaatgttctgtcgtctctcgcagtttacgcggaagattcagagcccgagtctgatggcgaggctggaatcgaggcggtgggcagcgcggctgaggagaaaggcggattggtatctgatgcctatggggaggatgacttttctcgtctagggggtgatgaagatggttatgaagaagaagaagatgagaacagtagacagtcggaagatgacgattcagagactgaaaaacctgaggctgatgacccaaaggataatacagaagcagaaaagcgagacccccaggaactcgtggcctccttttctgaaagagttcggaacatgtcgcctgatgaaatcaagatcccgccagaaccccctggcagatgttcaaatcacttgcaagacaagatccagaagctttatgaacgaaagataaaggagggaatggatatgaactacattatccaaaggaagaaagaatttcggaaccctagcatctacgagaagctgatccagttctgtgccattgacgagcttggcaccaactacccaaaggatatgtttgatccccatggctggtctgaggactcctactatgaggcattagccaaggcccagaaaattgagatggacaaattggaaaaggccaaaaaggagcgaacaaaaattgagtttgtgacgggcaccaaaaaaggcaccacgaccaacgccacgtccaccaccactaccactgccagcacagctgttgcagatgctcagaagagaaagagcaagtgggattcggctatcccagtgacaacgatagcccagcccaccatcctcaccaccacagccaccctgccagctgttgtcacggtcaccaccagcgccagcggctccaagaccaccgtcatctctgctgtgggcaccattgtgaagaaggccaagcagtgacctgaggggccaccctaggacttgaaaggaccgtgcagcccagtgaccactgcccagtgggaggcgccactttgtatatttcaggactgggacctactccccagatgccacctgagaggagcttctgtttggcattccagatggaaggacaggcagcacgggagccaggcgctgtggacagggtctgtccacgcaccacctggggtctgccgcctattaaaagtgccgtattcttacctcttggcatctcagatgcactggcctctcctgcattctgtttgcaggcaaatgcttcagctcacatgtcccccaagactcaatagtcttggttgggactattgcctcagggttgacaacagggtgatggaggcctgggacgctgttcagaggggtgacccaagaagtcaccgttgttatccgtgtatgcctctgggcatggacaggcgggagtccccgagccccacgtatgccccatctgccgccttgatcccaaaacccagccagttctcgggtgatggtggagctgtgctcccttgagtgcacttgagcactccccagaccagatcactttttggacacacccaggaaggcttttgaagtcaagccagtttccagaagggctggggtgagatcctgacctgtgcagagagtggggaggcgtcagcgcctggccagggctgccccagtcctttggtgcccggtgagcgcagccagcaggagctgagcagcgggggagatgaatcacctcctgccttggcgaggcggcagctcattgtttacaggcaagccctgctcctgggagggctcctgccaccccacccttcctctgtgtgttatctctgccccacagcagcccctgggcagcaccagtggccactgggctccccccggggttgaaacgggtttcccagaccaggggttcagaggagactatttacccttcatgatctttggcgattctccactggagcggaagggctgtgtgtcaaaagaaggaagccaggctgtgaagggccgtgttgctttcagtgggtgggcagaggtttagaaaggtggttctgaaatggcacctggtactcttgtgggacctggggaatataaggaactctgtgcatgaggtttcaaaaataaaaattgagtccactctccccgtacacacacactcgggcacttcaggaggtcagttctcaccccttcctcgatggggctttaaagctctggggagaagagctgctccccactcatgccccagagggactgtgaaaaggcttcctgtgacctccgatggcggcccctcattggccaagggcactgtggatgttttgtgggaggcagcatggcaccgtggaaagggcagtagacgtggagccggcacctctggtctggattccacttaaaaccagttgagtggtctcaagcccttaacctctgtaagcctgtttcttctctgaaatcacagtaataaagcgtcgtaagatggttgggaagaaccagaggtgacttatgcaaaagctttataaactgtaaagttcctgcca

SEQ ID NO: 178874 - DNA, 538 bp, Homo sapiens
  Payload ID: 15259
  Gene Symbol: SAP30BP
  Gene Name: SAP30 binding protein
  ENST ID: ENST00000583063
  CDS Start-End: 212-538
acacttgagacaatggaggcaagggaagacttgtgacggagggcttggaccgtggctttctcagcattgattttggtttagatgaaacatttactacagaacagtgaaatccagaaaacgtctaagaagcctttgctctcaggataatacagaagcagaaaagcgagacccccaggaactcgtggcctccttttctgaaagagttcggaacatgtcgcctgatgaaatcaagatcccgccagaaccccctggcagatgttcaaatcacttgcaagacaagatccagaagctttatgaacgaaagataaaggagggaatggatatgaactacattatccaaaggaagaaagaatttcggaaccctagcatctacgagaagctgatccagttctgtgccattgacgagcttggcaccaactacccaaaggatatgtttgatccccatggctggtctgaggactcctactatgaggcattagccaaggcccagaaaattgagatggacaaattggaaaaggccaaaaaggagcgaacaaaa

SEQ ID NO: 178875 - DNA, 2409 bp, Homo sapiens
  Payload ID: 15259
  Gene Symbol: SAP30BP
  Gene Name: SAP30 binding protein
  ENST ID: ENST00000582022
  CDS Start-End: 3-542
agatggcggggaagaagaatgttctgtcgtctctcgcagtttacgcggaagattcagagcccgagtctgatggcgaggctggaatcgaggcggtgggcagcgcggctgaggagaaaggcggattggtatctgatgcctatggggaggatgacttttctcgtctagggggtgatgaagatggttatgaagaagaagaagatgagaacagtagacagtcggaagatgacgattcagagactgaaaaacctgaggctgatgacccaaaggataatacagaagcagaaaagcgagacccccaggaactcgtggcctccttttctgaaagagttcggaacatgtcgcctgatgaaatcaagatcccgccagaaccccctggcagatgttcaaatcacttgcaagacaagatccagaagctttatgaacgaaagataaaggagggaatggatatgaactacattatccaaaggaagaaagaatttcggaaccctaggatatgtttgatccccatggctggtctgaggactcctactatgaggcattagccaaggcccagaaaattgagatggacaaattggaaaaggccaaaaaggagcgaacaaaaattgagtttgtgacgggcaccaaaaaaggcaccacgaccaacgccacgtccaccaccactaccactgccagcacagctgttgcagatgctcagaagagaaagagcaagtgggattcggctatcccagtgacaacgatagcccagcccaccatcctcaccaccacagccaccctgccagctgttgtcacggtcaccaccagcgccagcggctccaagaccaccgtcatctctgctgtgggcaccattgtgaagaaggccaagcagtgacctgaggggccaccctaggacttgaaaggaccgtgcagcccagtgaccactgcccagtgggaggcgccactttgtatatttcaggactgggacctactccccagatgccacctgagaggagcttctgtttggcattccagatggaaggacaggcagcacgggagccaggcgctgtggacagggtctgtccacgcaccacctggggtctgccgcctattaaaagtgccgtattcttacctcttggcatctcagatgcactggcctctcctgcattctgtttgcaggcaaatgcttcagctcacatgtcccccaagactcaatagtcttggttgggactattgcctcagggttgacaacagggtgatggaggcctgggacgctgttcagaggggtgacccaagaagtcaccgttgttatccgtgtatgcctctgggcatggacaggcgggagtccccgagccccacgtatgccccatctgccgccttgatcccaaaacccagccagttctcgggtgatggtggagctgtgctcccttgagtgcacttgagcactccccagaccagatcactttttggacacacccaggaaggcttttgaagtcaagccagtttccagaagggctggggtgagatcctgacctgtgcagagagtggggaggcgtcagcgcctggccagggctgccccagtcctttggtgcccggtgagcgcagccagcaggagctgagcagcgggggagatgaatcacctcctgccttggcgaggcggcagctcattgtttacaggcaagccctgctcctgggagggctcctgccaccccacccttcctctgtgtgttatctctgccccacagcagcccctgggcagcaccagtggccactgggctccccccggggttgaaacgggtttcccagaccaggggttcagaggagactatttacccttcatgatctttggcgattctccactggagcggaagggctgtgtgtcaaaagaaggaagccaggctgtgaagggccgtgttgctttcagtgggtgggcagaggtttagaaaggtggttctgaaatggcacctggtactcttgtgggacctggggaatataaggaactctgtgcatgaggtttcaaaaataaaaattgagtccactctccccgtacacacacactcgggcacttcaggaggtcagttctcaccccttcctcgatggggctttaaagctctggggagaagagctgctccccactcatgccccagagggactgtgaaaaggcttcctgtgacctccgatggcggcccctcattggccaagggcactgtggatgttttgtgggaggcagcatggcaccgtggaaagggcagtagacgtggagccggcacctctggtctggattccacttaaaaccagttgagtggtctcaagcccttaacctctgtaagcctgtttcttctctgaaatcacagtaataaagcgtcgtaagatggttgggaagaaccagaggtgacttatgcaaaagctttataaactgtaaagttcctgccagtg

SEQ ID NO: 178876 - DNA, 678 bp, Homo sapiens
  Payload ID: 15259
  Gene Symbol: SAP30BP
  Gene Name: SAP30 binding protein
  ENST ID: ENST00000578909
  CDS Start-End: 1-314
aggagaaaggcggattggtatctgatgcctatggggaggatgacttttctcgtctagggggtgatgaagatggttatgaagaagaagaagatgagaacagtagacagtcggaagatgacgattcagagactgaaaaacctgaggctgatgacccaaaggataatacagaagcagaaaagcgagacccccaggaactcgtggcctccttttctgaaagagttcggaacatgtcgcctgatgaaatcaagatcccgccagaaccccctggcagatgttcaaatcacttgcaagtaagcatgagactcggctactgaggtcggatagattagatagcctgggttacgtgtttggtttggtcttaatcttaagagaccatggcagggaaagggactgaggcttctataaaagaaactgacaggtgggaaggatcccacagtccactttacctcctgttagcctcatctcaggagttggctcctacacccaccgccatgtcccgtggtgctgctccagcagggcggccctgtcttgccttcagtgaagtcctaagcagagacagagaaaagaacgtaaccttttctgtgcagccctactgggccagtggtagcttctcagaaagagctttgctaagaaactgaggaaccctcagaatgtaaaataaattacagaaatgaaaaa

SEQ ID NO: 178877 - DNA, 553 bp, Homo sapiens
  Payload ID: 15259
  Gene Symbol: SAP30BP
  Gene Name: SAP30 binding protein
  ENST ID: ENST00000583170
  CDS Start-End: 123-233
cgttttgattggtttccagtgtggcgcgggggtctcctgggatccgaaagaacctgcctttccgcccggaagtcggcgtcttgagtcataggagtgagccacgcccgggctgtgggaataagatggcggggaagaagaatgttctgtcgtctctcgcagtttacgcggaagattcagagcccgagtctgatggcgaggctggaatcgaggcggtgggcagcgcggctggttgagaagcacaatgttagataatggaaacagattcctttgggagaataaagaacaagttacctaacaacatatcaggaccttagcttcctcatctggaaagtgaaggggattggattagaggagaaaggcggattggtatctgatgcctatggggaggatgacttttctcgtctagggggtgatgaagatggttatgaagaagaagaagatgagaacagtagacagtcggaagatgacgattcagagactgaaaaacctgaggctgatgacccaaaggagaagctcggcacagtgacagaggcacccagggctcagcaagctc

SEQ ID NO: 178878 - DNA, 525 bp, Homo sapiens
  Payload ID: 15259
  Gene Symbol: SAP30BP
  Gene Name: SAP30 binding protein
  ENST ID: ENST00000583737
  CDS Start-End: 8-118
gaataagatggcggggaagaagaatgttctgtcgtctctcgcagtttacgcggaagattcagagcccgagtctgatggcgaggctggaatcgaggcggtgggcagcgcggctggttgagaagcacaatgttagataatggaaacagattcctttgggagaataaagaacaagttacctaacaacatatcaggaccttagcttcctcatctggaaagtgaaggggattggattagaggagaaaggcggattggtatctgatgcctatggggaggatgacttttctcgtctagggggtgatgaagatggttatgaagaagaagaagatgagaacagtagacagtcggaagatgacgattcagagactgaaaaacctgaggctgatgacccaaaggataatacagaagcagaaaagcgagacccccaggaactcgtggcctccttttctgaaagagttcggaacatgtcgcctgatgaaatcaagatcccgccagaaccccctggcagatgttcaaatcacttgcaag

SEQ ID NO: 178879 - DNA, 1558 bp, Homo sapiens
  Payload ID: 15259
  Gene Symbol: SAP30BP
  Gene Name: SAP30 binding protein
  ENST ID: ENST00000580322
  CDS Start-End: 1-746
tggcggggaagaagaatgttctgtcgtctctcgcagtttacgcggaagattcagagcccgagtctgatggcgaggctggaatcgaggcggtgggcagcgcggctgaggagaaaggcggattggtatctgatgcctatggggaggatgacttttctcgtctagggggtgatgaagatggttatgaagaagaagaagatgagaacagtagacagtcggaagatgacgattcagagactgaaaaacctgaggctgatgacccaaaggataatacagaagcagaaaagcgagacccccaggaactcgtggcctccttttctgaaagagttcggaacatgtcgcctgatgaaatcaagatcccgccagaaccccctggcagatgttcaaatcacttgcaagacaagatccagaagctttatgaacgaaagataaaggagggaatggatatgaactacattatccaaaggaagaaagaatttcggaaccctagcatctacgagaagctgatccagttctgtgccattgacgagcttggcaccaactacccaaaggatatgtttgatccccatggctggtctgaggactcctactatgaggcattagccaaggcccagaaaattgagatggacaaattggaaaaggccaaaaaggagcgaacaaaagcttgttgcagggacgtgtctgcagcgcctggggaccggagctgtccttcccctgtgcgggcgggcaccgcctcctcctgggtgtgaggaggaggggcctggccaaacggttctgggcatgtgaggtggggcggtgggcggggggtgccgggcatgtgcagagacctggtgatgccgggagggatacagtactgtttggaaagttcttttaagagtgaaaagcccctttgggttcttcttagacatctcgccctaccccagatgggcagagcagagttcatttccaatgcctcttttgtgtagtgccaagctcctgtcccccaggagctgacggatggcaaaaagctgtggacacccagctttgcctggtcttattctcttccctctccctctccagattgagtttgtgacgggcaccaaaaaaggcaccacgaccaacgccacgtccaccaccactaccactgccagcacagctgttgcagatgctcagaagagaaagagcaagtgggattcggctatcccagtgacaacgatagcccagcccaccatcctcaccaccacagccaccctgccagctgttgtcacggtcaccaccagcgccagcggctccaagaccaccgtcatctctgctgtgggcaccattgtgaagaaggccaagcagtgacctgaggggccaccctaggacttgaaaggaccgtgcagcccagtgaccactgcccagtgggaggcgccactttgtatatttcaggactgggacctactccccagatgccacctgagaggagcttctgtttggcattccagatggaaggacaggcagcacgggagccaggcgctgtggacagggtctgtccacgcaccacctggggtctgccgcctattaaaagtgccgtattctt

SEQ ID NO: 178880 - DNA, 834 bp, Homo sapiens
  Payload ID: 15259
  Gene Symbol: SAP30BP
  Gene Name: SAP30 binding protein
  ENST ID: ENST00000584240
  CDS Start-End: 554-834
ctctttgcccacctgattggcagggggcagtggctcgaagagatgggttgctaagcagcctggcctggacgtggtgccctgccaggttgaatgaatagctgcagtgttctgaggaatggggaatttggcctgtcccagcatcaggagggactttctggaaagggggctaagactgagtctaggttcagtgtggggaactgggtggccttcctggcaccttccttttggagccgtggcgtggtgtgccatgtctgtgtaagtggagcctgcggagctctgcacctgtcctcgaaaaggtcttgttgcagggtcttcctgtctcatctcctccctcactcatcagcaggaaaagacatggcgtccagcaactttctgtgaactctgcctctgctgttttgatgatgagcacgtgtggcccttgagattgttgatctaactggctttgaggggctgggtgtcagcaacccagaaatgggggaaacaggataatacagaagcagaaaagcgagacccccaggaactcgtggcctccttttctgaaagagttcggaacatgtcgcctgatgaaatcaagatcccgccagaaccccctggcagatgttcaaatcacttgcaagacaagatccagaagctttatgaacgaaagataaaggagggaatggatatgaactacattatccaaaggaagaaagaatttcggaaccctagcatctacgagaagctgatccagttctgtgccattgacgagcttggcaccaactacccaaaggatatgtttgatccccatggctggtctgaggactcctactatgaggcattagccaaggcccagaa

SEQ ID NO: 178881 - DNA, 1000 bp, Homo sapiens
  Payload ID: 15259
  Gene Symbol: SAP30BP
  Gene Name: SAP30 binding protein
  ENST ID: ENST00000583536
  CDS Start-End: 1-976
agagcccgagtctgatggcgaggctggaatcgaggcggtgggcagcgcggctgaggagaaaggcggattggtatctgatgcctatggggaggatgacttttctcgtctagggggtgatgaagatggttatgaagaagaagaagatgagaacagtagacagtcggaagatgacgattcagagactgaaaaacctgaggctgatgacccaaaggagaagctcggcacagtgacagaggcacccagggctcagcaagctcatggcccagcttgttggactcagagggcagaagaatcacattctaaacatgataaggataatacagaagcagaaaagcgagacccccaggaactcgtggcctccttttctgaaagagttcggaacatgtcgcctgatgaaatcaagatcccgccagaaccccctggcagatgttcaaatcacttgcaagacaagatccagaagctttatgaacgaaagataaaggagggaatggatatgaactacattatccaaaggaagaaagaatttcggaaccctagcatctacgagaagctgatccagttctgtgccattgacgagcttggcaccaactacccaaaggatatgtttgatccccatggctggtctgaggactcctactatgaggcattagccaaggcccagaaaattgagatggacaaattggaaaaggccaaaaaggagcgaacaaaaattgagtttgtgacgggcaccaaaaaaggcaccacgaccaacgccacgtccaccaccactaccactgccagcacagctgttgcagatgctcagaagagaaagagcaagtgggattcggctatcccagtgacaacgatagcccagcccaccatcctcaccaccacagccaccctgccagctgttgtcacggtcaccaccagcgccagcggctccaagaccaccgtcatctctgctgtgggcaccattgtgaagaaggccaagcagtgacctgaggggccaccctaggacttg

SEQ ID NO: 178882 - DNA, 561 bp, Homo sapiens
  Payload ID: 15259
  Gene Symbol: SAP30BP
  Gene Name: SAP30 binding protein
  ENST ID: ENST00000579877
  CDS Start-End: 12-125
gtgggaataagatggcggggaagaagaatgttctgtcgtctctcgcagtttacgcggaagattcagagcccgagtctgatggcgaggctggaatcgaggcggtgggcagcgcggctggaagatgacgattcagagactgaaaaacctgaggctgatgacccaaaggataatacagaagcagaaaagcgagacccccaggaactcgtggcctccttttctgaaagagttcggaacatgtcgcctgatgaaatcaagatcccgccagaaccccctggcagatgttcaaatcacttgcaagacaagatccagaagctttatgaacgaaagataaaggagggaatggatatgaactacattatccaaaggaagaaagaatttcggaaccctagcatctacgagaagctgatccagttctgtgccattgacgagcttggcaccaactacccaaaggatatgtttgatccccatggctggtctgaggactcctactatgaggcattagccaaggcccagaaaattgagatggacaaattggaaaaggccaaaaaggagcgaacaaaa

SEQ ID NO: 178883 - DNA, 6226 bp, Homo sapiens
  Payload ID: 15260
  Gene Symbol: SAP30L
  Gene Name: SAP30-like
  Uniprot ID: Q9HAJ7
  ENST ID: ENST00000297109
  CDS Start-End: 649-1200
acttccgctgtcccgcgaagggcggggggagcgaactgttgtggtgcggagcgttcggcgggcggcggccgggcggcccaggggctgccgcgggactcggggcgcagccgagtggctgcaggggtggagtgggccggacgagccgcggggcccgggtgccgcgggttcgaggccgggccccgcgcgaggaggccgcgccaccccgggggagctgcccggcagcgagtttgccccgctgccgaaagaaggcgggagccggcaggggccttcgaaaccccctggcaacccaggcccggagtccttggggagcggctgtttcctgggacgccctcccggacacccccgctgcagggttacggttctgggcccccggcagaaggctcctccgggtgacccccggcggggccctgcgagccgcgggagccgaccccggggcctcgagccgggaggaagggggcttccggaggcggagggccgggggccgagggagccgggcctctcggacgcggggcagggcagcgcccgggctggagacggactctgggaccctcggctgcgggggtctcagcgacctgccccgcggcaagcgcggccgcggagtggcctaccggggaccctcccccagagggaccggcccggggcggggagatgaacggcttcagcacggaggaggacagccgcgaagggccccccgccgccccagctgccgccgccccgggctacggccagagctgctgcctcatcgaggacggcgagcgctgcgtccggcccgcgggcaacgcctccttcagcaagagggtccagaagagcatctcgcagaagaaactcaagctggacatcgacaagagcgtaaggcacctatatatctgtgattttcacaaaaatttcatccagagtgtccgaaataaaaggaagaggaagacaagtgacgatggcggagattctcccgagcacgacactgacattcctgaggttgatctgttccagctgcaggtgaacaccctacgacgttataaacgacactacaagttgcagaccagaccaggcttcaataaggcccagttagcagaaactgtgagtcgacacttcaggaacatacctgtgaatgaaaaagagacccttgcctacttcatctacatggtgaagagtaacaagagtagactggaccagaaatcggagggtggcaagcagcttgagtgaggatgaagcacatcttaaaggaatgaagtgtaatgcttgatgcacaggtgatatctactacatttaagcccataaagactgttaaatattattgtaaataaaaaagtttgaatgatgaatactgtaaatctttttggtcaggaggattatattctcatgattcagcatgtgtatagaaagactttcttttacgataactctggactaaaaaaatcaggatcattaaaagaattaaaaactatgtatttcagcattcaacaaagcattaaatcaattctactggaaatgtgggataagaaatattttggtaatcaccttatccaccaggctgccacgtgtgagctgtagcttggaatagcagcaaggtgcaattggccatggaagtgcatgagcagacccacatctggacttgcatgctgcccgctggcgacatagatatcccgcccgctttgttgcaagctttgtcatttatcagcagatcagtttgacactggtccccctcactcaccctgtgccttgtacacagtaggcactcaatcagtaggtattggctaattgagctgtcactaatagtgccagccttgtaacatccgcttcacacctctcatgactgagacctctgccatttctgttgctcaccacttaactgctagaatgtggaggaaatcctgatgcaccaacaaggaagtttctgatcagataaggatttcaggacagttgcatgtgcaaaactattcgttgaggttccagaaacactgatatagagaccctcacagaagatacggtcccttatgcaccccactatgcttcactctttggggtgcagttagatattatgacttcagccaagcttcttggtaataaatgcattgacacactgacatatttagtaggttggggcaagtatttttagaagttttcatcctaagttcacaaccaccatgcaagctgccaggggccatgtgattcctgcccagaagttcagcttaggattgaaagtctggctggccttgactccctgggctctggtcatcagcaaatcatgagtttgggcaacaaaggtcaattccatctgatgctcatttttgtgaacaatttgcctccctcttagggagaaagattgctaaaataatttttgaaaattacctaatttttttgttgttcaaaacgttgaactcctcaatctaattatatcagagccaaagtatcctgtgaaaacaaagctttatatccaaaaatgtgcttttgcaaaattctttaatctgtgtaatggagggcagagggtatggggtaggagggtgggagaaagaaaagaaaagaatttggattctaatttatgaccatcttgacatatggtcaaaggtgtcattttcctactcagtttcaattctgagttaatttcttaagccttaaataataagaacaatggacagcctggcctggcagagagtttcacagatgacttaatctgagcaccatcacagagaagtcaggactaaaccccctactgagcagggcggcggagtgtccaaaggtctcagttctgtggagcagagtaccacgctttctgtggaatggggacagggtcaccacgctcactaaaatgcagtatgttccattgcagcaaagctttcgcctgtgttcaaaatgcatgtctagcagattgcagccttttaaattaaatatatataaatggttgtatatagaatatactctggactgtgagggcatcctattttggtatgcctcctggctgtggatggcatgtccagtgctctgtgagtgttttcagtcattcacattcactatgtgtttagagattctctccctgcttacagctgaaggatgttgatacaggcatcaagaaggctgaggggcagatggggcctgcaggttaaggcattgttaacttgctccatggaaatgtccatatcttaatgagtaaaaaagtgtatttttctgatacgtaaaccagaattgtgggcgtgtaggtcacatcactatttctttagcagcaaatctgttttcccagttgagagagacaatagcttctgcacaagaatatatgatggtaggatccatctgttcaattgtgtctgaaagaatctttattccaaagcgaaacctggggaaatgttttaccttcagccagatgctgtgtgtgtacttgggtcccttgtctttcctctaaggagaggtgcttgtggaaagtggaggttgtgggcatcttttcaaccttttcaatctgacctttcaacaggtcaggtgagagaaaagacaaagctatttgaacctatgtttttcttatgtccagaaatctgttctttcatcaaaccactaaaccactcgccttagcctcttctgcagtttctggtggctctatctgtgggcaagggactcctgcctgtgagaagtggccaggccctccagagcaacggggtctggcttcagggagcagtggggtgtggggaaagcaatgttcatcttggctgctccatttttataccatccatcaaggactcttgcgcttctctccacctgtgacgtagcagcattgccttctttcctcttggtgcttctgggcaaaactggaatttgaaatccagaactggcgttgtcttcttaaagagtatggttcctgcctcagttccagcctggtatggttctttgatatgccctgaaggttctcacatggaaacatcagtatcctgccattcatgttgttttaagatgttttaaaaaccaatggacaaacttcttgcttcaaggaacaaactcttaggttggcaacagcatataaaaaaaaagatcacagctgaatctcatgaaagattaaaaaccaaaggattcaagaccggtgttgtaaaatgaagaggaattttacttacatgttacagctgccaagtttttagatgttcctgtcatagctaaatagtcactgctagcctttcagagaacagatagtaacaattgtttgcagctgcagtgttgcatctaattttggtgtttaggctttttattttgtgggaagctttttgttaatatcctgcagggcaactgcctgttgggagggagaggatggaagaaggagcttactctgggggccttgcctattgagggaggctgttgcccagagcagttgcttcatggaagtcatccaaaggcgctctcagtcattacaatgacaggatctcaaagttgggaaagggctgttaagtcatccagtctagtctccacataggtgctgacattctgcctacaaccatcccaccaaggggttgagcagtctggacttaaacacctccgaggacagagaacccactacctcgtggagaagcctgttctttgtaaacctctggcttttctatgttctctgtaatttccatcttagtctctgccccatgggggccacatgggacaagttatttttggcaaagcacctaattgctggcactgtcccaaagcatagcgtttgccttttggaaagaaacaatgctaggacatggacactttggtacactgtccttacccctgagtattagtccactcagttccttgttggagaatgttgagaaaaccctactggctggcttgtttctgccaaagcttggggagaggagagggggatgagaagatgttagcagcctgctaaacctcagacagatgaggactcagttctgtgcttgccccacaaaaacggatgctcacatcatcaggaaattgttcagctggaggatttataacttcgttgctttgcatgaagtttaaagttttcatggttgcccagggcttgtaccttagattcctgtaaggactttgcactgtttttgctgagaaaacaacgcttcaggacttaaggtctaagcgtcagagaagtgccgtattttcaaggtggaaagtctgttaagcttgctgttgtccaatcatccgtttttagagatggggaaactaaaactcaaaaagatgtgcctgaggtcatatggcattatcagaaccaacctctggccctcttgacctgtctagcattctttctttctgacctataggatgactctaattcagtctaaatcggctgccctcagattcttgagaacttaaaattgagcagaaattcccaaggccaacctagctctcagggaccaacctgcagaactcaagattgagcgaaatgtttaggccagttgagttttgcaaaatgagtggtaagggaaaacagatctagcctgttatttaaaaccagggttcaaaagccctattgggagaggtagtattgtcctagcatttaaattctcatgaaatgtgcttggtctgtgatctcttggtcagatatctgccttccaggcgatcctttgaggttgtgtaattcagctggccctggctcctggtccctgttactgagctgggcagtcgaaccgaagggcagatgagctcaagatcatgccttgggaagcatggtgctctaggggtgcctttttattcctttcattgtattatagactgtttccaagtttatggttagaaatggtaaagtgggtctggtgttttgaggtagaacccagcctagggcaagatatgaactgttcttgaggtagaaatgtctacagtcagttgtttcatctagcttgcatcttaaaacacaaacccttcagttgctttcacttaatgcacacatttgccaatgacagagggttatacaggatccttcttttacatttctattgtctgctacgctcatcagagtatattttggggtacaaggttttgggggttttttttcccattttgtaactgccttattgaaaagtaagtgcccttccattccaggcctcctcatattgtacttgtttcctgccaaatctgggggatcatttgtattttaacttcgtaatctatggctctgtactgttgaaaggctctcaattctgtggggtctccttagtatgtatgtgacttttcatgttgcaatatcacacgatgggatggcccgacttttgctcttaataaataatctgaatgagtaagagac

SEQ ID NO: 178884 - DNA, 792 bp, Homo sapiens
  Payload ID: 15260
  Gene Symbol: SAP30L
  Gene Name: SAP30-like
  Uniprot ID: Q9HAJ7
  ENST ID: ENST00000440364
  CDS Start-End: 61-489
gcggccgcggagtggcctaccggggaccctcccccagagggaccggcccggggcggggagatgaacggcttcagcacggaggaggacagccgcgaagggccccccgccgccccagctgccgccgccccgggctacggccagagctgctgcctcatcgaggacggcgagcgctgcgtccggcccgcgggcaacgcctccttcagcaagagggtccagaagagcatctcgcagaagaaactcaagctggacatcgacaagagcgttgatctgttccagctgcaggtgaacaccctacgacgttataaacgacactacaagttgcagaccagaccaggcttcaataaggcccagttagcagaaactgtgagtcgacacttcaggaacatacctgtgaatgaaaaagagacccttgcctacttcatctacatggtgaagagtaacaagagtagactggaccagaaatcggagggtggcaagcagcttgagtgaggatgaagcacatcttaaaggaatgaagtgtaatgcttgatgcacaggtgatatctactacatttaagcccataaagactgttaaatattattgtaaataaaaaagtttgaatgatgaatactgtaaatctttttggtcaggaggattatattctcatgattcagcatgtgtatagaaagactttcttttacgataactctggactaaaaaaatcaggatcattaaaagaattaaaaactatgtatttcagcattcaacaaagcattaaatcaattctactggaaatgtgggataagaaatat

SEQ ID NO: 178885 - DNA, 777 bp, Homo sapiens
  Payload ID: 15260
  Gene Symbol: SAP30L
  Gene Name: SAP30-like
  Uniprot ID: Q9HAJ7
  ENST ID: ENST00000426761
  CDS Start-End: 61-474
gcggccgcggagtggcctaccggggaccctcccccagagggaccggcccggggcggggagatgaacggcttcagcacggaggaggacagccgcgaagggccccccgccgccccagctgccgccgccccgggctacggccagagctgctgcctcatcgaggacggcgagcgctgcgtccggcccgcgggcaacgcctccttcagcaagagggtccagaagagcatctcgcagaagaaactcaagctggacatcgacaagagcctgcaggtgaacaccctacgacgttataaacgacactacaagttgcagaccagaccaggcttcaataaggcccagttagcagaaactgtgagtcgacacttcaggaacatacctgtgaatgaaaaagagacccttgcctacttcatctacatggtgaagagtaacaagagtagactggaccagaaatcggagggtggcaagcagcttgagtgaggatgaagcacatcttaaaggaatgaagtgtaatgcttgatgcacaggtgatatctactacatttaagcccataaagactgttaaatattattgtaaataaaaaagtttgaatgatgaatactgtaaatctttttggtcaggaggattatattctcatgattcagcatgtgtatagaaagactttcttttacgataactctggactaaaaaaatcaggatcattaaaagaattaaaaactatgtatttcagcattcaacaaagcattaaatcaattctactggaaatgtgggataagaaatat

SEQ ID NO: 178886 - DNA, 4214 bp, Homo sapiens
  Payload ID: 15261
  Gene Symbol: SRL
  Gene Name: sarcalumenin
  Uniprot ID: Q86TD4
  ENST ID: ENST00000399609
  CDS Start-End: 14-1435
cttggcagtcaccatgagggcgctggtcctgctcggctgcctcctggcctcgctcctgttctcaggacaagcagaagagacggaggatgcaaatgaagaagccccattgagggaccgctcccacatcgagaagaccctcatgctgaatgaggacaagccatccgatgactactctgcggtgctgcagcggcttcggaagatctaccactcatccatcaagcctctggagcagtcctacaagtacaatgagctccggcagcatgagatcacagatggagagattacctccaagcccatggtactgttcctgggaccgtggagtgttggtaaatctaccatgataaactacctccttgggctggaaaatactcgctatcagctctatacaggcgctgaacccaccacctctgagttcacggtcctcatgcatgggcctaagctgaaaaccatcgagggcatcgtcatggctgctgacagcgcccgttccttctcaccccttgagaagtttggccagaatttcctagagaagctgattggcattgaggttccccacaaacttctggagagggtcacttttgtggatacaccaggcatcatcgagaaccgcaagcagcaagaaagaggctaccccttcaacgacgtgtgccagtggttcatcgacagagctgacctcatctttgtcgtctttgacccaacaaagctggatgtgggtctagagctggagatgctcttccgccagttgaaggggcgtgaatcccagataaggatcatcctgaacaaggctgacaatctggccacccaaatgctcatgcgggtttacggggccctcttctggagcttggcccctctcatcaatgtcacagagcccccaagggtttacgtcagctccttctggccacaagagtataagccggacacccatcaggaactgttcctccaagaagagatctccctcctagaagacctgaatcaggtgatcgagaacagactggagaacaagattgccttcatccgccagcacgccatccgggtccgcatccacgccctcctggttgaccgctacctgcagacttacaaggacaaaatgaccttcttcagtgatggagaactggtctttaaggacattgtggaagatcccgataaattctacatcttcaagaccatcctggcaaagaccaatgtcagcaaatttgaccttcccaaccgcgaggcctataaggacttcttcggcatcaatcccatttccagtttcaaactgctctcccagcagtgctcctacatgggaggttgctttctggagaagattgagcgggccatcactcaggagcttccgggcctcctgggtagcctcgggctcgggaagaatccaggtgctctcaactgtgacaaaacagggtgtagcgaaacaccaaaaaatcgctacaggaagcactaggtggtggagcggtccttgggttcctgttggtgaatcagcttgtgtcctaactgtctgagaggtcctggtttattaaccctttgagccacactggcaggaattattacacagtggagagttgggagttcattgaggccaggggtcggggcaggtgtgtgggtctagggaggagagtggaaactgtgaattcctgtgtgcttgtcttgttgcttcaatgaggaggcctgattgaggcaagtcagcctccacctgcttttcctgggtcctgtcttggaaggacagagagcagctaaattctagtgtatcttaaatcagtgagggtcaaataagctaaaagcagctgaaattcctttgttccctgtgagctgggaaaacagcgaaggcctgagtcgtagagattgtcaggtccattttggcttctttccacacccacagtctcgcgtttgttccccagccctcggctgcctcttaactttgggttgactttcaacagtgaatagtctcttgggtctgaatatacctgggtttgtttttgtgtttttgagacggagtctcgctctgtcggccaggttggagtgcagtggtgcaatctcagctcactgcaacctccccctcctgggttcaagcgattctcctgcctcagcctcctgagtagctgagattataggcctaccaccatgcccagccaatttttgtatttttagtagaaacgggacttcaccatgttgcccaggctggcctcgaactcctgacctcaagtgatccacccgcctcggcctcccaaagtgctgggattacaggcatgagctgccgcacccggcctccacctgggttttgagccaatcccccggacttgctcctggtttcctcaaggggtggggcagtggtttaggacactcgacaactaagaacaggagttcccaggaaggacaaggatctgcctcccccactgccacttctctgatgtgttcctcaaagctggctcgagggctcgatcccttcatcggacccaggaggggactggttggtgtatccaggtaatttactcttggaagtgactgtagtgaaggtcgtggaagggctcagagggttaattggtttgcagtgcgtctttgtctattgcatgtcttggaaaactcagatcccaaaggcgctgggtttcagagaggacagtggagaccttgctccttttccttaggccgccagtctctcaaatttcagaggaggctgtttccacaactcccctgtggaaacacttggcagcggagttgctcctttgcagtttccacaccatggcttttcctttcctttcttctccattccctgatgcatcaacacttacttggagcaatttcctaggagtcagaaccagcaccagccactcggtgtcggtggccaccaaggcttaacattgaccttcccgcctgaccttgatgcagatgtccactgaacacaccgcaggaaagccagggccttcaataccaataagtgtgaatatgtgtgtatgttgtccaagagagattagggagatcacatagactctagggagtagagaacttgtaacagtcttgcaaggctagcatgcacggctccacagcaggtggtggggagcagaggggcaggacctgcagggaagaagcagcctttggatggtgaaatgtgcatggtgcacagtctgtgcatgcccaggagacccagcccgggctgcctcgaggggctcctttgtacacagccagccgcttctcttgggaacaagctgtcctgggggccttacccacgaggcaggagtcaggatgcaccagctcagcaccaggaagtcatcctggacccaggacagtggaaaggcaggcagagggagaggcactctgaggtcaggcagggtaagccagttggcagtcaggttaggtctatgaggagaacctcgagttaggaattcccggttctcagaattgttatcactctggtgcatgctgtcacaggggccgttgcgtttggctttgtggagggcctggacccttccacaagaacacccgaggttccagggcactcaggacaatgtttccaaggaacgagtcgaccaggaaagaacagtgagttctgcaaggggcatccacggagcctgtgataggggctgatgagatggaatctgtcctggacttttcttctcattaaccaccctccgcaaaccccagaacccctcgcctcatctctgtactgtctgccctcttgggggatgggccctcccactttcccctgcctgctcctccatgctgtgagctgctttggcagatctgtttttctgtgtagtcaggggaaaaacaaaaaaagatgcacaactgtgtgggcattgtcatagctgttggtgtcaccactgctttgggggaaatggctgggatgaggctaatacattcatgcaatatttatattttcagggggctgcgttatcagcatgctctccctgccttgggcttttctttccgtcatgttttccttttcgtgttccttctctgatttctcttgtctctgctgctcacaggcctgcccatcagtcagtacagatactcagtgtctggtttctggccagctccgtggagggggctttaagcagaattctgactctttggggtgggggattaggaactgggggaaacttaatgatccagagattcccccaagaggagtgtctggaaggatctgtgcctggacagtggcagaacctttccagtgttcttttggttctgatttcatcagtctcaataaagttccgatctctctttaa

SEQ ID NO: 178887 - DNA, 1814 bp, Homo sapiens
  Payload ID: 15261
  Gene Symbol: SRL
  Gene Name: sarcalumenin
  ENST ID: ENST00000537996
  CDS Start-End: 176-1471
agacagcgcgtcagtgacaggcacacccgggccagggtcctctcctttcctcagcccgtctctctgtgacagaccctgcctgcactcccaagcccctctctccctgtacgaagagacggaggatgcaaatgaagaagccccattgagggaccgctcccacatcgagaagaccctcatgctgaatgaggacaagccatccgatgactactctgcggtgctgcagcggcttcggaagatctaccactcatccatcaagcctctggagcagtcctacaagtacaatgagctccggcagcatgagatcacagatggagagattacctccaagcccatggtactgttcctgggaccgtggagtgttggtaaatctaccatgataaactacctccttgggctggaaaatactcgctatcagctctatacaggcgctgaacccaccacctctgagttcacggtcctcatgcatgggcctaagctgaaaaccatcgagggcatcgtcatggctgctgacagcgcccgttccttctcaccccttgagaagtttggccagaatttcctagagaagctgattggcattgaggttccccacaaacttctggagagggtcacttttgtggatacaccaggcatcatcgagaaccgcaagcagcaagaaagaggctaccccttcaacgacgtgtgccagtggttcatcgacagagctgacctcatctttgtcgtctttgacccaacaaagctggatgtgggtctagagctggagatgctcttccgccagttgaaggggcgtgaatcccagataaggatcatcctgaacaaggctgacaatctggccacccaaatgctcatgcgggtttacggggccctcttctggagcttggcccctctcatcaatgtcacagagcccccaagggtttacgtcagctccttctggccacaagagtataagccggacacccatcaggaactgttcctccaagaagagatctccctcctagaagacctgaatcaggtgatcgagaacagactggagaacaagattgccttcatccgccagcacgccatccgggtccgcatccacgccctcctggttgaccgctacctgcagacttacaaggacaaaatgaccttcttcagtgatggagaactggtctttaaggacattgtggaagatcccgataaattctacatcttcaagaccatcctggcaaagaccaatgtcagcaaatttgaccttcccaaccgcgaggcctataaggacttcttcggcatcaatcccatttccagtttcaaactgctctcccagcagtgctcctacatgggaggttgctttctggagaagattgagcgggccatcactcaggagcttccgggcctcctgggtagcctcgggctcgggaagaatccaggtgctctcaactgtgacaaaacagggtgtagcgaaacaccaaaaaatcgctacaggaagcactaggtggtggagcggtccttgggttcctgttggtgaatcagcttgtgtcctaactgtctgagaggtcctggtttattaaccctttgagccacactggcaggaattattacacagtggagagttgggagttcattgaggccaggggtcggggcaggtgtgtgggtctagggaggagagtggaaactgtgaattcctgtgtgcttgtcttgttgcttcaatgaggaggcctgattgaggcaagtcagcctccacctgcttttcctgggtcctgtcttggaaggacagagagcagctaaattctagtgtatcttaaatcagtgagggtcaaataagctaaaagcagctg

SEQ ID NO: 178888 - DNA, 5587 bp, Homo sapiens
  Payload ID: 15261
  Gene Symbol: SRL
  Gene Name: sarcalumenin
  ENST ID: ENST00000572111
  CDS Start-End: 9-1469
cagtcaccatgagggcgctggtcctgctcggctgcctcctggcctcgctcctgttctcaggacaagcagaactgcaagtctccgcgtcgggtggcacagaagatgttggcaatttgttggagaatcatttctctgctggagacgcaagtctagaggagaaagaaagggcgctttatgcagacacagcccctcaagacaagaaactgctccttcactacccagatggcagggaggccgagagccccaagaagacccccgcgtctgccgccagcgcgggccccgatcctgaagccagcctctccaatgcctcagccacagagtcacctccacctggggaaagggacgacagggacgctgcggggcctggggaggaaaagaatggcccaccagtggcaagcgccctccctccaggaggggccaaggggcctgtggaagaggagtggccggagcccagttctggagagggacaaggagaggaggagactgggtttgggctccccacggagggaactgccagtggagaggcaggaggacaggctgggggccatgaactccccgaggaagtccaggaggtccaaggggacagcctggtgcagggagcagtagcagggacagcagagccaaaggcagagggggcctctcctcactcagagggtgatggggtcggcccactgaacgcagaggccgagggcagccctgggcctggcgaggagcctgcagtgccagagggagcccctgacgtcgcggctgttgggggagagtcggagccagatattgacacacaagccagtgagggcaccgaggaccagggggagcccggcccagctgcagaggccagtgcagagcctgggggcgcccaaagcgttaaggcaggggacactgaggagaaccagtccccagagatgactgaggaggacgcagatgaagcctcctctgaagaggaaagtggtgatggaagtggaagcgaggaagaaggaggagttccctccgaagaggagtccgaagaggacagcggcgatggggctagctcagaagaagcagagggcgcctccgaggaggccacggagccccaggaggctggggagccccaggaagccagggagccccaggaaggcggggatctgcaggaagccgaggagtcccaggaaggcggggatccccaggaagccgaggagccccaggaaggtggagcgccacaggaaggcggggagccccaggaaggtggggatccccaggaagccagggagccccaggaagccagggaaccccaggaaggtgcagagcttccggaagccacaggaaccacaagtcacagggacagaggggcccagcctggcccggaggaattgaatacagagtccatgggcagtgagaccctggatatgaaggcagaggagcccgaggagggacatcagggggagggagagtcccatcattgttgcccaggaagagacggaggatgcaaatgaagaagccccattgagggaccgctcccacatcgagaagaccctcatgctgaatgaggacaagccatccgatgactactctgcggtgctgcagcggcttcggaagatctaccactcatccatcaagcctctggagcagtcctacaagtacaatgagctccggcagcatgagatcacagatggagagattacctccaagcccatggtactgttcctgggaccgtggagtgttggtaaatctaccatgataaactacctccttgggctggaaaatactcgctatcagctctatacaggcgctgaacccaccacctctgagttcacggtcctcatgcatgggcctaagctgaaaaccatcgagggcatcgtcatggctgctgacagcgcccgttccttctcaccccttgagaagtttggccagaatttcctagagaagctgattggcattgaggttccccacaaacttctggagagggtcacttttgtggatacaccaggcatcatcgagaaccgcaagcagcaagaaagaggctaccccttcaacgacgtgtgccagtggttcatcgacagagctgacctcatctttgtcgtctttgacccaacaaagctggatgtgggtctagagctggagatgctcttccgccagttgaaggggcgtgaatcccagataaggatcatcctgaacaaggctgacaatctggccacccaaatgctcatgcgggtttacggggccctcttctggagcttggcccctctcatcaatgtcacagagcccccaagggtttacgtcagctccttctggccacaagagtataagccggacacccatcaggaactgttcctccaagaagagatctccctcctagaagacctgaatcaggtgatcgagaacagactggagaacaagattgccttcatccgccagcacgccatccgggtccgcatccacgccctcctggttgaccgctacctgcagacttacaaggacaaaatgaccttcttcagtgatggagaactggtctttaaggacattgtggaagatcccgataaattctacatcttcaagaccatcctggcaaagaccaatgtcagcaaatttgaccttcccaaccgcgaggcctataaggacttcttcggcatcaatcccatttccagtttcaaactgctctcccagcagtgctcctacatgggaggttgctttctggagaagattgagcgggccatcactcaggagcttccgggcctcctgggtagcctcgggctcgggaagaatccaggtgctctcaactgtgacaaaacagggtgtagcgaaacaccaaaaaatcgctacaggaagcactaggtggtggagcggtccttgggttcctgttggtgaatcagcttgtgtcctaactgtctgagaggtcctggtttattaaccctttgagccacactggcaggaattattacacagtggagagttgggagttcattgaggccaggggtcggggcaggtgtgtgggtctagggaggagagtggaaactgtgaattcctgtgtgcttgtcttgttgcttcaatgaggaggcctgattgaggcaagtcagcctccacctgcttttcctgggtcctgtcttggaaggacagagagcagctaaattctagtgtatcttaaatcagtgagggtcaaataagctaaaagcagctgaaattcctttgttccctgtgagctgggaaaacagcgaaggcctgagtcgtagagattgtcaggtccattttggcttctttccacacccacagtctcgcgtttgttccccagccctcggctgcctcttaactttgggttgactttcaacagtgaatagtctcttgggtctgaatatacctgggtttgtttttgtgtttttgagacggagtctcgctctgtcggccaggttggagtgcagtggtgcaatctcagctcactgcaacctccccctcctgggttcaagcgattctcctgcctcagcctcctgagtagctgagattataggcctaccaccatgcccagccaatttttgtatttttagtagaaacgggacttcaccatgttgcccaggctggcctcgaactcctgacctcaagtgatccacccgcctcggcctcccaaagtgctgggattacaggcatgagctgccgcacccggcctccacctgggttttgagccaatcccccggacttgctcctggtttcctcaaggggtggggcagtggtttaggacactcgacaactaagaacaggagttcccaggaaggacaaggatctgcctcccccactgccacttctctgatgtgttcctcaaagctggctcgagggctcgatcccttcatcggacccaggaggggactggttggtgtatccaggtaatttactcttggaagtgactgtagtgaaggtcgtggaagggctcagagggttaattggtttgcagtgcgtctttgtctattgcatgtcttggaaaactcagatcccaaaggcgctgggtttcagagaggacagtggagaccttgctccttttccttaggccgccagtctctcaaatttcagaggaggctgtttccacaactcccctgtggaaacacttggcagcggagttgctcctttgcagtttccacaccatggcttttcctttcctttcttctccattccctgatgcatcaacacttacttggagcaatttcctaggagtcagaaccagcaccagccactcggtgtcggtggccaccaaggcttaacattgaccttcccgcctgaccttgatgcagatgtccactgaacacaccgcaggaaagccagggccttcaataccaataagtgtgaatatgtgtgtatgttgtccaagagagattagggagatcacatagactctagggagtagagaacttgtaacagtcttgcaaggctagcatgcacggctccacagcaggtggtggggagcagaggggcaggacctgcagggaagaagcagcctttggatggtgaaatgtgcatggtgcacagtctgtgcatgcccaggagacccagcccgggctgcctcgaggggctcctttgtacacagccagccgcttctcttgggaacaagctgtcctgggggccttacccacgaggcaggagtcaggatgcaccagctcagcaccaggaagtcatcctggacccaggacagtggaaaggcaggcagagggagaggcactctgaggtcaggcagggtaagccagttggcagtcaggttaggtctatgaggagaacctcgagttaggaattcccggttctcagaattgttatcactctggtgcatgctgtcacaggggccgttgcgtttggctttgtggagggcctggacccttccacaagaacacccgaggttccagggcactcaggacaatgtttccaaggaacgagtcgaccaggaaagaacagtgagttctgcaaggggcatccacggagcctgtgataggggctgatgagatggaatctgtcctggacttttcttctcattaaccaccctccgcaaaccccagaacccctcgcctcatctctgtactgtctgccctcttgggggatgggccctcccactttcccctgcctgctcctccatgctgtgagctgctttggcagatctgtttttctgtgtagtcaggggaaaaacaaaaaaagatgcacaactgtgtgggcattgtcatagctgttggtgtcaccactgctttgggggaaatggctgggatgaggctaatacattcatgcaatatttatattttcagggggctgcgttatcagcatgctctccctgccttgggcttttctttccgtcatgttttccttttcgtgttccttctctgatttctcttgtctctgctgctcacaggcctgcccatcagtcagtacagatactcagtgtctggtttctggccagctccgtggagggggctttaagcagaattctgactctttggggtgggggattaggaactgggggaaacttaatgatccagagattcccccaagaggagtgtctggaaggatctgtgcctggacagtggcagaacctttccagtgttcttttggttctgatttcatcagtctcaataaagttccgatctctctttaa

SEQ ID NO: 178889 - DNA, 1432 bp, Homo sapiens
  Payload ID: 15262
  Gene Symbol: SGCA
  Gene Name: sarcoglycan, alpha (50kDa dystrophin-associated glycoprotein)
  Uniprot ID: Q16586
  ENST ID: ENST00000262018
  CDS Start-End: 37-1200
ctctgtcactcaccgggcgggccaggccgggcagccatggctgagacactcttctggactcctctcctcgtggttctcctggcagggctgggggacaccgaggcccagcagaccacgctacacccacttgtgggccgtgtctttgtgcacaccttggaccatgagacgtttctgagccttcctgagcatgtcgctgtcccacccgctgtccacatcacctaccacgcccacctccagggacacccagacctgccccggtggctccgctacacccagcgcagcccccaccaccctggcttcctctacggctctgccaccccagaagatcgtgggctccaggtcattgaggtcacagcctacaatcgggacagctttgataccactcggcagaggctggtgctggagattggggacccagaaggccccctgctgccataccaagccgagttcctggtgcgcagccacgatgcggaggaggtgctgccctcaacacctgccagccgcttcctctcagccttggggggactctgggagcccggagagcttcagctgctcaacgtcacctctgccttggaccgtgggggccgtgtcccccttcccattgagggccgaaaagaaggggtatacattaaggtgggttctgcctcacctttttctacttgcctgaagatggtggcatcccccgatagccacgcccgctgtgcccagggccagcctccacttctgtcttgctacgacaccttggcaccccacttccgcgttgactggtgcaatgtgaccctggtggataagtcagtgccggagcctgcagatgaggtgcccaccccaggtgatgggatcctggagcatgacccgttcttctgcccacccactgaggccccagaccgtgacttcttggtggatgctctggtcaccctcctggtgcccctgctggtggccctgcttctcaccttgctgctggcctatgtcatgtgctgccggcgggagggaaggctgaagagagacctggctacctccgacatccagatggtccaccactgcaccatccacgggaacacagaggagctgcggcagatggcggccagccgcgaggtgccccggccactctccaccctgcccatgttcaatgtgcacacaggtgagcggctgcctccccgcgtggacagcgcccaggtgcccctcattctggaccagcactgacagcctagccagtggttccaggtccagccctgacttcatcctcccttctctgtccacaccacgagtggcacatcccacctgctgattccagctcctggccctcctggaacccaggctctaaacaagcagggagagggggtggggtggggtgagagtgtgtggagtaaggacattcagaataaatatctgctgctctgctcaccaattgctgctggcagcctctcccgtcctc

SEQ ID NO: 178890 - DNA, 1057 bp, Homo sapiens
  Payload ID: 15262
  Gene Symbol: SGCA
  Gene Name: sarcoglycan, alpha (50kDa dystrophin-associated glycoprotein)
  Uniprot ID: Q16586
  ENST ID: ENST00000344627
  CDS Start-End: 37-828
ctctgtcactcaccgggcgggccaggccgggcagccatggctgagacactcttctggactcctctcctcgtggttctcctggcagggctgggggacaccgaggcccagcagaccacgctacacccacttgtgggccgtgtctttgtgcacaccttggaccatgagacgtttctgagccttcctgagcatgtcgctgtcccacccgctgtccacatcacctaccacgcccacctccagggacacccagacctgccccggtggctccgctacacccagcgcagcccccaccaccctggcttcctctacggctctgccaccccagaagatcgtgggctccaggtcattgaggtcacagcctacaatcgggacagctttgataccactcggcagaggctggtgctggagattggggacccagaaggccccctgctgccataccaagccgagttcctggtgcgcagccacgatgcggaggaggtgctgccctcaacacctgccagccgcttcctctcagccttggggggactctgggagcccggagagcttcagctgctcaacgtcacctctgccttggaccgtgggggccgtgtcccccttcccattgagggccgaaaagaagggctgaagagagacctggctacctccgacatccagatggtccaccactgcaccatccacgggaacacagaggagctgcggcagatggcggccagccgcgaggtgccccggccactctccaccctgcccatgttcaatgtgcacacaggtgagcggctgcctccccgcgtggacagcgcccaggtgcccctcattctggaccagcactgacagcctagccagtggttccaggtccagccctgacttcatcctcccttctctgtccacaccacgagtggcacatcccacctgctgattccagctcctggccctcctggaacccaggctctaaacaagcagggagagggggtggggtggggtgagagtgtgtggagtaaggacattcagaataaatatctgctgctctgctcaccaattgctgctggcagcctctcccgtc

SEQ ID NO: 178891 - DNA, 696 bp, Homo sapiens
  Payload ID: 15262
  Gene Symbol: SGCA
  Gene Name: sarcoglycan, alpha (50kDa dystrophin-associated glycoprotein)
  ENST ID: ENST00000504073
  CDS Start-End: 1-481
cttggaccgtgggggccgtgtcccccttcccattgagggccgaaaagaaggggtatacattaaggtggataagtcagtgccggagcctgcagatgaggtgcccaccccaggtgatgggatcctggagcatgacccgttcttctgcccacccactgaggccccagaccgtgacttcttggtggatgctctggtcaccctcctggtgcccctgctggtggccctgcttctcaccttgctgctggcctatgtcatgtgctgccggcgggagggaaggctgaagagagacctggctacctccgacatccagatggtccaccactgcaccatccacgggaacacagaggagctgcggcagatggcggccagccgcgaggtgccccggccactctccaccctgcccatgttcaatgtgcacacaggtgagcggctgcctccccgcgtggacagcgcccaggtgcccctcattctggaccagcactgacagcctagccagtggttccaggtccagccctgacttcatcctcccttctctgtccacaccacgagtggcacatcccacctgctgattccagctcctggccctcctggaacccaggctctaaacaagcagggagagggggtggggtggggtgagagtgtgtggagtaaggacattcagaataaatatctgctgctctgctcaccaattgctgctgg

SEQ ID NO: 178892 - DNA, 1349 bp, Homo sapiens
  Payload ID: 15262
  Gene Symbol: SGCA
  Gene Name: sarcoglycan, alpha (50kDa dystrophin-associated glycoprotein)
  ENST ID: ENST00000502555
  CDS Start-End: 33-218
gtcactcaccgggcgggccaggccgggcagccatggctgagacactcttctggactcctctcctcgtggttctcctggcagggctgggggacaccgaggcccagcagaccacgctacacccacttgtgggccgtgtctttgtgcacaccttggaccatgagacgtttctgagccttcctgagcatgtcggtcacagcctacaatcgggacagctttgataccactcggcagaggctggtgctggagattggggacccagaaggccccctgctgccataccaagccgagttcctggtgcgcagccacgatgcggaggaggtgctgccctcaacacctgccagccgcttcctctcagccttggggggactctgggagcccggagagcttcagctgctcaacgtcacctctgccttggaccgtgggggccgtgtcccccttcccattgagggccgaaaagaaggggtatacattaaggtgggttctgcctcacctttttctacttgcctgaagatggtggcatcccccgatagccacgcccgctgtgcccagggccagcctccacttctgtcttgctacgacaccttggcaccccacttccgcgttgactggtgcaatgtgaccctggtgaggagggaccctgggtccgggggtggggtggggcatggcccccatcccagtcccccttccctcccatgctgcttcctatctccgtctctctgattgctccagtcaccatttctttccctgatgctctcagtattgcccacaggcttagtctgaggatacacacacacacacacacacacacacacacacccctgaagttctacctttcccccacaagagggcaacagagtccgcaatccgcatgtggggtctccaactcccgcgccccagatctgcccaggtcaacagctatatcacagtccagttcccaaaccctttccctaccaagggcctctgcgtgacagctctgtctgcttttctgtaaggtgccacctagcaaacccacttacaacaaggatctgatagctcttcacactataaaccaaagatgctcacaacagctctttggatactgagctgaggttcacaggatcccacggctggtgtacactgttcctgtgaattgaccaacagagcagggactcattcagggtccacagccagcgactggtaattgacaacattcttgagcacttgctatgtgcttggcactgtcccatcaacatattttatgctcaccaccactccaggagacaggtgctactattatccttctgacattacaggtgatgaaacagaggcacataatcatcctagctaagcacttgtctgagtctggattc

SEQ ID NO: 178893 - DNA, 542 bp, Homo sapiens
  Payload ID: 15262
  Gene Symbol: SGCA
  Gene Name: sarcoglycan, alpha (50kDa dystrophin-associated glycoprotein)
  ENST ID: ENST00000514934
  CDS Start-End: 57-254
ctctcctccctgccccctgtctctgtcactcaccgggcgggccaggccgggcagccatggctgagacactcttctggactcctctcctcgtgggcaagttggggccttgttcagcggggaggcccaggatgagggggcaggatttaggggtgttctcctggcagggctgggggacaccgaggcccagcagaccacgctacacccacttgtgggccgtgtctttgtgcacaccttggaccatgagacgtttctgagccttcctgagcatgtcggtcacagcctacaatcgggacagctttgataccactcggcagaggctggtgctggagattggggacccagaaggccccctgctgccataccaagccgagttcctggtgcgcagccacgatgcggaggaggtgctgccctcaacacctgccagccgcttcctctcagccttggggggactctgggagcccggagagcttcagctgctcaacgtcacctctgccttggaccgtgggggccgtgtcccccttcccattgagggccgaaaagaa

SEQ ID NO: 178894 - DNA, 668 bp, Homo sapiens
  Payload ID: 15262
  Gene Symbol: SGCA
  Gene Name: sarcoglycan, alpha (50kDa dystrophin-associated glycoprotein)
  ENST ID: ENST00000511303
  CDS Start-End: 1-591
ctgagacactcttctggactcctctcctcgtgggtcacagcctacaatcgggacagctttgataccactcggcagaggctggtgctggagattggggacccagaaggccccctgctgccataccaagccgagttcctggtgcgcagccacgatgcggaggaggtgctgccctcaacacctgccagccgcttcctctcagccttggggggactctgggagcccggagagcttcagctgctcaacgtcacctctgccttggaccgtgggggccgtgtcccccttcccattgagggccgaaaagaagggctgaagagagacctggctacctccgacatccagatggtccaccactgcaccatccacgggaacacagaggagctgcggcagatggcggccagccgcgaggtgccccggccactctccaccctgcccatgttcaatgtgcacacagtggttccaggtccagccctgacttcatcctcccttctctgtccacaccacgagtggcacatcccacctgctgattccagctcctggccctcctggaacccaggctctaaacaagcagggagagggggtggggtggggtgagagtgtgtggagtaaggacattcagaataaatatctgctgctctgctcaccaattgctgctggcagcctctcccgtc

SEQ ID NO: 178895 - DNA, 1090 bp, Homo sapiens
  Payload ID: 15262
  Gene Symbol: SGCA
  Gene Name: sarcoglycan, alpha (50kDa dystrophin-associated glycoprotein)
  ENST ID: ENST00000513821
  CDS Start-End: 38-934
tctctgtcactcaccgggcgggccaggccgggcagccatggctgagacactcttctggactcctctcctcgtggttctcctggcagggctgggggacaccgaggcccagcagaccacgctacacccacttgtgggccgtgtctttgtgcacaccttggaccatgagacgtttctgagccttcctgagcatgtcgctgtcccacccgctgtccacatcacctaccacgcccacctccagggacacccagacctgccccggtggctccgctacacccagcgcagcccccaccaccctggcttcctctacggctctgccaccccagaagatcgtgggctccaggtcattgaggtcacagcctacaatcgggacagctttgataccactcggcagaggctggtgctggagattggggacccagaaggccccctgctgccataccaagccgagttcctggtgcgcagccacgatgcggaggaggtgctgccctcaacacctgccagccgcttcctctcagccttggggggactctgggagcccggagagcttcagctgctcaacgtcacctctgccttggaccgtgggggccgtgtcccccttcccattgagggccgaaaagaaggggtatacattaaggtgggttctgcctcacctttttctacttgcctgaagatggtggcatcccccgatagccacgcccgctgtgcccagggccagcctccacttctgtcttgctacgacaccttggcaccccacttccgcgttgactggtgcaatgtgaccctggctgaagagagacctggctacctccgacatccagatggtccaccactgcaccatccacgggaacacagaggagctgcggcagatggcggccagccgcgaggtgccccggccactctccaccctgcccatgttcaatgtgcacacaggtgagcggctgcctccccgcgtggacagcgcccaggtgcccctcattctggaccagcactgacagcctagccagtggttccaggtccagccctgacttcatcctcccttctctgtccacaccacgagtggcacatcccacctgctgattccagctcctgg

SEQ ID NO: 178896 - DNA, 577 bp, Homo sapiens
  Payload ID: 15262
  Gene Symbol: SGCA
  Gene Name: sarcoglycan, alpha (50kDa dystrophin-associated glycoprotein)
  ENST ID: ENST00000512526
  CDS Start-End: 1-176
gctgtcccacccgctgtccacatcacctaccacgcccacctccagggacacccagacctgccccggtggctccgctacacccagcgcagcccccaccaccctggcttcctctacggctctgccaccccagaagatcgtgggctccaggtcacagcctacaatcgggacagctttgataccactcggcagaggctggtgctggagattggggacccagaaggccccctgctgccataccaagccgagttcctggtgcgcagccacgatgcggaggaggtgctgccctcaacacctgccagccgcttcctctcagccttggggggactctgggagcccggagagcttcagctgctcaacgtcacctctgccttggaccgtgggggccgtgtcccccttcccattgagggccgaaaagaagggctgaagagagacctggctacctccgacatccagatggtccaccactgcaccatccacgggaacacagaggagctgcggcagatggcggccagccgcgaggtgccccggccactctccaccctgcccatgttcaatgtgcacacaggtgagcggctgc

SEQ ID NO: 178897 - DNA, 4431 bp, Homo sapiens
  Payload ID: 15263
  Gene Symbol: SGCB
  Gene Name: sarcoglycan, beta (43kDa dystrophin-associated glycoprotein)
  Uniprot ID: Q16585
  ENST ID: ENST00000381431
  CDS Start-End: 224-1180
atacaacgcgccccaggccaaggtcctaggtgcaggggccgccgcagagcctgagcccgcagggctgggatgcgggtcgtcagggatgcgggctggggaggggagggtgtgagcagcgggtgcccccagtccccgccagggcgcaagcgcaggcgcgcagggtgcggtcgcggaggggcgggcacagtcgggcggggagctcggcggcggcgggcgcgggaagatggcggcagcggcggcggcggctgcagaacagcaaagttccaatggtcctgtaaagaagtccatgcgtgagaaggctgttgagagaaggagtgtcaataaagagcacaacagtaactttaaagctggatacattccgattgatgaagatcgtctccacaaaacagggttgagaggaagaaagggcaatttagccatctgtgtgattatcctcttgtttatcctggctgtcatcaatttaataataacacttgttatttgggccgtgattcgcattggaccaaatggctgtgatagtatggagtttcatgaaagtggcctgcttcgatttaagcaagtatctgacatgggagtgatccaccctctttataaaagcacagtaggaggaaggcgaaatgaaaatttggtcatcactggcaacaaccagcctattgtttttcagcaagggacaacaaagctcagtgtagaaaacaacaaaacttctattacaagtgacatcggcatgcagttttttgacccgaggactcaaaatatcttattcagcacagactatgaaactcatgagtttcatttgccaagtggagtgaaaagtttgaatgttcaaaaggcatctactgaaaggattaccagcaatgctaccagtgatttaaatataaaagttgatgggcgtgctattgtgcgtggaaatgaaggtgtattcattatgggcaaaaccattgaatttcacatgggtggtaatatggagttaaaggcggaaaacagtatcatcctaaatggatctgtgatggtcagcaccacccgcctacccagttcctccagtggagaccagttgggtagtggtgactgggtacgctacaagctctgcatgtgtgctgatgggacgctcttcaaggtgcaagtaaccagccagaacatgggctgccaaatctcagacaacccctgtggaaacactcattaaaagaaccccagaggtcaccaacatgtttatatcttgacttgacttttttatgcatgcaaatcattgtttttacagagtttgtgataactcataattattttaatggcagagcactgctgtatctgttttatggtctacatagttaaaatcttctcagagagcctaaattctaatacattttattaatttatactaatcttcatatttactgttctctaaaataattatgagaagcaaataaaatcaaaagtcatgtttaaagacgtgtttttaaaattccactatcccttttctaaaggttaaaggtctgaagcagctgtttagattcactgtaagtaaactttggtaactctaatggggatagacccacttaagatatttaaaaaggtatggcatcagcgtttcatgctctgccttttagcttctaaaaggaaagatgcagatttctagtgcattaagcctgagccatattctcacatgcaagtgaagtcattaaagaactttacatatgtgagatagaaacaatggttccttagttttgcactgggaagaaaatattttgtaaaagaatgtttatttgaaataatgataactatcaattgttcacaatgtggtggaaattaaaacaccatctcagctttaacttttaaataataatgataactatctttattgagcatcttctacatcctaggcattgtcctaggcattgcatgtttatatccccaattctcaccacaaccctgcaagtaggtggtattatccaagttttacccattaagaaactgaagatcagagaagttaagaaacttgctcaacatcatatagtaagtagcagagttgggattggaattcaggcatgactcaaacctggatgtacttgattccaaatgccatgttgttttcactctctgcactgactttttaattatttaaaactctagaaagatgaacaaaggttaatttaaacttacctaagaagatgagaatcaaacaaaacagatatgcttactctagttaaaaagaaaataaatctcatgtcagacccagaaaggaccaatcactgtccgattgtaagctatgttgggccaattccaaaatattatacgatggagaggtcaaatttacctacttctgagttacctcagtttcccaacaatggaccttggcacactggagtaacaatacataacagagttgccaagatatttataccctcagcactcggggcaacacagtggaaagtggggaggccatagacccaaacaagttctttgggccaggcatggcctagtaagtacaccatgcctcgaaaataagtccagaagcactggactaaagagtgctaatgcaggaaataatacacataatttttaggtaaggataataatttatctctgctcctaatattactatcccattgtaattatttataaccctcaagccagttgatttttaatatatttgattggaaaagaactctctggtattattaagactcacacagaatcagggacagggcccccaaaggagtttgctgtaaaataggcagtagagttgtggcatgggcccaaccctgcattcaagtgtaacagcattctgtcagggtcactttgaattgtgcacataagaaaaccaatacaaaaaacaatttgtattcaatattgtcacatttctctctggtagaaaaatcaaataccttagagattatgaagtcattaatttatactgaaattggattgacttactacctaacactgagcgctgtttttaaatgaaaagaatgagatttataaccacttgagtgttattgcagtgatatttgaactcatttgaatatattcagtatcatttaatgtctgaattcagaaaaaaatgccgaaatttttattcagatggtccataaattaaattgcatattcattacttatctgctctatttagatttattttaaaagtttatttaagtaaatatttttataaaaaccagaaaacactgtattacaaaatattatttattaaatgtagttcaggaaataatctatttttactcttttttgggaaatacttgtgtttttgatacatctccatgaagttcttttgagaggagaggctattttgatgtttttatacaactgaaggttaacagccatagcattttatgatactttacaggtagtcctggctttttccctgaaacataagcttggaaaatctattagaaagcagaacagggcaaactctccattttacttatggcttttctaatttttaattaattaatttatttttttgagacagagtcttgttctgtcgccaggctggagtgcagtggcacaatctcggctctcggctcactgcaacctctgcctcccaggttcaagcgattctcctgcctcagcctcccgagtacctgggactacaggcatgtgccacagttcccggctaatttttgtatttttagtagagacggggtttcaccatgttggccaggatggtctcaatctcttgacctcgtgatctgcctgccttggcctcccaaagtgctgggattacaggtgtgagccaccacgcctggccggcttatttttatccacagtaaatcttcagcaactcattgtctccaccagatagtatttttctgtaaatgaaatgctgacttcgcctcttcctgctgtatgctcatccctgcactgagcacagatatgacaagcagtagccatgggggaggtgggtgacaaagataggaccccgggagggggcgcaggtacatgctagtttcaattaccacagtattctagagacgggttgcaatgacaaggggggcaaatgaaatcaatgcaagatttcttaataatgggcagacagaaaaatgtaaaaccacacaaaacggactgctgataatattttaaaatatacttatttgtcttctttttgcattgtgaaaaaaacaaaataaattttgtgtgataattttgatgatgaaaggtggaagttctacctagatttgaatgagtgtttttttaagggaatgagaatgtcatggtgctaaacctgacaaataagagatcattgaaatgctgaaaattttaacagtcttcttaaaagtattgagggggcaaaaattaccaattatggtatacaaaaataagcctataaatgtgtttcacattgctaacttgagtttcagttgattcagtttgtaataactagtaatgagcttctgtttacaataaaaattctgtaaattg

SEQ ID NO: 178898 - DNA, 663 bp, Homo sapiens
  Payload ID: 15263
  Gene Symbol: SGCB
  Gene Name: sarcoglycan, beta (43kDa dystrophin-associated glycoprotein)
  ENST ID: ENST00000506357
  CDS Start-End: 1-301
ggcggcggctgcagaacagcaaagttccaatggtcctgtaaagaagtccatgcgtgagaaggctgttgagagaaggagtgtcaataaagagcacaacagtaactttaaagctggatacattccgattgatgaagatcgtctccacaaaacagggttgagaggaagaaagggcaatttagccatctgtgtgattatcctcttgtttatcctggctgtcatcaatttaatactccctggcagccaggcaagagacagaagagccttctctgggattcctgatgcatatagaaaaaagatctgaagatactgtcatttggcaagtcccgataacacttgttatttgggccgtgattcgcattggaccaaatggctgtgatagtatggagtttcatgaaagtggcctgcttcgatttaagcaagtatctgacatgggagtgatccaccctctttataaaagcacagtaggaggaaggcgaaatgaaaatttggtcatcactggcaacaaccagcctattgtttttcagcaagggacaacaaagctcagtgtagaaaacaacaaaacttctattacaagtgacatcggcatgcagttttttgacccgaggactcaaaatatcttattcagcacagactatgaaactcatgagtttcatttgccaagtg

SEQ ID NO: 178899 - DNA, 599 bp, Homo sapiens
  Payload ID: 15263
  Gene Symbol: SGCB
  Gene Name: sarcoglycan, beta (43kDa dystrophin-associated glycoprotein)
  ENST ID: ENST00000514133
  CDS Start-End: 1-282
caaagttccaatggtcctgtaaagaagtccatgcgtgagaaggctgttgagagaaggagtgtcaataaagagcacaacagtaactttaaagctggatacattccgattgatgaagatcgtctccacaaaacagggttgagaggaagaaagggcaatttagccatctgtgtgattatcctcttgtttatcctggctgtcatcaatttaatactccctggcagccaggcaagagacagaagagccttctctgggattcctgatgcatatagaaaaaagatctgaagatactgtcatttggcaagtcccggtgaaaaagccatataacacttgttatttgggccgtgattcgcattggaccaaatggctgtgatagtatggagtttcatgaaagtggcctgcttcgatttaagcaagtatctgacatgggagtgatccaccctctttataaaagcacagtaggaggaaggcgaaatgaaaatttggtcatcactggcaacaaccagcctattgtttttcagcaagggacaacaaagctcagtgtagaaaacaacaaaacttctattacaagtgacatcggcatgcagttttttgacccgagg

SEQ ID NO: 178900 - DNA, 1606 bp, Homo sapiens
  Payload ID: 15264
  Gene Symbol: SGCD
  Gene Name: sarcoglycan, delta (35kDa dystrophin-associated glycoprotein)
  Uniprot ID: Q92629
  ENST ID: ENST00000337851
  CDS Start-End: 520-1392
agagaggacttatctccagcatctagcactacagagcagaggctgtgtggagaatggctgaaaaatcagaattggttgtagaagcagttttctttctggttgtgagtatgagcccggcagacaccatgagcgctgttgcaggggagtcggcctgtgcttgacacatgtgtttcccattgatagctggagacagcccagtagctgtgagtcggtctgacaaagccatattgaagtacggagtacggtttcaaagcagtcagaaaaagaacgggaatgctgttcaggaaattcttcaggcatgggcagggacttggctgcagttctgcagttggaaaatctgactggggcagcttctgagcgcaggctgggcctgcacacactcagcgggccgagtggccacctccttcagagctgctcagcacgccctgggatcgcgggcggttttcatcggccggtttgtgaaacggacaagagagagacattactgccgggagtgttgagtgaagggaccaggtggagatgatgcctcaggagcagtacactcaccaccggagcaccatgcctggctctgtggggccacaggtatacaaggtggggatttatggctggcggaaacgatgcctgtatttctttgtcctgctcctcatgattttaatactggtgaacttggccatgaccatctggattctcaaagtcatgaacttcacaattgatggaatgggaaacctgaggatcacagaaaaaggtctaaagctagaaggagactctgaattcttacaacctctctacgccaaagaaatccagtcccgaccaggtaatgccctgtacttcaagtctgccagaaatgttacagtgaacattctcaatgaccagactaaagtgctaactcagcttataacaggtccaaaagccgtagaagcttatggtaaaaaatttgaggtaaaaactgtttctggaaaattgctcttctctgcagacaataatgaagtggtagtaggagctgaaagattacgagttttaggagcggagggcacagtgttccctaaatctatagaaacacctaatgtcagggcagaccccttcaaagaactaaggttggagtccccaacccggtctctagtgatggaggccccaaaaggagtggaaatcaatgcagaagctggcaatatggaagccacctgcaggacagagctgagactggaatccaaagatggagagattaagttagatgctgcgaaaatcaggctacctagactgcctcatggatcctacacgcctacaggaacgaggcagaaggtcttcgagatctgcgtctgcgccaatgggagattattcctgtctcaggcaggagctgggtccacttgtcagataaacacaagtgtctgcctctgaaagactatccatagtggacattgttggcagcataaaggccttttttggctttagacactggctgccagctatttttactagaacacagaaagcctatcaaagaccttgtgtgtatgtgtacgtgtgtgtgcgtgcttgagtgtgttcgcgtgtgtgggtggatataaatatatataaatatatataaataaatatatatatcctctgtataaaa

SEQ ID NO: 178901 - DNA, 9755 bp, Homo sapiens
  Payload ID: 15264
  Gene Symbol: SGCD
  Gene Name: sarcoglycan, delta (35kDa dystrophin-associated glycoprotein)
  Uniprot ID: Q92629
  ENST ID: ENST00000435422
  CDS Start-End: 488-1357
gagcagaagaaagagaggacttatctccagcatctagcactacagagcagaggctgtgtggagaatggctgaaaaatcagaattggttgtagaagcagttttctttctggttgtgagtatgagcccggcagacaccatgagcgctgttgcaggggagtcggcctgtgcttgacacatgtgtttcccattgatagctggagacagcccagtagctgtgagtcggtctgacaaagccatattgaagtacggagtacggtttcaaagcagtcagaaaaagaacgggaatgctgttcaggaaattcttcaggcatgggcagggacttggctgcagttctgcagttggaaaatctgactggggcagcttctgagcgcaggctgggcctgcacacactcagcgggccgagtggccacctccttcagagctgctcagcacgccctgggatcgcgggcggttttcatcggccggtttgtgaaacggacaagagagatgcctcaggagcagtacactcaccaccggagcaccatgcctggctctgtggggccacaggtatacaaggtggggatttatggctggcggaaacgatgcctgtatttctttgtcctgctcctcatgattttaatactggtgaacttggccatgaccatctggattctcaaagtcatgaacttcacaattgatggaatgggaaacctgaggatcacagaaaaaggtctaaagctagaaggagactctgaattcttacaacctctctacgccaaagaaatccagtcccgaccaggtaatgccctgtacttcaagtctgccagaaatgttacagtgaacattctcaatgaccagactaaagtgctaactcagcttataacaggtccaaaagccgtagaagcttatggtaaaaaatttgaggtaaaaactgtttctggaaaattgctcttctctgcagacaataatgaagtggtagtaggagctgaaagattacgagttttaggagcggagggcacagtgttccctaaatctatagaaacacctaatgtcagggcagaccccttcaaagaactaaggttggagtccccaacccggtctctagtgatggaggccccaaaaggagtggaaatcaatgcagaagctggcaatatggaagccacctgcaggacagagctgagactggaatccaaagatggagagattaagttagatgctgcgaaaatcaggctacctagactgcctcatggatcctacacgcctacaggaacgaggcagaaggtcttcgagatctgcgtctgcgccaatgggagattattcctgtctcaggcaggagctgggtccacttgtcagataaacacaagtgtctgcctctgaaagactatccatagtggacattgttggcagcataaaggccttttttggctttagacactggctgccagctatttttactagaacacagaaagcctatcaaagaccttgtgtgtatgtgtacgtgtgtgtgcgtgcttgagtgtgttcgcgtgtgtgggtggatataaatatatataaatatatataaataaatatatatatcctctgtataaaatgaggtttcagtacaaaaggaaccatgggtgaccctgcgatatccactgtcattttccatcccatccccaccacctgagtgacagaaatctaaacacacatccgtcccaacattccccagaccattcagaatcacacagcgtattaaacactgacagaatcttcatctagatattcgagtagcagcatatcttctcttttagtgtcattacgagggagtgatggcgggaatctcagtcgcactcaagctctgagacctttgtatcaaaaataggcatttgatttcctgttttagctttagtaaggctggctaacttccccctcttcaagctaggaactggcaatgctgtagaagtcagccgtaggaattcaaaatggctggcctaccttggctaccagacatattggggtttttgtagttgaatgaatgaggaggatgaatttcagcaaattttgaactgctcacccaacttctgctatcttgctccctccaaactcacagattctcctacagtcaaattaggagctgtaaatcagcacaaaataagataacagctgttcctcagtgagctggaagctacttaatggcctgatgggcaatgaacaaacgggtgatatgtctctgtttaagggaaaaatggcttaaaagctgttctgttctcacttctgactttaaccaaaagatttcaacccacaatgatcaggtcaatcaaaatccctaagagcagaactcctaccccaaaagaagcctggaagtctaattaagagtagcataaggaacctaattatgtttaccatgtttcttgggattggtgggaaatgtcaaaacatgccctttatttttaaaggcattcacaaactctctgactttgttcttcttatatattttttcagtgccgggatattcatattcctaaagccactattgtgttttctctaagaagcactacatgccaccagaattgtgcactgaaagataatacaaactgagtgtctttatgagaatcactgtgtcccctgaggcccagcagtacctgcttccctgtatgtggaagcagcacctcattcccgccatcagctacctctcatcaccccaccttcatcatcatgctccagggtcaccctggccagctcttgtgctgggacaggggattacaccatctctgttcaaagagggggaaatgtgcctatgccttaagtcaatgcactcagcaaggagaagcacatcttatttatcttgttacctatagtttactttgggtgattggaggggaatgacttagttatgactggacatcttaaaagctgatagacaagccaaatggctggcagatgatgtggatttcaaagagcccagaatgaactcatcactggcttagacagtcctggatgccatttggaaagtagtggccctgcaagcctaaatgaagtagtatttgtaggcctgggtggcatttggatttttcttttccctcaacaaggttttactttttcttactttacaagcaagggaagttttgtgataggagagaaataaaagatttgatattttttgagatgacactcaagcatcaggctgagatttgcacacatgggatgtaaaagcaagctgtgtgttgcttagtcacttacttagaagtagatggtgggggacagcggcgtgggtcctagcctggccagtgatgctgctggcgtccagaccccagactcactccaagcactcttgttcaatatctcatgcagaagagttgggctggtcactcttaggggtgagaccccgtgattggttggtttgtagcactaaggtctaaaaaggaaaaccataaaagacatcagattacgctggatcagtataattaatattccatagggccatgttgccagaatctgtatgtatcaatacagggtttttccaagccaggaaacgccctccttggctactaggagcacctatcccatatcattcagataaacaatgatagctacaaagtcatttgtggctagataggttaagacaggtgattttttaaagtagactgtctttgcattttgccatctgaagttcattaatctttagatgacaaaaaagcaaaaagttcccagaacgtttttgcttagattttgttctaatcaccacgtgaaggaatgagattagcaccacaagtttcatgccaataaaagagactggtgtgatcccacatgcaaaatttaatcctaagggtagtgagatcacaaacagaataaaaataagagcaatcaaccatataaatcaagtacctattgggaacagacataacattcaatttttcatttatgctaagtgaccacagtatacaaagtaataagcaggaaatttgatatgggttaaattatgcattttgttcagattttggaaattggtatgcattataagtttctcaatgtacatctttttatcccaacaccctcaaactagaatatttgtcagtggtcaagagaaaaaattttacctgaattcttgggggccggcggggagcttttacattaaaaatctactaacgcctactttttaaaaaatgagattctttctaatctttatatatgacattttctagacaatcgcacctttgggtatattaaacagctggtatcataacaaagaatccaaatgaaccttcaatatactagaagttctagtaggttaatattgttcagaagatttttacaaattaaaaactgatttccaaatatgttcaacatttacttctatttgatatctgctcaagaagtcatagaagtcttgggaaactattcgagtatcacagaggttttcaaaagcccttatggtgacatctacctaggtaaaagcctgacatgtggctttataattgttatgttacccaagggataaacttgaactggctttgaacatcctttaggtcattttctctttggataattttcatcgcatatccagcaactatagaccaaagtttgcttaaggtttgaccctagagcagaggtgggcaaactatgacctggaaaccaaatctgacttaccaccttttcctgtagttaaagttttattgtcacatagccacatacattcatttacatgttttctgattttacactacagcagcaggatggagtagttgtgtcagagactatgtatcccacaaagcatagattacttactatttagtcctttacaggcaaagtttcctcacccctgacctagaggtttttgtggtatgcattggatatagcaggaaagaaagcacatttccaaacagcagggagtaagcttacatttctgtgtaggtttgggaatatagttacttggcaaagtctttcaggaaggaagcccttccttatgttacatgtggaaagcctgccttccaagacatgtggaagtaattgatccacctgccagagaaacacaggctcagaggatgcctgggaacagggaggatgggattagtggaagcttaatggaaaaggaaagttatgatcctccaagacccttaattgatagaccataccaggttctgcaggtcagcatcattgtgtaatgagagtgaagtaggggaccctgtggttcaaccttagaatctgtttcctgtaggctctttctgctgtctatattcattaaagttttccacttcaccctcccatagtctagagggatgcccattccatggtcctccagagaatagttttgacttaacatgtctgtttagcccacatcacgtcagttatcaacaccgccactgtgcttactgttcctacagccacaccaggcttgaagagttagtgagaccaacaaataattggaagtattggaaaaagcaaaatacatggggacaaaaaaaatacagtgaaattctttttatcaaactgatgctgtgagaaaccagatgaatgccagtttggctttatttctaagaatctgggtcttcattctctggtgtagaaggaatgcaaaaaactataacaacaacaacaaaaacatattttgaaaagacatattctgacatctctgcttgtgtgtggtaaggcaggttcctatcagacatttatccctttggtcaagatcccttttgctcatccagggtttcatactcaatatcgcttaaaaaaaaaaaagtatcagctagggatgactctggaagtatgagtatcatggtggggaggaaggaattttttttaaatgtaaatgacccccatttaccagaccctaatcaaagtcacttaagggaatccctcagccttttatttggaaacagttgaaataaactggcagcagctagatcagagtatcttgctttattttataaaggccaaaggtagtatgaagtttggaccaaaaaggtaaatagatccattccagcacctgatactgatttttcaaggctctatgaaaggtcaaaaatttcattaaacaagaccagttctccctcttccccctgtcccaagaaatcttaggcatgaaaaggataaggaaacagctcctggaatgatacatttgcatagtgccctagtagcaggttgggaaaaagttataatataagaaacaaccttcgaaaacaggccttttatctcaaagataaaatgtctttcttgtggtctttcatcactatctccgtggtggaaggttcccctagttccaacatatttccattaaaatagtcaaagccacggcattgggatgtcagatgcctctctttctttgtggtaatcggaatttaaaattatacagttgcctctgaatttctcatgcacaaagccaaaccactgataagagataaagcagtctgaagcctgctgcttcagccagcacagcacaccacacacgctcgcactttcaaaagcaatgtgatttctatggttcttaaaagctttcttcataagggagtccctgaaatttctcaaggcaggtttgaatggcaaagggaaaataattacttgtgggaggtcctccttttgagtattgttagagcatacatgtaaaagaaaataacctttttggggcaactcatgctcacacatgctgttttctttggttctccccctaccttccttttgtagatattgacagaataggaggaaatgagcatccttatttgagaaagagcaagaatgtcatgagcccttgatgcaatagtaagtgtgatgtcatcatacagtgttaatgatgctatcaaatccatcaataaacagtctcaaaccttccaacaacagtgctcactgctgctcctcaacttcagcccagcaagcagtaatatcatcacccattttgagatatgcaggtggaatagaacaaagaaacagccactgtaatcgagaagcatgtttactgtctaaatccacctgttgcagtaggaagccagagtggggttccaaatgcctcattaagtatgtggacagcctcactagtaagtgagtgaatttggcttcatcactgaacattagctaaggtcagcttaataacacaaatatgaggccgacttctttgcgagaagagaaaagaaaacatctgcttgatttaaaatccaccccacatgcctagagttgtctaatagtccctcactttccaatggcttcacatcctacttctacatttggggttttttggtgaaatcagagatagctcaggatttcataaaacgagaaactccaaactggtctattaggttccatgggaacacttgtagccaaaggattgtctgagggcaggaagacgacacttgtcaacaaggaagacagtgtttctttagttcccatattcatctaattcatggggttctaacattttggggggccatagattcttttgacaatctgagccaatctatgaaacttctccccaaaaagaaccaccccacaaaatcttgcaaaacgtaagagattttcctggatctgaagctacccgaagacatgggaagagttgtattctattattcaattttaagaatatttattaatattcactgagctattgctagccactgtgctaaacattttacatacattctcctatttcatcctcaaaacaatcctttgagttgggttttaatatagttccaatattcggatgtgaaaactgaggcttatagtggctaagaaacttgcccaaagccactacctagaaaatggcagagctggaatgtaggtttaactcctgaccactatgctataaagtcaccacatgtcaaactaattttcaagttgttgggacatgtcccctactaggttttaaactagatcttccttggtagatgaagctatagaacttctattttccctgctttctgtagtctctcacagtgacagcatctatactaaagtatagatacctaaggggaaaatatagaaagcctgcctgaataatagaatctagaacaacaacaaaaatattaattttttctgtgtatgcttaggtcaagcttaaaaaaaaaaaaaaaagaccggaaaatacctgggttgttagcctcacatttaggaaaaaattgtaatactcagttatctgtgtgtgtggctaaacaagtcagcatttctgcacacatacatctctttcctttatacttcccttcaaaagacaaatatcttacttttgatctttgacactatttggtcagtattcttctttacctttacttgtggcaaaactcaaggaagcgatcaaatagagggaagctcatttctatcattgtctctgtttccctataagaaagaactaccagggactcactgactgcattaggcatacaatgtcagagctgagctgaccactctggtcctgtaatgtctttggcctcacaccttggcagccatcattaatgggccatacccttccccaggtgcagaattctcctccccagagcactcaggccgttactaccaatttatctgagttggaaataagactcatttgccagttcttatttttaaagtggcaccctttaactttgaacctgtgtattttacactggcatcctagattcagcaatgaggtttggtggtgtttcaactaggaagggagaaaatgagtgcatctgaagttccttacagcttggtttctttggaatgctttcatcttctaagcaaagggatcagggtttgatctgtaagagttaaaaagacaaagtcattttgaagaattaactcagccagggatcatgcaaaaagattagaaaccataatgcccttgttaaagccctgctgtcaacctgccttcacccagagcttagagggccacagcagcaaagaggttggggtccatccctctctgatgtgctttttccacaacacatatctggtcctctggcaggattgtggatagagctcctcaccatacccaaaagactcagccccagtgccagtgctttcctggttcaacaacccaccacaaaaccttagtaaaaggatgagccaaaaatgaaaaagactcgactctacagtaagtcagtcagggatttcctttttaatggtttaagacatccaaatggcaagccaggaatagataccattaaagggtctcataggactaaccttaccagagccagaaatctagctctctggaagagatgcaagattctagaaaagtaaagggaagtgtcggcacatctaaatttagtgaacacaaaattaatttttatctagtctgtgacggagggaataaagtttttcatgtatcaaccacctcccccagtcaggtttctccctttttgagattatgaagaagctgagacatacttcttaaggaggtcgtgttttagaaggaaaaggcagaggctatccatcattatgctggctagatgcgcttctgaagaagccggattctgatgttcttaaccaaaatggtgaggtcatggaagtcccatttgcttggagattttgaaaaaaaaaaaaaaaaaaaacccattcccataaagtaattgagttcagcctttggattatttttggtttggtttttctctggttttgggtgtgatgtaagaagagctttttagttttgttttgaataacatcaatccttgcacactctatgcaaaaattttgtaagcatttcaataatgctatgaattacaaggaactattttaactttattacactttctgtataaaaaatttgtatttaatattatttcgaccacagtcttgtaaaatatattaataaaaataatgattggtaagaaggaaa

SEQ ID NO: 178902 - DNA, 1412 bp, Homo sapiens
  Payload ID: 15264
  Gene Symbol: SGCD
  Gene Name: sarcoglycan, delta (35kDa dystrophin-associated glycoprotein)
  Uniprot ID: Q92629
  ENST ID: ENST00000517913
  CDS Start-End: 363-1133
gtgatatctattgaagctgggagggtcacagtatcagtgagtggtcccccaatttcttcttgagcatcgatgaattagcagtggtgtaatattgtggatctgacttcatgtgtcactaagaacaggagatccaagactgctcttctggggatgagacttggaagaaacctccatcctcagggatttgaagaaggttatactggaacctgtgtgaaggctgagacaaccgtcccttttgtggtggcctgaggggattttcttaatcccaatgttgccctgaaatttatgtccaggattcaaaaagtttaggactgctaagagacattactgccgggagtgttgagtgaagggaccaggtggagatgatgcctcaggagcagtacactcaccaccggagcaccatgcctggctctgtggggccacaggtatacaaggtggggatttatggctggcggaaacgatgcctgtatttctttgtcctgctcctcatgattttaatactggtgaacttggccatgaccatctggattctcaaagtcatgaacttcacaattgatggaatgggaaacctgaggatcacagaaaaaggtctaaagctagaaggagactctgaattcttacaacctctctacgccaaagaaatccagtcccgaccaggtaatgccctgtacttcaagtctgccagaaatgttacagtgaacattctcaatgaccagactaaagtgctaactcagcttataacaggtccaaaagccgtagaagcttatggtaaaaaatttgaggtaaaaactgtttctggaaaattgctcttctctgcagacaataatgaagtggtagtaggagctgaaagattacgagttttaggagcggagggcacagtgttccctaaatctatagaaacacctaatgtcagggcagaccccttcaaagaactaaggttggagtccccaacccggtctctagtgatggaggccccaaaaggagtggaaatcaatgcagaagctggcaatatggaagccacctgcaggacagagctgagactggaatccaaagatggagaggtgagggatgagaaggacagaagttcaaagagctacagcttcaacaggccaacccttcccataactggttgacctcggagttggatcctacagtgtatcaacaaaaggagccaagcaggttttatttctgaaacaattaattgagcagcatgattataagccaaacccacaatccatcaaagtgatgatttcttatttgtaaaatgcagagataatggcatgtattccaagtacagaattatatgaccatgaaaatgaatgctattttcaaattctctcttgtcaccttaaaataagattttgttagccaacataattaagctgtatatattatacacatctggctcaaga

SEQ ID NO: 178903 - DNA, 739 bp, Homo sapiens
  Payload ID: 15264
  Gene Symbol: SGCD
  Gene Name: sarcoglycan, delta (35kDa dystrophin-associated glycoprotein)
  ENST ID: ENST00000524347
  CDS Start-End: 329-577
agcccagtagctgtgagtcggtctgacaaagccatattgaagtacggagtacggtttcaaagcagtcagaaaaagaacgggaatgctgttcaggaaattcttcaggcatgggcagggacttggctgcagttctgcagttggaaaatctgactggggcagcttctgagcgcaggctgggcctgcacacactcagcgggccgagtggccacctccttcagagctgctcagcacgccctgggatcgcgggcggttttcatcggccggtttgtgaaacggacaagagagagacattactgccgggagtgttgagtgaagggaccaggtggagatgatgcctcaggagcagtacactcaccaccggagcaccatgcctggctctgtggggccacaggtatacaaggtggggatttatggctggcggaaacgatgcctgtatttctttgtcctgctcctcatgattttaatactggtgaacttggccatgaccatctggattctcaaagtcatgaacttcacaattagcatccatctgcttctgagatttaactggctattcagatgttgtggaatgagctgagaggagccagaaccaggagccaggtgactcagattccagtacccactttgctgctggatggaatgggaaacctgaggatcacagaaaaaggtctaaagctagaaggagactctgaattcttacaacctctctacgccaaagaaatccagtcccgaccaggta

SEQ ID NO: 178904 - DNA, 1694 bp, Homo sapiens
  Payload ID: 15265
  Gene Symbol: SGCE
  Gene Name: sarcoglycan, epsilon
  Uniprot ID: O43556
  ENST ID: ENST00000265735
  CDS Start-End: 112-1425
cgggattaccgagggggtgcgggatgctgatgctgaactggccaagctgggagggaagaagaaagggaggggaggggagaatcgaggacggacggcctagccaggccaagaatgcaattgccccggtggtgggagctgggagacccctgtgcttggacgggacagggtcgggggacacgcaggatgagccccgcgaccactggcacattcttgctgacagtgtacagtattttctccaaggtacactccgatcggaatgtatacccatcagcaggtgtcctctttgttcatgttttggaaagagaatattttaagggggaatttccaccttacccaaaacctggcgagattagtaatgatcccataacatttaatacaaatttaatgggttacccagaccgacctggatggcttcgatatatccaaaggacaccatatagtgatggagtcctatatgggtccccaacagctgaaaatgtggggaagccaacaatcattgagataactgcctacaacaggcgcacctttgagactgcaaggcataatttgataattaatataatgtctgcagaagacttcccgttgccatatcaagcagaattcttcattaagaatatgaatgtagaagaaatgttggccagtgaggttcttggagactttcttggcgcagtgaaaaatgtgtggcagccagagcgcctgaacgccataaacatcacatcggccctagacaggggtggcagggtgccacttcccattaatgacctgaaggagggcgtttatgtcatggttggtgcagatgtcccgttttcttcttgtttacgagaagttgaaaatccacagaatcaattgagatgtagtcaagaaatggagcctgtaataacatgtgataaaaaatttcgtactcaattttacattgactggtgcaaaatttcattggttgataaaacaaagcaagtgtccacctatcaggaagtgattcgtggagaggggattttacctgatggtggagaatacaaacccccttctgattctttgaaaagcagagactattacacggatttcctaattacactggctgtgccctcggcagtggcactggtcctttttctaatacttgcttatatcatgtgctgccgacgggaaggcgtggaaaagagaaacatgcaaacaccagacatccaactggtccatcacagtgctattcagaaatctaccaaggagcttcgagacatgtccaagaatagagagatagcatggcccctgtcaacgcttcctgtgttccaccctgtgactggggaaatcatacctcctttacacacagacaactatgatagcacaaacatgccattgatgcaaacgcagcagaacttgccacatcagactcagattccccaacagcagactacaggtaaatggtatccctgaagaaagaaaactgactgaagcaatgaatttataatcagacaatatagcagttacatcacatttcttttctcttccaataatgcatgagcttttctggcatatgttatgcatgttggcagtattaagtgtataccaaataatacaacataactttcattttactaatgtatttttttgtacttaaagcatttttgacaatttgtaaaacattgatgactttatatttgttacaataaaagttgatctttaaaataaatattattaatgaa

SEQ ID NO: 178905 - DNA, 1597 bp, Homo sapiens
  Payload ID: 15265
  Gene Symbol: SGCE
  Gene Name: sarcoglycan, epsilon
  ENST ID: ENST00000447873
  CDS Start-End: 69-1355
aagctgggagggaagaagaaagggaggggaggggagaatcgaggacggacggcctagccaggccaagaatgcaattgccccggtggtgggagctgggagacccctgtgcttggacgggacagggtcgggggacacgcaggatgagccccgcgaccactggcacattcttgctgacagtgtacagtattttctccaaggtacactccgatcggaatgtatacccatcagcaggtgtcctctttgttcatgttttggaaagagaatattttaagggggaatttccaccttacccaaaacctggcgagattagtaatgatcccataacatttaatacaaatttaatgggttacccagaccgacctggatggcttcgatatatccaaaggacaccatatagtgatggagtcctatatgggtccccaacagctgaaaatgtggggaagccaacaatcattgagataactgcctacaacaggcgcacctttgagactgcaaggcataatttgataattaatataatgtctgcagaagacttcccgttgccatatcaagcagaattcttcattaagaatatgaatgtagaagaaatgttggccagtgaggttcttggagactttcttggcgcagtgaaaaatgtgtggcagccagagcgcctgaacgccataaacatcacatcggccctagacaggggtggcagggtgccacttcccattaatgacctgaaggagggcgtttatgtcatggttggtgcagatgtcccgttttcttcttgtttacgagaagttgaaaatccacagaatcaattgagatgtagtcaagaaatggagcctgtaataacatgtgataaaaaatttcgtactcaattttacattgactggtgcaaaatttcattggttgataaaacaaagcaagtgtccacctatcaggaagtgattcgtggagaggggattttacctgatggtggagaatacaaacccccttctgattctttgaaaagcagagactattacacggatttcctaattacactggctgtgccctcggcagtggcactggtcctttttctaatacttgcttatatcatgtgctgccgacgggaaggcgtcatccaactggtccatcacagtgctattcagaaatctaccaaggagcttcgagacatgtccaagaatagagagatagcatggcccctgtcaacgcttcctgtgttccaccctgtgactggggaaatcatacctcctttacacacagacaactatgatagcacaaacatgccattgatgcaaacgcagcagaacttgccacatcagactcagattccccaacagcagactacaggtaaatggtatccctgaagaaagaaaactgactgaagcaatgaatttataatcagacaatatagcagttacatcacatttcttttctcttccaataatgcatgagcttttctggcatatgttatgcatgttggcagtattaagtgtataccaaataatacaacataactttcattttactaatgtatttttttgtacttaaagcatttttgacaatttgtaaaacattgatgactttatatttgttacaataaaagttg

SEQ ID NO: 178906 - DNA, 597 bp, Homo sapiens
  Payload ID: 15265
  Gene Symbol: SGCE
  Gene Name: sarcoglycan, epsilon
  ENST ID: ENST00000425444
  CDS Start-End: 76-207
actggccaagctgggagggaagaagaaagggaggggaggggagaatcgaggacggacggcctagccaggccaagaatgcaattgccccggtggtgggagctgggagacccctgtgcttggacgggacagggtcgggggacacgcaggatgagccccgcgaccactggcacattcttgctgacagtggaatatgaaagagacaaatgaagtagtggacagagaaagacttgacagtttgcttttaagtgtacagtattttctccaaggtacactccgatcggaatgtatacccatcagcaggtgtcctctttgttcatgttttggaaagagaatattttaagggggaatttccaccttacccaaaacctggcgagattagtaatgatcccataacatttaatacaaatttaatgggttacccagaccgacctggatggcttcgatatatccaaaggacaccatatagtgatggagtcctatatgggtccccaacagctgaaaatgtggggaagccaacaatcattgagataactgcctacaacaggcgcacctttgagactgcaaggcataatttgataattaatataatgtctgcag

SEQ ID NO: 178907 - DNA, 1508 bp, Homo sapiens
  Payload ID: 15265
  Gene Symbol: SGCE
  Gene Name: sarcoglycan, epsilon
  ENST ID: ENST00000437425
  CDS Start-End: 69-1259
aagctgggagggaagaagaaagggaggggaggggagaatcgaggacggacggcctagccaggccaagaatgcaattgccccggtggtgggagctgggagacccctgtgcttggacgggacagggtcgggggacacgcaggatgagccccgcgaccactggcacattcttgctgacaggcgagattagtaatgatcccataacatttaatacaaatttaatgggttacccagaccgacctggatggcttcgatatatccaaaggacaccatatagtgatggagtcctatatgggtccccaacagctgaaaatgtggggaagccaacaatcattgagataactgcctacaacaggcgcacctttgagactgcaaggcataatttgataattaatataatgtctgcagaagacttcccgttgccatatcaagcagaattcttcattaagaatatgaatgtagaagaaatgttggccagtgaggttcttggagactttcttggcgcagtgaaaaatgtgtggcagccagagcgcctgaacgccataaacatcacatcggccctagacaggggtggcagggtgccacttcccattaatgacctgaaggagggcgtttatgtcatggttggtgcagatgtcccgttttcttcttgtttacgagaagttgaaaatccacagaatcaattgagatgtagtcaagaaatggagcctgtaataacatgtgataaaaaatttcgtactcaattttacattgactggtgcaaaatttcattggttgataaaacaaagcaagtgtccacctatcaggaagtgattcgtggagaggggattttacctgatggtggagaatacaaacccccttctgattctttgaaaagcagagactattacacggatttcctaattacactggctgtgccctcggcagtggcactggtcctttttctaatacttgcttatatcatgtgctgccgacgggaaggcgtggaaaagagaaacatgcaaacaccagacatccaactggtccatcacagtgctattcagaaatctaccaaggagcttcgagacatgtccaagaatagagagatagcatggcccctgtcaacgcttcctgtgttccaccctgtgactggggaaatcatacctcctttacacacagacaactatgatagcacaaacatgccattgatgcaaacgcagcagaacttgccacatcagactcagattccccaacagcagactacaggtaaatggtatccctgaagaaagaaaactgactgaagcaatgaatttataatcagacaatatagcagttacatcacatttcttttctcttccaataatgcatgagcttttctggcatatgttatgcatgttggcagtattaagtgtataccaaataatacaacataactttcattttactaatgtatttttttgtacttaaagcatttttgacaatttgtaaaacattgatgactttatatttgttacaataaaagttgatcttta

SEQ ID NO: 178908 - DNA, 1409 bp, Homo sapiens
  Payload ID: 15265
  Gene Symbol: SGCE
  Gene Name: sarcoglycan, epsilon
  Uniprot ID: O43556
  ENST ID: ENST00000428696
  CDS Start-End: 1-1356
atgcaattgccccggtggtgggagctgggagacccctgtgcttggacgggacagggtcgggggacacgcaggatgagccccgcgaccactggcacattcttgctgacagtgtacagtattttctccaaggtacactccgatcggaatgtatacccatcagcaggtgtcctctttgttcatgttttggaaagagaatattttaagggggaatttccaccttacccaaaacctggcgagattagtaatgatcccataacatttaatacaaatttaatgggttacccagaccgacctggatggcttcgatatatccaaaggacaccatatagtgatggagtcctatatgggtccccaacagctgaaaatgtggggaagccaacaatcattgagataactgcctacaacaggcgcacctttgagactgcaaggcataatttgataattaatataatgtctgcagaagacttcccgttgccatatcaagcagaattcttcattaagaatatgaatgtagaagaaatgttggccagtgaggttcttggagactttcttggcgcagtgaaaaatgtgtggcagccagagcgcctgaacgccataaacatcacatcggccctagacaggggtggcagggtgccacttcccattaatgacctgaaggagggcgtttatgtcatggttggtgcagatgtcccgttttcttcttgtttacgagaagttgaaaatccacagaatcaattgagatgtagtcaagaaatggagcctgtaataacatgtgataaaaaatttcgtactcaattttacattgactggtgcaaaatttcattggttgataaaacaaagcaagtgtccacctatcaggaagtgattcgtggagaggggattttacctgatggtggagaatacaaacccccttctgattctttgaaaagcagagactattacacggatttcctaattacactggctgtgccctcggcagtggcactggtcctttttctaatacttgcttatatcatgtgctgccgacgggaaggcgtcatccaactggtccatcacagtgctattcagaaatctaccaaggagcttcgagacatgtccaagaatagagagatagcatggcccctgtcaacgcttcctgtgttccaccctgtgactggggaaatcatacctcctttacacacagacaactatgatagcacaaacatgccattgatgcaaacgcagcagaacttgccacatcagactcagattccccaacagcagactacaggagattttcgtttgacaacttttcaaagatttgaggtaaatggtatccctgaagaaagaaaactgactgaagcaatgaatttataatcagacaatatagcagttacatcacatttcttttctcttccaataatgcatga

SEQ ID NO: 178909 - DNA, 815 bp, Homo sapiens
  Payload ID: 15265
  Gene Symbol: SGCE
  Gene Name: sarcoglycan, epsilon
  ENST ID: ENST00000450385
  CDS Start-End: 30-161
cgaggacggacggcctagccaggccaagaatgcaattgccccggtggtgggagctgggagacccctgtgcttggacgggacagggtcgggggacacgcaggatgagccccgcgaccactggcacattcttgctgacagtggaatatgaaagagacaaatgaagtagtggacagagaaagacttgacagtttgcttttaagcttttttattaagctgtgctgatggcataaatggaacagttaactggaagaccagacaggccaacaattttattatcagcagaaaaatggctgctgggatgaaagatgtgtacagtattttctccaaggtacactccgatcggaatgtatacccatcagcaggtgtcctctttgttcatgttttggaaagagaatattttaagggggaatttccaccttacccaaaacctggcgagattagtaatgatcccataacatttaatacaaatttaatgggttacccagaccgacctggatggcttcgatatatccaaaggacaccatatagtgatggagtcctatatgggtccccaacagctgaaaatgtggggaagccaacaatcattgagataactgcctacaacaggcgcacctttgagactgcaaggcataatttgataattaatataatgtctgcagaagacttcccgttgccatatcaagcagaattcttcattaagaatatgaatgtagaagaaatgttggccagtgaggttcttggagactttcttggcgcagtgaaaaatgtgtggcagccagagcgcctgaacgccataaacatcacatcggccctag

SEQ ID NO: 178910 - DNA, 1666 bp, Homo sapiens
  Payload ID: 15265
  Gene Symbol: SGCE
  Gene Name: sarcoglycan, epsilon
  Uniprot ID: O43556
  ENST ID: ENST00000445866
  CDS Start-End: 27-1415
ggacggacggcctagccaggccaagaatgcaattgccccggtggtgggagctgggagacccctgtgcttggacgggacagggtcgggggacacgcaggatgagccccgcgaccactggcacattcttgctgacagtgtacagtattttctccaaggtacactccgatcggaatgtatacccatcagcaggtgtcctctttgttcatgttttggaaagagaatattttaagggggaatttccaccttacccaaaacctggcgagattagtaatgatcccataacatttaatacaaatttaatgggttacccagaccgacctggatggcttcgatatatccaaaggacaccatatagtgatggagtcctatatgggtccccaacagctgaaaatgtggggaagccaacaatcattgagataactgcctacaacaggcgcacctttgagactgcaaggcataatttgataattaatataatgtctgcagaagacttcccgttgccatatcaagcagaattcttcattaagaatatgaatgtagaagaaatgttggccagtgaggttcttggagactttcttggcgcagtgaaaaatgtgtggcagccagagcgcctgaacgccataaacatcacatcggccctagacaggggtggcagggtgccacttcccattaatgacctgaaggagggcgtttatgtcatggttggtgcagatgtcccgttttcttcttgtttacgagaagttgaaaatccacagaatcaattgagatgtagtcaagaaatggagcctgtaataacatgtgataaaaaatttcgtactcaattttacattgactggtgcaaaatttcattggttgataaaacaaagcaagtgtccacctatcaggaagtgattcgtggagaggggattttacctgatggtggagaatacaaacccccttctgattctttgaaaagcagagactattacacggatttcctaattacactggctgtgccctcggcagtggcactggtcctttttctaatacttgcttatatcatgtgctgccgacgggaaggcgtggaaaagagaaacatgcaaacaccagacatccaactggtccatcacagtgctattcagaaatctaccaaggagcttcgagacatgtccaagaatagagagatagcatggcccctgtcaacgcttcctgtgttccaccctgtgactggggaaatcatacctcctttacacacagacaactatgatagcacaaacatgccattgatgcaaacgcagcaatggagtttcgctcctgttgcccaggctggagtgcaatggagcgatcttggctcactgcagcctccgcctcccaggaacttgccacatcagactcagattccccaacagcagactacaggtaaatggtatccctgaagaaagaaaactgactgaagcaatgaatttataatcagacaatatagcagttacatcacatttcttttctcttccaataatgcatgagcttttctggcatatgttatgcatgttggcagtattaagtgtataccaaataatacaacataactttcattttactaatgtatttttttgtacttaaagcatttttgacaatttgtaaaacattgatgactttatatttgttacaataaaagttgatctttaaa

SEQ ID NO: 178911 - DNA, 1871 bp, Homo sapiens
  Payload ID: 15265
  Gene Symbol: SGCE
  Gene Name: sarcoglycan, epsilon
  ENST ID: ENST00000415788
  CDS Start-End: 89-1504
atgctgatgctgaactggccaagctgggagggaagaagaaagggaggggaggggagaatcgaggacggacggcctagccaggccaagaatgcaattgccccggtggtgggagctgggagacccctgtgcttggacgggacagggtcgggggacacgcaggatgagccccgcgaccactggcacattcttgctgacagcttttttattaagctgtgctgatggcataaatggaacagttaactggaagaccagacaggccaacaattttattatcagcagaaaaatggctgctgggatgaaagatgtgtacagtattttctccaaggtacactccgatcggaatgtatacccatcagcaggtgtcctctttgttcatgttttggaaagagaatattttaagggggaatttccaccttacccaaaacctggcgagattagtaatgatcccataacatttaatacaaatttaatgggttacccagaccgacctggatggcttcgatatatccaaaggacaccatatagtgatggagtcctatatgggtccccaacagctgaaaatgtggggaagccaacaatcattgagataactgcctacaacaggcgcacctttgagactgcaaggcataatttgataattaatataatgtctgcagaagacttcccgttgccatatcaagcagaattcttcattaagaatatgaatgtagaagaaatgttggccagtgaggttcttggagactttcttggcgcagtgaaaaatgtgtggcagccagagcgcctgaacgccataaacatcacatcggccctagacaggggtggcagggtgccacttcccattaatgacctgaaggagggcgtttatgtcatggttggtgcagatgtcccgttttcttcttgtttacgagaagttgaaaatccacagaatcaattgagatgtagtcaagaaatggagcctgtaataacatgtgataaaaaatttcgtactcaattttacattgactggtgcaaaatttcattggttgataaaacaaagcaagtgtccacctatcaggaagtgattcgtggagaggggattttacctgatggtggagaatacaaacccccttctgattctttgaaaagcagagactattacacggatttcctaattacactggctgtgccctcggcagtggcactggtcctttttctaatacttgcttatatcatgtgctgccgacgggaaggcgtggaaaagagaaacatgcaaacaccagacatccaactggtccatcacagtgctattcagaaatctaccaaggagcttcgagacatgtccaagaatagagagatagcatggcccctgtcaacgcttcctgtgttccaccctgtgactggggaaatcatacctcctttacacacagacaactatgatagcacaaacatgccattgatgcaaacgcagcagaacttgccacatcagactcagattccccaacagcagactacaggtgagtgctaagaataataaattaatgtttatgaatgaatctaatagattaaaagataattatggcactatataatttatgaagctttatcttcaccaaataaggcaaaacacttgtgtcattccttaatcagacttaaaacctcagaataatagcttagattattacatagattggcatcagaatgataaacacagggtaaatgatcttagagcaaaagcatccatggaggtcctgtctaattaaggaagactgaatgaaacccctttccttcagtgaagttccctattcttccccttggtatgaaagattcttagcttggatgcatccaggatttgtctcagtaagtgagcagcttgaagtttcaagctctcttac

SEQ ID NO: 178912 - DNA, 408 bp, Homo sapiens
  Payload ID: 15265
  Gene Symbol: SGCE
  Gene Name: sarcoglycan, epsilon
  ENST ID: ENST00000522045
  CDS Start-End: 1-126
acggatttcctaattacactggctgtgccctcggcagtggcactggtcctttttctaatacttgcttatatcatgtgctgccgacgggaaggcgtggaaaagagaaacatgcaaacaccagagtaaatggtatccctgaagaaagaaaactgactgaagcaatgaatttataatcagacaatatagcagttacatcacatttcttttctcttccaataatgcatgagcttttctggcatatgttatgcatgttggcagtattaagtgtataccaaataatacaacataactttcattttactaatgtatttttttgtacttaaagcatttttgacaatttgtaaaacattgatgactttatatttgttacaataaaagttgatctttaaaataaatattattaatgaa

SEQ ID NO: 178913 - DNA, 1624 bp, Homo sapiens
  Payload ID: 15266
  Gene Symbol: SGCG
  Gene Name: sarcoglycan, gamma (35kDa dystrophin-associated glycoprotein)
  Uniprot ID: Q13326
  ENST ID: ENST00000218867
  CDS Start-End: 125-1000
gttgctgaagcttcatcctttgctctcattctgtaagtcatagaaaagtttgaaacattctgtctgtggtagagctcgggccagctgtagttcattcgccagtgtgcttttcttaatatctaagatggtgcgtgagcagtacactacagccacagaaggcatctgcatagagaggccagagaatcagtatgtctacaaaattggcatttatggctggagaaagcgctgtctctacttgtttgttcttcttttactcatcatcctcgttgtgaatttagctcttacaatttggattcttaaagtgatgtggttttctccagcaggaatgggccacttgtgtgtaacaaaagatggactgcgcttggaaggggaatcagaatttttattcccattgtatgccaaagaaatacactccagagtggactcatctctgcttctacaatcaacccagaatgtgactgtaaatgcgcgcaactcagaaggggaggtcacaggcaggttaaaagtcggtcccaaaatggtagaagtccagaatcaacagtttcagatcaactccaacgacggcaagccactatttactgtagatgagaaggaagttgtggttggtacagataaacttcgagtaactgggcctgaaggggctctttttgaacattcagtggagacaccccttgtcagagccgacccgtttcaagaccttagattagaatcccccactcggagtctaagcatggatgccccaaggggtgtgcatattcaagctcacgctgggaaaattgaggcgctttctcaaatggatattctttttcatagtagtgatggaatgcttgtgcttgatgctgaaactgtgtgcttacccaagctggtgcaggggacgtggggtccctctggcagctcacagagcctctacgaaatctgtgtgtgtccagatgggaagctgtacctgtctgtggccggtgtgagcaccacgtgccaggagcacaaccacatctgcctctgagctgcctgcgtcctctcggtgagctgtgcagtgccggccccagatcctcacacccagggagcagctgcacatcgtgaaagactgaggcagcgtggatgggaagtaaacgcttccagaggaactcagaaaaaattatgtgccagtgaaagtgtttggacaaaaactacatgatctcaaaatgcacgtggatgtgagacacaaaagttgacaaaatggaaaagcaatgtgtttttccactggattaattttcaccggaacaattgcgaattctctctgcctcgcctccccctatcttgtccgtgtgggcacacactgagtgttgagttgccgtgtggagttaatgtatgacgctccactgtggatatctaatgccctgttgagagtagccttgctcagtactaaaatgccccaaagttctatacagcatttcctttatagcattcaaacctcacatcctcccttcagtttaatgcaagtaagtcaggtttcacaagaaaattttcaagttttgaagggaatttgaggttgatctggttttcaagatgtagttaaaggaataaatcactcaaaattaaactttctgtatatagtcaataagcaataaaaacctcatttttcagagtt

SEQ ID NO: 178914 - DNA, 2234 bp, Homo sapiens
  Payload ID: 15267
  Gene Symbol: SGCZ
  Gene Name: sarcoglycan, zeta
  Uniprot ID: Q96LD1
  ENST ID: ENST00000382080
  CDS Start-End: 717-1655
ctctctttctctccctctttttctctccgttggatccacctcctattccctcaactcttttagcataaccttcaaaggagaacgttcccttctgacttgattatcttcttttccccactgagaaaatacctctcagctacaagacattttttaagtctatgcaggacttcggggattctgttatcttgccggggaaactgatcattgctaatgcctgggactggagctaaattacctaccagagtaagcctgacggaggaagccttttatcatacactcttctcttcagtttgaacacatttgcttgaaatttgccgcatgatgctgaccagggaagcagctttttttctcgggatgcagcaattcgctgggttctaagcttattgcagaagaagaaataatcttaaatagagtggatttttttttccttttttcttttggcccctgtttcaatcgactcagctgtgttgcaccgcggtagagatcacctgtcactaaatctttgaggaagtaaaataaagtgaattatcattattatttatttattttccttatttttaacccggtggaggcggcgtgaccacggagaatgagactgagaggagctgccggggcttggaggaggataaagctgagtttaagctggaaactaaaagactagattgtttttgggtgccactcgcccggttcctctccacttcgtttagttgcgctccatggacagatcaacgaacctggacattgaggagctcaagatgacacgagaacaatacatactagcaacccaacagaataacctgccaaggactgagaatgcacaactttacccagtgggaatttatggatggcgaaagaggtgcttatacttctttgtccttctgctgttggttaccatgatagttaacttagccatgacaatatggatattgaaagttatgaatttcactgtggatggtatgggaaatctgagagtcaccaagaagggaatccgacttgaaggtatatctgagtttctacttccattgtatgtgaaagaaattcattctcgaaaggatagtccgctggtcttacagtctgacaggaatgtcacagtgaatgcaagaaatcacatggggcagttaaccggacagctgaccataggagctgatgctgtggaagctcagtgtaaaagatttgaagtgagagccagtgaagatggcagggtgctgttttctgcagatgaagatgagattaccattggggctgaaaagctgaaagttacaggcactgaaggagccgtatttgggcactctgtggagacgccgcacatcagagcagagccatcccaagatctcaggcttgaatcacccaccagatccttgatcatggaagctccccgtggggtccaggtgagtgctgctgcaggagacttcaaggccacctgcaggaaggagctccatctgcaatctacagaaggggagatatttttaaatgcagagacaatcaagctgggaaatctaccaactggctccttctcatcttcttcacccagctcctcaagttctcgacagacagtgtatgaactctgcgtctgccccaatggcaaactttacctttctccagcaggagtaggttccacttgtcagtccagtagcaacatctgcctgtggagctgaagtgactgatttctcctcacaccagaatagccttttgttcctgtccgtctgcttcacagttctgctcggtttcccttgtgatcagtccagagcttcttcgaatggtccacagagcaacttccagtgtgagcagggattcgccaccaccttctcttgtgatttactgtactgctcaacacagagggtgtgattgacacagcagtggaaaaagcgtcgtcagcaggaaaactggatcatgacttttgctcgaaagggagaataacataggtgcctttgctacgcgaagtgaagcacacagttttagatttttgcaggacctggatatgaactgcacatatatacattacataaatgaaattcccagtatccaatggcaagatgaaatggttaaccctgtaagaaaacttattctacattctgaaagcacaattttccattcatctttttggatgtaaacttttatccccgacttttaaaattttaaagcattatgtaatgcttgctttactaaaatttaaattcaatacatggtttttaacaaaacagaacaaaacaaaacaatacagaatctctccctga

SEQ ID NO: 178915 - DNA, 867 bp, Homo sapiens
  Payload ID: 15267
  Gene Symbol: SGCZ
  Gene Name: sarcoglycan, zeta
  ENST ID: ENST00000421524
  CDS Start-End: 1-798
atgacacgagaacaatacatactagcaacccaacagaataacctgccaaggactgagaatgcacaactttacccagtgggaatttatggatggcgaaagaggtgcttatacttctttgtccttctgctgttggttaccatgatagttaacttagccatgacaatatggatattgaaagttatgaatttcactgtggatagtccgctggtcttacagtctgacaggaatgtcacagtgaatgcaagaaatcacatggggcagttaaccggacagctgaccataggagctgatgctgtggaagctcagtgtaaaagatttgaagtgagagccagtgaagatggcagggtgctgttttctgcagatgaagatgagattaccattggggctgaaaagctgaaagttacaggcactgaaggagccgtatttgggcactctgtggagacgccgcacatcagagcagagccatcccaagatctcaggcttgaatcacccaccagatccttgatcatggaagctccccgtggggtccaggtgagtgctgctgcaggagacttcaaggccacctgcaggaaggagctccatctgcaatctacagaaggggagatatttttaaatgcagagacaatcaagctgggaaatctaccaactggctccttctcatcttcttcacccagctcctcaagttctcgacagacagtgtatgaactctgcgtctgccccaatggcaaactttacctttctccagcaggagtaggttccacttgtcagtccagtagcaacatctgcctgtggagctgaagtgactgatttctcctcacaccagaatagccttttgttcctgtccgtctgcttcacagttctgctcgg

SEQ ID NO: 178916 - DNA, 1288 bp, Homo sapiens
  Payload ID: 15267
  Gene Symbol: SGCZ
  Gene Name: sarcoglycan, zeta
  ENST ID: ENST00000613692
  CDS Start-End: 165-710
tgtaggatggtatgggaaatctgagagtcaccaagaagggaatccgacttgaaggtatatctgagtttctacttccattgtatgtgaaagaaattcattctcgaaaggatagtccgctggtcttacagtctgacaggaatgtcacagtgaatgcaagaaatcacatggggcagttaaccggacagctgaccataggagctgatgctgtggaagctcagtgtaaaagatttgaagtgagagccagtgaagatggcagggtgctgttttctgcagatgaagatgagattaccattggggctgaaaagctgaaagttacaggcactgaaggagccgtatttgggcactctgtggagacgccgcacatcagagcagagccatcccaagatctcaggcttgaatcacccaccagatccttgatcatggaagctccccgtggggtccaggtgagtgctgctgcaggagacttcaaggccacctgcaggaaggagctccatctgcaatctacagaaggggagatatttttaaatgcagagacaatcaagctgggaaatctaccaactggctccttctcatcttcttcacccagctcctcaagttctcgacagacagtgtatgaactctgcgtctgccccaatggcaaactttacctttctccagcaggagtaggttccacttgtcagtccagtagcaacatctgcctgtggagctgaagtgactgatttctcctcacaccagaatagccttttgttcctgtccgtctgcttcacagttctgctcggtttcccttgtgatcagtccagagcttcttcgaatggtccacagagcaacttccagtgtgagcagggattcgccaccaccttctcttgtgatttactgtactgctcaacacagagggtgtgattgacacagcagtggaaaaagcgtcgtcagcaggaaaactggatcatgacttttgctcgaaagggagaataacataggtgcctttgctacgcgaagtgaagcacacagttttagatttttgcaggacctggatatgaactgcacatatatacattacataaatgaaattcccagtatccaatggcaagatgaaatggttaaccctgtaagaaaacttattctacattctgaaagcacaattttccattcatctttttggatgtaaacttttatccccgacttttaaaattttaaagcattatgtaatgcttgctttactaaaatttaaattcaatacatggtttttaacaaaacagaacaaaacaaaacaatacagaatctctccctg

SEQ ID NO: 178917 - DNA, 5433 bp, Homo sapiens
  Payload ID: 15268
  Gene Symbol: SLMAP
  Gene Name: sarcolemma associated protein
  Uniprot ID: Q14BN4
  ENST ID: ENST00000295951
  CDS Start-End: 1218-3653
ctggactacggcgcgggagagggggtaggagggcccttgaagggtgcgcgttcccgtggcggtgcaccgggtaggtttcagtcagagtcactatggcggccggcgctggcaaggtcggaaagtttcctgcctcgtcgggcgcagcttgagcttgccccatcggccgcgatcggtggaggctgcggcggatccagcccggggcctcaaggcctctccccaacctccgggccagtctccctcccccaccttctcgtccgccgggagctgcggctgccgtccctgagatgcgaccctcgcgggggcgaccctgaggggaggcggcccatgtgctgagcggcggcccagaagcctaggcgtccggggaccaacttcctgccgcctgggaactcgagcctcccggtgtcgcgcctcgctcggtccgcaccggcctgcggagccgggtccccgccctggtcgcggggacgctcgccaggtgcccaggagtcccgacttggccactgcccgcgccccgccggcctccacgcctcgcgcggagaacctcagccaccgccgtctcggatcgtgccaggccggggaccgcgtcccccttcccggggcggcctccgctcagcaggggcgatgcagactgtcccgccggccgtctagagcccctccgtctccgtcacctctcgccccttcactccgggcgaggactggcggtggctgcccagaggtgcccagccacaccttccttcggcccaaaaggactttcctggccgcgccgaaccgacccttcattcatgctgcagtgctgcaacgtttccgccaccaagggggaaaagcggccgcgatctcaaaccaaacacaagaattggcgtgtgactcatctgcttggatacctccagtccccaaactgtgttccaggagttttcttggccgaagctgcccgatgtttgagccttttcttcccagagaagaagatggactgaaagctgccagttggggactttttgtgatcacggcgttgcagcgttttaaaggaggtgatggggcttgcgctggcttgtcttcccacccaagtgaagagttgatgttcactggttatgcttagacaatgtgcagtttgtgttaatttaaaattttgggtgggataggggcataggcttgtgaagggcagtccggatccggaggaactcctctttgtccctggtaggagagacacccccagtctatcctcgatgccgtcagccttggccatcttcacttgccgcccgaactcgcacccgtttcaggagcgtcatgtctacctggacgagcccatcaaaatcggccgctcagtggcccgctgtcgaccagcgcagaataatgccacttttgattgcaaagtgctatcaaggaaccacgctctcgtctggtttgatcacaagacgggcaagttttatcttcaagacactaaaagtagtaatggtacttttataaatagccagagattgagtcgaggctctgaagaaagtccaccatgtgaaattctttccggtgacattatccagtttggagtagacgtgacagagaatacacggaaagttacccatgggtgtattgtttccacaataaaactttttctaccagatggtatggaagcccggctccgctcagatgtcatccatgcaccattaccaagtcctgttgacaaagttgctgctaacactccaagtatgtactctcaggaactattccagctttctcagtatctacaggaggccttacatcgggaacaaatgttggaacagaagttagccacgcttcagcggctactagccatcacccaagaggcttcagataccagttggcaggctttaatagatgaagatagactcttatcacggttagaagttatgggaaaccaattacaggcatgctccaaaaatcaaacagaagatagtttacgaaaggaacttatagcattacaagaggataaacataactatgagacaacagccaaagagtccctgaggcgggttcttcaggagaaaattgaagtggttagaaaactttcagaagttgagcgaagtctgagtaatactgaagatgaatgtacccatctgaaagaaatgaatgaaaggactcaggaagaattaagagaattagccaacaaatataatggagcagttaatgagattaaagatttatctgataaattaaaggtagcagagggaaaacaagaggaaatccaacagaagggacaggctgagaaaaaagaattacaacataaaatagatgaaatggaagaaaaagaacaggagctccaggcaaaaatagaagctttgcaagctgataatgatttcaccaatgaaaggctaacagctttacaagagcacttgctttcaaagagtggcggggactgcacttttattcatcaattcatagaatgccagaagaagctgatcgtcgaagggcatctaaccaaagcggtagaagaaacaaagctttcaaaagaaaatcagacaagagcaaaagaatctgatttttcagatactctgagtccaagcaaggaaaaaagcagtgacgacactacagacgcccaaatggatgagcaagacctaaatgagcctcttgccaaagtgtcccttttaaaagatgacttgcagggtgcacagtcagaaattgaggcaaagcaagaaatacagcatcttcgaaaggaattgatcgaagcccaggagctagctagaacaagtaaacaaaaatgctttgaacttcaagctcttttggaagaagaaagaaaagcctatcgaaatcaagttgaggaatccactaaacaaatacaggttcttcaagcccaattgcagaggttacacatcgatactgagaatctccgggaggagaaggacagtgaaatcacaagtactagagatgaattgcttagtgcccgagatgaaattttgctccttcatcaagcagcagcaaaggttgcctctgagcgggacactgacattgcttctttacaagaagagcttaagaaggtgagagctgagcttgagcggtggcggaaagcagcgtctgaatatgagaaagaaatcacaagtctgcaaaacagttttcagcttagatgtcaacagtgtgaggaccagcagagagaagaagcaacaaggttgcaaggtgaactagagaagttgagaaaggaatggaatgcattggaaaccgaatgccattctctaaaaagggaaaatgttttgctatcatcagaactgcaacggcaagaaaaagaattgcacaattctcagaagcagagtttagagcttaccagtgatctcagcatccttcaaatgtctaggaaagaacttgagaatcaagtgggatccttgaaagaacagcatcttcgggattcagctgatttaaaaactcttctcagtaaggcagaaaaccaagcaaaggatgtgcagaaagagtatgaaaagacacagactgtactctcagaactgaagttgaagtttgaaatgactgagcaggaaaagcagtcaatcacagatgagctcaaacagtgtaaaaacaacctgaagctgctccgagagaaaggaaataataaaccctggccctggatgcccatgttggctgccctggttgcagtaacagccatcgtgctgtacgtgccaggtctggccagagcttctccatgagagcgttccttgagtccgtacaccgtcctccctctagaagctggcatcacactcatgctggggacaaacagaaccattttcttcctctttacctcttaaaacagcagaagtacaagaatacagctgtagggtcattgctttaaattatataaaatgtatctgtctataaagaagatataaaattgtgactttattctactgtaagcaataatttgcttgcaatttttcatgtaatttttaaattagtatgttaagattctgaatattatggtggcctaaagtaggcttcttggtacaccagattatttataacattaaatttatgagtattttactctgaattctgatcaccagataattcatttttctgatttgataactacccaaaccaaacaaccaatacatacatgggaagagaggccctgtgtgctcagtgcctatcagtttgaaatatatacacatatatatattttttacatatttacgccatttttacttgttatgaaaccactgagctattgggaacaagacttagagacaactatttgcgtggatttttttttttttaaggaaaaatacgtttggaaaataaactgttatggtgataatttggggaatatgtgcacgcttgttcagccttaatgtgacttgaagatgtggaggacatcaactttgaaaaactttccatgagagtgtattttcttgagcaaactgaagtatttctgggagcaaaaacatagtaattacacaatttcagtgcagtcaaccaaaatgttgagtcaattggaatgtaatttattaaaccatgtatttaaagagatatttttctttaaaagccaagttactttctcatatacagcattttaggaagcatgattttttttttctatcatctattcctccaagcatgtttaattgaagaaagtattaatatctctttagataagcttgtattgacctaatttggtttatgatgtgtcagagctaattcatgttcagggtgagcgttgtacctaccaacaaatttcctggttgggtatgcaaatggttattttctttttattgttgttaattgggactttctgttaatgaaaagcactattcccaagattaatagtgttctatgcacaatgaagcacctaaaaacactgcttgatattataaatttaaaacacaagtgaaagtttagccatggttttgtgcggcatcatagttatgtcaataaagtttatttaggtcatagaatatcctaaagtatcacatagttaaatttttcagtcagtgaagaccgggagggaatgtcagtgaattggcttgaatgttctgtggcaatccacaggtctagccaaatattgaaataggagtttagggtataatttgccttgtgatgtttggcagtcactgtttatactttaaaggttatattttaagctatttgagattgcttttgggaagatcactagatttatggaggaattagtcacaaatgacttgtagaaaatactgtcatatagttcatttcatcattttctgttgcaggaagccactccaccacagaatgctaatatgccagtggtacccagtacctcttgtatataggttattgcaaatattgttctgaaatgcttaacttcagaattacattttttaaagtaaataattgttttaaatctattttgtaaagatataaagtacaatagaatttctggagtacagattaaactatttgcactaacacacgtgacgtgcatgatttaataaaataactttactctcccta

SEQ ID NO: 178918 - DNA, 4420 bp, Homo sapiens
  Payload ID: 15268
  Gene Symbol: SLMAP
  Gene Name: sarcolemma associated protein
  Uniprot ID: Q14BN4
  ENST ID: ENST00000295952
  CDS Start-End: 206-2641
tttaaaggaggtgatggggcttgcgctggcttgtcttcccacccaagtgaagagttgatgttcactggttatgcttagacaatgtgcagtttgtgttaatttaaaattttgggtgggataggggcataggcttgtgaagggcagtccggatccggaggaactcctctttgtccctggtaggagagacacccccagtctatcctcgatgccgtcagccttggccatcttcacttgccgcccgaactcgcacccgtttcaggagcgtcatgtctacctggacgagcccatcaaaatcggccgctcagtggcccgctgtcgaccagcgcagaataatgccacttttgattgcaaagtgctatcaaggaaccacgctctcgtctggtttgatcacaagacgggcaagttttatcttcaagacactaaaagtagtaatggtacttttataaatagccagagattgagtcgaggctctgaagaaagtccaccatgtgaaattctttccggtgacattatccagtttggagtagacgtgacagagaatacacggaaagttacccatgggtgtattgtttccacaataaaactttttctaccagatggtatggaagcccggctccgctcagatgtcatccatgcaccattaccaagtcctgttgacaaagttgctgctaacactccaagtatgtactctcaggaactattccagctttctcagtatctacaggaggccttacatcgggaacaaatgttggaacagaagttagccacgcttcagcggctactagccatcacccaagaggcttcagataccagttggcaggctttaatagatgaagatagactcttatcacggttagaagttatgggaaaccaattacaggcatgctccaaaaatcaaacagaagatagtttacgaaaggaacttatagcattacaagaggataaacataactatgagacaacagccaaagagtccctgaggcgggttcttcaggagaaaattgaagtggttagaaaactttcagaagttgagcgaagtctgagtaatactgaagatgaatgtacccatctgaaagaaatgaatgaaaggactcaggaagaattaagagaattagccaacaaatataatggagcagttaatgagattaaagatttatctgataaattaaaggtagcagagggaaaacaagaggaaatccaacagaagggacaggctgagaaaaaagaattacaacataaaatagatgaaatggaagaaaaagaacaggagctccaggcaaaaatagaagctttgcaagctgataatgatttcaccaatgaaaggctaacagctttacaagagcacttgctttcaaagagtggcggggactgcacttttattcatcaattcatagaatgccagaagaagctgatcgtcgaagggcatctaaccaaagcggtagaagaaacaaagctttcaaaagaaaatcagacaagagcaaaagaatctgatttttcagatactctgagtccaagcaaggaaaaaagcagtgacgacactacagacgcccaaatggatgagcaagacctaaatgagcctcttgccaaagtgtcccttttaaaagatgacttgcagggtgcacagtcagaaattgaggcaaagcaagaaatacagcatcttcgaaaggaattgatcgaagcccaggagctagctagaacaagtaaacaaaaatgctttgaacttcaagctcttttggaagaagaaagaaaagcctatcgaaatcaagttgaggaatccactaaacaaatacaggttcttcaagcccaattgcagaggttacacatcgatactgagaatctccgggaggagaaggacagtgaaatcacaagtactagagatgaattgcttagtgcccgagatgaaattttgctccttcatcaagcagcagcaaaggttgcctctgagcgggacactgacattgcttctttacaagaagagcttaagaaggtgagagctgagcttgagcggtggcggaaagcagcgtctgaatatgagaaagaaatcacaagtctgcaaaacagttttcagcttagatgtcaacagtgtgaggaccagcagagagaagaagcaacaaggttgcaaggtgaactagagaagttgagaaaggaatggaatgcattggaaaccgaatgccattctctaaaaagggaaaatgttttgctatcatcagaactgcaacggcaagaaaaagaattgcacaattctcagaagcagagtttagagcttaccagtgatctcagcatccttcaaatgtctaggaaagaacttgagaatcaagtgggatccttgaaagaacagcatcttcgggattcagctgatttaaaaactcttctcagtaaggcagaaaaccaagcaaaggatgtgcagaaagagtatgaaaagacacagactgtactctcagaactgaagttgaagtttgaaatgactgagcaggaaaagcagtcaatcacagatgagctcaaacagtgtaaaaacaacctgaagctgctccgagagaaaggaaataataaaccctggccctggatgcccatgttggctgccctggttgcagtaacagccatcgtgctgtacgtgccaggtctggccagagcttctccatgagagcgttccttgagtccgtacaccgtcctccctctagaagctggcatcacactcatgctggggacaaacagaaccattttcttcctctttacctcttaaaacagcagaagtacaagaatacagctgtagggtcattgctttaaattatataaaatgtatctgtctataaagaagatataaaattgtgactttattctactgtaagcaataatttgcttgcaatttttcatgtaatttttaaattagtatgttaagattctgaatattatggtggcctaaagtaggcttcttggtacaccagattatttataacattaaatttatgagtattttactctgaattctgatcaccagataattcatttttctgatttgataactacccaaaccaaacaaccaatacatacatgggaagagaggccctgtgtgctcagtgcctatcagtttgaaatatatacacatatatatattttttacatatttacgccatttttacttgttatgaaaccactgagctattgggaacaagacttagagacaactatttgcgtggatttttttttttttaaggaaaaatacgtttggaaaataaactgttatggtgataatttggggaatatgtgcacgcttgttcagccttaatgtgacttgaagatgtggaggacatcaactttgaaaaactttccatgagagtgtattttcttgagcaaactgaagtatttctgggagcaaaaacatagtaattacacaatttcagtgcagtcaaccaaaatgttgagtcaattggaatgtaatttattaaaccatgtatttaaagagatatttttctttaaaagccaagttactttctcatatacagcattttaggaagcatgattttttttttctatcatctattcctccaagcatgtttaattgaagaaagtattaatatctctttagataagcttgtattgacctaatttggtttatgatgtgtcagagctaattcatgttcagggtgagcgttgtacctaccaacaaatttcctggttgggtatgcaaatggttattttctttttattgttgttaattgggactttctgttaatgaaaagcactattcccaagattaatagtgttctatgcacaatgaagcacctaaaaacactgcttgatattataaatttaaaacacaagtgaaagtttagccatggttttgtgcggcatcatagttatgtcaataaagtttatttaggtcatagaatatcctaaagtatcacatagttaaatttttcagtcagtgaagaccgggagggaatgtcagtgaattggcttgaatgttctgtggcaatccacaggtctagccaaatattgaaataggagtttagggtataatttgccttgtgatgtttggcagtcactgtttatactttaaaggttatattttaagctatttgagattgcttttgggaagatcactagatttatggaggaattagtcacaaatgacttgtagaaaatactgtcatatagttcatttcatcattttctgttgcaggaagccactccaccacagaatgctaatatgccagtggtacccagtacctcttgtatataggttattgcaaatattgttctgaaatgcttaacttcagaattacattttttaaagtaaataattgttttaaatctattttgtaaagatataaagtacaatagaatttctggagtacagattaaactatttgcactaacacacgtgacgtgcatgatttaataaaataactttactctccct

SEQ ID NO: 178919 - DNA, 6749 bp, Homo sapiens
  Payload ID: 15268
  Gene Symbol: SLMAP
  Gene Name: sarcolemma associated protein
  Uniprot ID: Q14BN4
  ENST ID: ENST00000383718
  CDS Start-End: 99-1619
tttgggtgggataggggcataggcttgtgaagggcagtccggatccggaggaactcctctttgtccctggtaggagagacacccccagtctatcctcgatgccgtcagccttggccatcttcacttgccgcccgaactcgcacccgtttcaggagcgtcatgtctacctggacgagcccatcaaaatcggccgctcagtggcccgctgtcgaccagcgcagaataatgccacttttgattgcaaagtgctatcaaggaaccacgctctcgtctggtttgatcacaagacgggcaagttttatcttcaagacactaaaagtagtaatggtacttttataaatagccagagattgagtcgaggctctgaagaaagtccaccatgtgaaattctttccggtgacattatccagtttggagtagacgtgacagagaatacacggaaagttacccatgggtgtattgtttccacaataaaactttttctaccagatggtatggaagcccggctccgctcagatgtcatccatgcaccattaccaagtcctgttgacaaagttgctgctaacactccaagtatgtactctcaggaactattccagctttctcagtatctacaggaggccttacatcgggaacaaatgttggaacagaagttagccacgcttcagcggctactagccatcacccaagaggcttcagataccagttggcaggctttaatagatgaagatagactcttatcacggttagaagttatgggaaaccaattacaggcatgctccaaaaatcaaacagaagatagtttacgaaaggaacttatagcattacaagaggataaacataactatgagacaacagccaaagagtccctgaggcgggttcttcaggagaaaattgaagtggttagaaaactttcagaagttgagcgaagtctgagtaatactgaagatgaatgtacccatctgaaagaaatgaatgaaaggactcaggaagaattaagagaattagccaacaaatataatggagcagttaatgagattaaagatttatctgataaattaaaggtagcagagggaaaacaagaggaaatccaacagaagggacaggctgagaaaaaagaattacaacataaaatagatgaaatggaagaaaaagaacaggagctccaggcaaaaatagaagctttgcaagctgataatgatttcaccaatgaaaggctaacagctttacaagtacggttagaacatcttcaggagaaaactcttaaagaatgcagcagcttggggatacaagttgatgacttcttacctaaaataaatgggagcacagaaaaagagaagctgatcgtcgaagggcatctaaccaaagcggtagaagaaacaaagctttcaaaagaaaatcagacaagagcaaaagaatctgatttttcagatactctgagtccaagcaaggaaaaaagcagtgacgacactacagacgcccaaatggatgagcaagacctaaatgagcctcttgccaaagtgtcccttttaaaaggtactttaacatgtttttatgacatcgtaaaccagggtatcaaatcaccctttgccataaaatctgttctagatattatgtgaagttttaatttttagttaagagattaagataggttctgtaaagtagcagggactaaaaatttaaagttttggtgtttatacccaatatttcaaactattgttgaataatttggatcagtcaagattacgagggacaaagtgttaagtggtagaatatgaaatgcagctgtgttttttgtttacccttgtgtctctaataggaatttattagcgcttttaacataattagaataaggtgaaaatcttaactttcttgaaagactcaccggtttactctgttatcatatggtagcagttgtaaatttccttattttctggtcttcttcatcttctaataaatatccccaggttcttatgacactcttctagaaattttgggctaagaaactttaggtggatggccaggcatggtggctcacgcctgtaatctcagcactttgggaggctgaggcaggtggatcatctgaggtcaggagtttgagaccagcctgaccaacatggagaaaccctgtctctactaaaagtacaagattagccgggtgtggtggcgcgtgcctgtaatctcagctactcgggaggctgaggcaggagaattgcttgaatgcaggaggcagaggttgtggtaagaggtcatgccattgcactccagcctgggcaataagagcaaaactccatctcaaaaaaaaaaatgaaaaaaagaaagaaattttagatgttgataagataagtaatgcatgtaattaactctttgtctcacctctaaacaggaagtacatttcttgatatttacttgtttagaatgaagtgggtagaaaataaatcagcatttataaaaatgtttttaaaataaagttccttggggatagtttactggaaaattgtcaacattcagtctcttttatgttgccttattgtacacaagaaaaattgacatatgttgtaagttcagcccagtgggtttattaaaaatgttggtagtggtgtactaacaccagacagctctctgggatcagagtgacagtagcagcctgtggaaatttctctttgtggaagtgccgatttttctggctggactaatagggaatctccttgtccagaccccgagctttgggattatataaggaaggagcactcttactgatttgtactcttcttaggtgatctttggtgttgataagacatgctttttttctaatgtcataataataaatataagttaatgttggtatgatccagaactctcatctcagaaatgcaataccattattgtgtaaaatgtagttactgatactgaaagaatgtcagaccctatgggcctttatgggaacgtggagaaaaaagaagggaggtaaatgagtaatgaacacacccatacaaaagtagccctctttatggtcttttgcactacagaactctcttttttctttttctttttttctttttgtaggtacatagtaggtgtatatatttatagggtacatgagctgttttggtacaggcattcagtgttacagaaatcttttcaatagccaacttaagattgagtatagtgtttatgattgtgttaattgtattcaactattattagtgcttttgtgatttttgtcagtctgttttagatttgatttttatcccattgcctaccacaatgcaggtattcagtaaaactcagatatttgatgaattaattgataatggacttcttacattaaaattataaagacacaagagcattaggaaagtaacactagccacaaagctaagagccaaagaactctgggttcagtcataggtttgccatttatttgtaatatgtccttggcaaattgcttaactgctctgtgattcagggttttttcatgtattagactggcgaaaaccaactttataggtttattgtgaagattgaatgaaagggtgtgcatggaccacttaccatggtgttgggaacataaaatgttaaccaccataatgaagacactgatcatgatgatgatggtgattgataaaagcaggcctatctgttgaaggactctgagtaactccatattaattgaataagattgtggagttttaaaattatttcctatagtatttaggaacaaggatttgtttgtaatggattttttctaattagtaatgcatttatttgtttgttacttgccagataatcaggaaaaaatatttttaatccatgagtagcaccaaacagtatctataaaagtactcacaatatagcctgggaagtcagactcaaggaacagggaatgaaaggggaaagatgtaggaaaagattggaaaatacaagatgcatgtggagctggcggcctgtgtgcagatgctattagtaattgcttcaggtgccattgatgaagatgggtcagagtttccctaaccttgctttacgttaaggtgaaagaacttctaaaacttttctttacatttctgtatgattgccaacttttttgttaatgaagtagtatctttataaatacctgctgaaagattttgtggcttgattttatttttatgaatttttttacttattttgttttgttttgtttttagagacaggggtcttgctaagttggtcaggttggtcttgaacttctgagctcaagcgttcctctcacctcagcctcccacctcagcttcccaagtagctgggactacaggcatgcaccaccctacccgacttgtttactctttcactttgtttctctttctctctctgtctctctctctttttgcagcttgattttaagaacagactgtcaagtcagtcagtgattggatgtaaagaaaaatcatctaggtagaaggaggcatattttagaagagtctccaagagataattatcatagccctttatggtcattattatttttcttttgtaaagtttctcttgtaagagttttacaaattcttaaaagtgatgtattactggtactttttagaaacatttatgttatgcttgattatgtgtggttatggtttgtatctgtataattaggttcaatagactgacataattttctcttaaaagtataaattactagacaacagtgttgacctttacagctatataaggcagctacatataagtagcctctttattttcctcattcaaactttgtgcctgacttcccgaaccattattttcaagttttttttccccttttttaaaaaatagccaatctttttctttagatttattgtgtacgacttgtcacatttgtcagctaggacaaggaaaataataataaacattcattatgagataaaatgatgatagcagtagtaccttttccctgatatagtaatcatttctatctatttagttacttttaaatgagaaataagttgatcaaaccatgttttctgtatgcttgaaaccatctcccataaaacgttttttaaaattggaattcacttcaaatcatgtctgttgcaaatttgctctgtttggggaaccttgccagggactgcagtggttttaaagtctaataagactgtcgggccggacgtagtggctcatgcctgtattcccaacactatgggaggctgaggcggcctgatcacttgagcccaggagtttgagaccagcctgggcaacatggcaaaaccccatctctacaaaaattagccaggcatggtggtgcatgcctatagtctcagccactcagaaggctaaggtgggaggatcacttgagcccagacggcagaggttgcagtcagcccagatcgtgccactacactctagcctcggtgacagagcaagactctgtctcaaaaacaaaagcaaaaatctatcctctggatttaaggaatttcaaggcaaattagtgatagtacattttttaaaactttgtattttccttgtgcctcaacatccccacaaacaggccgtgaacactctgccctggcaaccagatgcaccagtatgataaggctggtccctgccacaagttccccttcataaccttccctggcagtgccctagtgaaatttaacgaaatcacctcatgccttttgtttgtgtatcctgacccccaatacaagcatttgcctacaggtcctcactctatcagttatacctatttggctgaacccattctttgggcttctcccatatggttccctgcatggtgtaccttgcctccctctctaggacctttgagtataataaatcctttaatttcatttacctctccaagtataattcccacagctatgttggagtgatccttgaggaccccacagggagacttactccctcccccatttaccacacagagagttatagatgataagctgattattggtggttgttgccatcagcagtcaaagaaaagagaatgcccagggtttttttgtttgtttgtttgtttcagaggatagagaagaaaggcattttgagtttcatgggacaagagtcatttgaaatgactctataaatagtgtgtcttaccatatgtgatatattcagtgattaagaaaaactaaacctaaatctgatcaagactctagctccaactgccagtttgcaggacatacaaagaactaggcacatattctaaatgatgtgatggggatacaaccagcaaaatccagaatgtggaagattctacaggacatacaacccagtttctttagcaattaaattagaaggggaaaaaaaggaaaggggatgggggaaatcctataaattaaaagagatttaagagttatgtcggccaggcgtggtggctcacacctgtaatcctagcattttgggaggccaaagtgggcagatcacttgaggtcaggagttcgaacctagcttggccatcatggtgaaaccctgtctctactaaaaatacaaaaaattagctgggcttggtggtgcacacctgtaatcccagctacttgggaggctgaggcaggaaaatcgcttgaacccgggaggcagaggttgcagtgaaccaagatcatgccaccacactccagcctgggtgacacagcgagactccatctcaaaaagaaaaaaagagagagagatgtcaactaaatataatgtatgaaccttgtatgaatcttcattcaaacaattcaactgtaaaataaatttggaacaatggaaaattttaa

SEQ ID NO: 178920 - DNA, 1570 bp, Homo sapiens
  Payload ID: 15268
  Gene Symbol: SLMAP
  Gene Name: sarcolemma associated protein
  ENST ID: ENST00000416658
  CDS Start-End: 1-1300
acaggctgagaaaaaagaattacaacataaaatagatgaaatggaagaaaaagaacaggagctccaggcaaaaatagaagctttgcaagctgataatgatttcaccaatgaaaggctaacagctttacaagaaaatcagacaagagcaaaagaatctgatttttcagatactctgagtccaagcaaggaaaaaagcagtgacgacactacagacgcccaaatggatgagcaagacctaaatgagcctcttgccaaagtgtcccttttaaaagatgacttgcagggtgcacagtcagaaattgaggcaaagcaagaaatacagcatcttcgaaaggaattgatcgaagcccaggagctagctagaacaagtaaacaaaaatgctttgaacttcaagctcttttggaagaagaaagaaaagcctatcgaaatcaagttgaggaatccactaaacaaatacaggttcttcaagcccaattgcagaggttacacatcgatactgagaatctccgggaggagaaggacagtgaaatcacaagtactagagatgaattgcttagtgcccgagatgaaattttgctccttcatcaagcagcagcaaaggttgcctctgagcgggacactgacattgcttctttacaagaagagcttaagaaggtgagagctgagcttgagcggtggcggaaagcagcgtctgaatatgagaaagaaatcacaagtctgcaaaacagttttcagcttagatgtcaacagtgtgaggaccagcagagagaagaagcaacaaggttgcaaggtgaactagagaagttgagaaaggaatggaatgcattggaaaccgaatgccattctctaaaaagggaaaatgttttgctatcatcagaactgcaacggcaagaaaaagaattgcacaattctcagaagcagagtttagagcttaccagtgatctcagcatccttcaaatgtctaggaaagaacttgagaatcaagtgggatccttgaaagaacagcatcttcgggattcagctgatttaaaaactcttctcagtaaggcagaaaaccaagcaaaggatgtgcagaaagagtatgaaaagacacagactgtactctcagaactgaagttgaagtttgaaatgactgagcaggaaaagcagtcaatcacagatgagctcaaacagtgtaaaaacaacctgaagctgctccgagagaaaggaaataatccttccatattacaacccgtcccagccgtattcatcggcctattcctggctttcctgttttggtgtttcggtccattgtggtagagaaagaaaccctggccctggatgcccatgttggctgccctggttgcagtaacagccatcgtgctgtacgtgccaggtctggccagagcttctccatgagagcgttccttgagtccgtacaccgtcctccctctagaagctggcatcacactcatgctggggacaaacagaaccattttcttcctctttacctcttaaaacagcagaagtacaagaatacagctgtagggtcattgctttaaattatataaaatgtatctgtctataaag

SEQ ID NO: 178921 - DNA, 2274 bp, Homo sapiens
  Payload ID: 15268
  Gene Symbol: SLMAP
  Gene Name: sarcolemma associated protein
  ENST ID: ENST00000438794
  CDS Start-End: 1-949
agggcatctaaccaaagcggtagaagaaacaaagctttcaaaagaaaatcagacaagagcaaaagaatctgatttttcagatactctgagtccaagcaaggaaaaaagcagtgacgacactacagacgcccaaatggatgagcaagacctaaatgagcctcttgccaaagtgtcccttttaaaagctcttttggaagaagaaagaaaagcctatcgaaatcaagttgaggaatccactaaacaaatacaggttcttcaagcccaattgcagaggttacacatcgatactgagaatctccgggaggagaaggacagtgaaatcacaagtactagagatgaattgcttagtgcccgagatgaaattttgctccttcatcaagcagcagcaaaggttgcctctgagcgggacactgacattgcttctttacaagaagagcttaagaaggtgagagctgagcttgagcggtggcggaaagcagcgtctgaatatgagaaagaaatcacaagtctgcaaaacagttttcagcttagatgtcaacagtgtgaggaccagcagagagaagaagcaacaaggttgcaaggtgaactagagaagttgagaaaggaatggaatgcattggaaaccgaatgccattctctaaaaagggaaaatgttttgctatcatcagaactgcaacggcaagaaaaagaattgcacaattctcagaagcagagtttagagcttaccagtgatctcagcatccttcaaatgtctaggaaagaacttgagaatcaagtgggatccttgaaagaacagcatcttcgggattcagctgatttaaaaactcttctcagtaaggcagaaaaccaagcaaaggatgtgcagaaagaggtaaagcgaaaagacattatgagcccaattatggttggacttaaagccaaaagcaaatcggatatccatgctagttagaaataaagggaagcagaagtcacattacctgtcacaaaattgatacttggaacatctctgcttggtgatttctagctgcatatcatggtccatatgtagagaattcttcagtagggttggtctcaaaaatataatatacaaaactacattttaatttttctctaccagttacttatatgagaaatcctttgtaccaggtctcttgatctattgtttaactttcaaagagagtatcgtatgtaacttagcatacttttggaaagcaaactgaggccatactctaatgctgtctgaacccctcaggtaaatatggcctgaaaagttacttaaaattcacctcatagccaggcagccagccaaacacatgttctgtggccttttactttcttcctcccacccccttttcaccttattcataaatgtgcatgctcacttttcatgtcattctgcttaaaaccttgagttgagtggctttttaaaaatttgtgttgaagtcataacagttgattttggaacagaaaccctacccagtttcttcctgagcaagagaggtgcatttcacttcccaaagccttgaagttgacagcagggcagtaagagctgtcttcagtcctgctggcctcataccactccctgcattgactcctggccagctcggggaatggagaagcctgatacaacttgatctacagattagggaccaccccagttgtagactttcttaaaaggattctttatgaattagaaggaagttgaagacaactctttgtctttaataatgaactttcccaaagttgtttctagaagatctgcttaatcaatgcagtttttctttgcacttttctttccttgtagtgtcctgaatttggcaatgattgttcttctgtcttcatgtttgttcctaatgaaaaaatactgtaacattttttattttcttgcggacatactgattttgtgatgtgttcgtttttaccttactaaagatatgtgttttagaagaaatctcattttatttggttggaacacaaattttgtgccaaagtaaatatcttagtatttaatactgtaagcactttgtgtccttccagtccatatgccataattctttcaaactctgggaagaatgctgtggttggaagattattctgttgtatgttactatgaacgcattagtcattttgttgcattacttgtttgcctgtttttggtcactgagtaatcggtgcaagatgctttaactgtttccacaaatggcagtggcatgttgtcacagcatctaaattgttgatagtcttggattgcattaaatgcagcacatttaaaaa

SEQ ID NO: 178922 - DNA, 4132 bp, Homo sapiens
  Payload ID: 15268
  Gene Symbol: SLMAP
  Gene Name: sarcolemma associated protein
  Uniprot ID: Q14BN4
  ENST ID: ENST00000428312
  CDS Start-End: 95-2581
ggtgggataggggcataggcttgtgaagggcagtccggatccggaggaactcctctttgtccctggtaggagagacacccccagtctatcctcgatgccgtcagccttggccatcttcacttgccgcccgaactcgcacccgtttcaggagcgtcatgtctacctggacgagcccatcaaaatcggccgctcagtggcccgctgtcgaccagcgcagaataatgccacttttgattgcaaagtgctatcaaggaaccacgctctcgtctggtttgatcacaagacgggcaagttttatcttcaagacactaaaagtagtaatggtacttttataaatagccagagattgagtcgaggctctgaagaaagtccaccatgtgaaattctttccggtgacattatccagtttggagtagacgtgacagagaatacacggaaagttacccatgggtgtattgtttccacaataaaactttttctaccagatggtatggaagcccggctccgctcagatgtcatccatgcaccattaccaagtcctgttgacaaagttgctgctaacactccaagtatgtactctcaggaactattccagctttctcagtatctacaggaggccttacatcgggaacaaatgttggaacagaagttagccacgcttcagcggctactagccatcacccaagaggcttcagataccagttggcaggctttaatagatgaagatagactcttatcacggttagaagttatgggaaaccaattacaggcatgctccaaaaatcaaacagaagatagtttacgaaaggaacttatagcattacaagaggataaacataactatgagacaacagccaaagagtccctgaggcgggttcttcaggagaaaattgaagtggttagaaaactttcagaagttgagcgaagtctgagtaatactgaagatgaatgtacccatctgaaagaaatgaatgaaaggactcaggaagaattaagagaattagccaacaaatataatggagcagttaatgagattaaagatttatctgataaattaaaggtagcagagggaaaacaagaggaaatccaacagaagggacaggctgagaaaaaagaattacaacataaaatagatgaaatggaagaaaaagaacaggagctccaggcaaaaatagaagctttgcaagctgataatgatttcaccaatgaaaggctaacagctttacaagtacggttagaacatcttcaggagaaaactcttaaagaatgcagcagcttggagcacttgctttcaaagagtggcggggactgcacttttattcatcaattcatagaatgccagaagaagctgatcgtcgaagggcatctaaccaaagcggtagaagaaacaaagctttcaaaagaaaatcagacaagagcaaaagaatctgatttttcagatactctgagtccaagcaaggaaaaaagcagtgacgacactacagacgcccaaatggatgagcaagacctaaatgagcctcttgccaaagtgtcccttttaaaagatgacttgcagggtgcacagtcagaaattgaggcaaagcaagaaatacagcatcttcgaaaggaattgatcgaagcccaggagctagctagaacaagtaaacaaaaatgctttgaacttcaagctcttttggaagaagaaagaaaagcctatcgaaatcaagttgaggaatccactaaacaaatacaggttcttcaagcccaattgcagaggttacacatcgatactgagaatctccgggaggagaaggacagtgaaatcacaagtactagagatgaattgcttagtgcccgagatgaaattttgctccttcatcaagcagcagcaaaggttgcctctgagcgggacactgacattgcttctttacaagaagagcttaagaaggtgagagctgagcttgagcggtggcggaaagcagcgtctgaatatgagaaagaaatcacaagtctgcaaaacagttttcagcttagatgtcaacagtgtgaggaccagcagagagaagaagcaacaaggttgcaaggtgaactagagaagttgagaaaggaatggaatgcattggaaaccgaatgccattctctaaaaagggaaaatgttttgctatcatcagaactgcaacggcaagaaaaagaattgcacaattctcagaagcagagtttagagcttaccagtgatctcagcatccttcaaatgtctaggaaagaacttgagaatcaagtgggatccttgaaagaacagcatcttcgggattcagctgatttaaaaactcttctcagtaaggcagaaaaccaagcaaaggatgtgcagaaagagtatgaaaagacacagactgtactctcagaactgaagttgaagtttgaaatgactgagcaggaaaagcagtcaatcacagatgagctcaaacagtgtaaaaacaacctgaagctgctccgagagaaaggaaataataaaccctggccctggatgcccatgttggctgccctggttgcagtaacagccatcgtgctgtacgtgccaggtctggccagagcttctccatgagagcgttccttgagtccgtacaccgtcctccctctagaagctggcatcacactcatgctggggacaaacagaaccattttcttcctctttacctcttaaaacagcagaagtacaagaatacagctgtagggtcattgctttaaattatataaaatgtatctgtctataaagaagatataaaattgtgactttattctactgtaagcaataatttgcttgcaatttttcatgtaatttttaaattagtatgttaagattctgaatattatggtggcctaaagtaggcttcttggtacaccagattatttataacattaaatttatgagtattttactctgaattctgatcaccagataattcatttttctgatttgataactacccaaaccaaacaaccaatacatacatgggaagagaggccctgtgtgctcagtgcctatcagtttgaaatatatacacatatatatattttttacatatttacgccatttttacttgttatgaaaccactgagctattgggaacaagacttagagacaactatttgcgtggatttttttttttttaaggaaaaatacgtttggaaaataaactgttatggtgataatttggggaatatgtgcacgcttgttcagccttaatgtgacttgaagatgtggaggacatcaactttgaaaaactttccatgagagtgtattttcttgagcaaactgaagtatttctgggagcaaaaacatagtaattacacaatttcagtgcagtcaaccaaaatgttgagtcaattggaatgtaatttattaaaccatgtatttaaagagatatttttctttaaaagccaagttactttctcatatacagcattttaggaagcatgattttttttttctatcatctattcctccaagcatgtttaattgaagaaagtattaatatctctttagataagcttgtattgacctaatttggtttatgatgtgtcagagctaattcatgttcagggtgagcgttgtacctaccaacaaatttcctggttgggtatgcaaatggttattttctttttattgttgttaattgggactttctgttaatgaaaagcactattcccaagattaatagtgttctatgcacaatgaagcacctaaaaacactgcttgatattataaatttaaaacacaagtgaaagtttagccatggttttgtgcggcatcatagttatgtcaataaagtttatttaggtcatagaatatcctaaagtatcacatagttaaatttttcagtcagtgaagaccgggagggaatgtcagtgaattggcttgaatgttctgtggcaatccacaggtctagccaaatattgaaataggagtttagggtataatttgccttgtgatgtttggcagtcactgtttatactttaaaggttatattttaagctatttgagattgcttttgggaagatcactagatttatggaggaattagtcacaaatgacttgtagaaaatactgtcatatagttcatttcatcattttctgttgcaggaagccactcca

SEQ ID NO: 178923 - DNA, 3066 bp, Homo sapiens
  Payload ID: 15268
  Gene Symbol: SLMAP
  Gene Name: sarcolemma associated protein
  ENST ID: ENST00000417128
  CDS Start-End: 1-1229
agaagctgatcgtcgaagggcatctaaccaaagcggtagaagaaacaaagctttcaaaagaaaatcagacaagagcaaaagaatctgatttttcagatactctgagtccaagcaaggaaaaaagcagtgacgacactacagacgcccaaatggatgagcaagacctaaatgagcctcttgccaaagtgtcccttttaaaagatgacttgcagggtgcacagtcagaaattgaggcaaagcaagaaatacagcatcttcgaaaggaattgatcgaagcccaggagctagctagaacaagtaaacaaaaatgctttgaacttcaagctcttttggaagaagaaagaaaagcctatcgaaatcaagttgaggaatccactaaacaaatacaggttcttcaagcccaattgcagaggttacacatcgatactgagaatctccgggaggagaaggacagtgaaatcacaagtactagagatgaattgcttagtgcccgagatgaaattttgctccttcatcaagcagcagcaaaggttgcctctgagcgggacactgacattgcttctttacaagaagagcttaagaaggtgagagctgagcttgagcggtggcggaaagcagcgtctgaatatgagaaagaaatcacaagtctgcaaaacagttttcagcttagatgtcaacagtgtgaggaccagcagagagaagaagcaacaaggttgcaaggtgaactagagaagttgagaaaggaatggaatgcattggaaaccgaatgccattctctaaaaagggaaaatgttttgctatcatcagaactgcaacggcaagaaaaagaattgcacaattctcagaagcagagtttagagcttaccagtgatctcagcatccttcaaatgtctaggaaagaacttgagaatcaagtgggatccttgaaagaacagcatcttcgggattcagctgatttaaaaactcttctcagtaaggcagaaaaccaagcaaaggatgtgcagaaagagtatgaaaagacacagactgtactctcagaactgaagttgaagtttgaaatgactgagcaggaaaagcagtcaatcacagatgagctcaaacagtgtaaaaacaacctgaagctgctccgagagaaaggaaataatccttccatattacaacccgtcccagccgtattcatcggcctattcctggctttcctgttttggtgtttcggtccattgtggtagagaaagaaaccctggccctggatgcccatgttggctgccctggttgcagtaacagccatcgtgctgtacgtgccaggtctggccagagcttctccatgagagcgttccttgagtccgtacaccgtcctccctctagaagctggcatcacactcatgctggggacaaacagaaccattttcttcctctttacctcttaaaacagcagaagtacaagaatacagctgtagggtcattgctttaaattatataaaatgtatctgtctataaagaagatataaaattgtgactttattctactgtaagcaataatttgcttgcaatttttcatgtaatttttaaattagtatgttaagattctgaatattatggtggcctaaagtaggcttcttggtacaccagattatttataacattaaatttatgagtattttactctgaattctgatcaccagataattcatttttctgatttgataactacccaaaccaaacaaccaatacatacatgggaagagaggccctgtgtgctcagtgcctatcagtttgaaatatatacacatatatatattttttacatatttacgccatttttacttgttatgaaaccactgagctattgggaacaagacttagagacaactatttgcgtggatttttttttttttaaggaaaaatacgtttggaaaataaactgttatggtgataatttggggaatatgtgcacgcttgttcagccttaatgtgacttgaagatgtggaggacatcaactttgaaaaactttccatgagagtgtattttcttgagcaaactgaagtatttctgggagcaaaaacatagtaattacacaatttcagtgcagtcaaccaaaatgttgagtcaattggaatgtaatttattaaaccatgtatttaaagagatatttttctttaaaagccaagttactttctcatatacagcattttaggaagcatgattttttttttctatcatctattcctccaagcatgtttaattgaagaaagtattaatatctctttagataagcttgtattgacctaatttggtttatgatgtgtcagagctaattcatgttcagggtgagcgttgtacctaccaacaaatttcctggttgggtatgcaaatggttattttctttttattgttgttaattgggactttctgttaatgaaaagcactattcccaagattaatagtgttctatgcacaatgaagcacctaaaaacactgcttgatattataaatttaaaacacaagtgaaagtttagccatggttttgtgcggcatcatagttatgtcaataaagtttatttaggtcatagaatatcctaaagtatcacatagttaaatttttcagtcagtgaagaccgggagggaatgtcagtgaattggcttgaatgttctgtggcaatccacaggtctagccaaatattgaaataggagtttagggtataatttgccttgtgatgtttggcagtcactgtttatactttaaaggttatattttaagctatttgagattgcttttgggaagatcactagatttatggaggaattagtcacaaatgacttgtagaaaatactgtcatatagttcatttcatcattttctgttgcaggaagccactccaccacagaatgctaatatgccagtggtacccagtacctcttgtatataggttattgcaaatattgttctgaaatgcttaacttcagaattacattttttaaagtaaataattgttttaaatctattttgtaaagatataaagtacaatagaatttctggagtacagattaaactatttgcactaacac

SEQ ID NO: 178924 - DNA, 4027 bp, Homo sapiens
  Payload ID: 15268
  Gene Symbol: SLMAP
  Gene Name: sarcolemma associated protein
  Uniprot ID: Q14BN4
  ENST ID: ENST00000449503
  CDS Start-End: 95-2467
ggtgggataggggcataggcttgtgaagggcagtccggatccggaggaactcctctttgtccctggtaggagagacacccccagtctatcctcgatgccgtcagccttggccatcttcacttgccgcccgaactcgcacccgtttcaggagcgtcatgtctacctggacgagcccatcaaaatcggccgctcagtggcccgctgtcgaccagcgcagaataatgccacttttgattgcaaagtgctatcaaggaaccacgctctcgtctggtttgatcacaagacgggcaagttttatcttcaagacactaaaagtagtaatggtacttttataaatagccagagattgagtcgaggctctgaagaaagtccaccatgtgaaattctttccggtgacattatccagtttggagtagacgtgacagagaatacacggaaagttacccatgggtgtattgtttccacaataaaactttttctaccagatggtatggaagcccggctccgctcagatgtcatccatgcaccattaccaagtcctgttgacaaagttgctgctaacactccaagtatgtactctcaggaactattccagctttctcagtatctacaggaggccttacatcgggaacaaatgttggaacagaagttagccacgcttcagcggctactagccatcacccaagaggcttcagataccagttggcaggctttaatagatgaagatagactcttatcacggttagaagttatgggaaaccaattacaggcatgctccaaaaatcaaacagaagatagtttacgaaaggaacttatagcattacaagaggataaacataactatgagacaacagccaaagagtccctgaggcgggttcttcaggagaaaattgaagtggttagaaaactttcagaagttgagcgaagtctgagtaatactgaagatgaatgtacccatctgaaagaaatgaatgaaaggactcaggaagaattaagagaattagccaacaaatataatggagcagttaatgagattaaagatttatctgataaattaaaggtagcagagggaaaacaagaggaaatccaacagaagggacaggctgagaaaaaagaattacaacataaaatagatgaaatggaagaaaaagaacaggagctccaggcaaaaatagaagctttgcaagctgataatgatttcaccaatgaaaggctaacagctttacaagagaagctgatcgtcgaagggcatctaaccaaagcggtagaagaaacaaagctttcaaaagaaaatcagacaagagcaaaagaatctgatttttcagatactctgagtccaagcaaggaaaaaagcagtgacgacactacagacgcccaaatggatgagcaagacctaaatgagcctcttgccaaagtgtcccttttaaaagatgacttgcagggtgcacagtcagaaattgaggcaaagcaagaaatacagcatcttcgaaaggaattgatcgaagcccaggagctagctagaacaagtaaacaaaaatgctttgaacttcaagctcttttggaagaagaaagaaaagcctatcgaaatcaagttgaggaatccactaaacaaatacaggttcttcaagcccaattgcagaggttacacatcgatactgagaatctccgggaggagaaggacagtgaaatcacaagtactagagatgaattgcttagtgcccgagatgaaattttgctccttcatcaagcagcagcaaaggttgcctctgagcgggacactgacattgcttctttacaagaagagcttaagaaggtgagagctgagcttgagcggtggcggaaagcagcgtctgaatatgagaaagaaatcacaagtctgcaaaacagttttcagcttagatgtcaacagtgtgaggaccagcagagagaagaagcaacaaggttgcaaggtgaactagagaagttgagaaaggaatggaatgcattggaaaccgaatgccattctctaaaaagggaaaatgttttgctatcatcagaactgcaacggcaagaaaaagaattgcacaattctcagaagcagagtttagagcttaccagtgatctcagcatccttcaaatgtctaggaaagaacttgagaatcaagtgggatccttgaaagaacagcatcttcgggattcagctgatttaaaaactcttctcagtaaggcagaaaaccaagcaaaggatgtgcagaaagagtatgaaaagacacagactgtactctcagaactgaagttgaagtttgaaatgactgagcaggaaaagcagtcaatcacagatgagctcaaacagtgtaaaaacaacctgaagctgctccgagagaaaggaaataataaaccctggccctggatgcccatgttggctgccctggttgcagtaacagccatcgtgctgtacgtgccaggtctggccagagcttctccatgagagcgttccttgagtccgtacaccgtcctccctctagaagctggcatcacactcatgctggggacaaacagaaccattttcttcctctttacctcttaaaacagcagaagtacaagaatacagctgtagggtcattgctttaaattatataaaatgtatctgtctataaagaagatataaaattgtgactttattctactgtaagcaataatttgcttgcaatttttcatgtaatttttaaattagtatgttaagattctgaatattatggtggcctaaagtaggcttcttggtacaccagattatttataacattaaatttatgagtattttactctgaattctgatcaccagataattcatttttctgatttgataactacccaaaccaaacaaccaatacatacatgggaagagaggccctgtgtgctcagtgcctatcagtttgaaatatatacacatatatatattttttacatatttacgccatttttacttgttatgaaaccactgagctattgggaacaagacttagagacaactatttgcgtggatttttttttttttaaggaaaaatacgtttggaaaataaactgttatggtgataatttggggaatatgtgcacgcttgttcagccttaatgtgacttgaagatgtggaggacatcaactttgaaaaactttccatgagagtgtattttcttgagcaaactgaagtatttctgggagcaaaaacatagtaattacacaatttcagtgcagtcaaccaaaatgttgagtcaattggaatgtaatttattaaaccatgtatttaaagagatatttttctttaaaagccaagttactttctcatatacagcattttaggaagcatgattttttttttctatcatctattcctccaagcatgtttaattgaagaaagtattaatatctctttagataagcttgtattgacctaatttggtttatgatgtgtcagagctaattcatgttcagggtgagcgttgtacctaccaacaaatttcctggttgggtatgcaaatggttattttctttttattgttgttaattgggactttctgttaatgaaaagcactattcccaagattaatagtgttctatgcacaatgaagcacctaaaaacactgcttgatattataaatttaaaacacaagtgaaagtttagccatggttttgtgcggcatcatagttatgtcaataaagtttatttaggtcatagaatatcctaaagtatcacatagttaaatttttcagtcagtgaagaccgggagggaatgtcagtgaattggcttgaatgttctgtggcaatccacaggtctagccaaatattgaaataggagtttagggtataatttgccttgtgatgtttggcagtcactgtttatactttaaaggttatattttaagctatttgagattgcttttgggaagatcactagatttatggaggaattagtcacaaatgacttgtagaaaatactgtcatatagttcatttcatcattttctgttgcaggaagccactccaccacagaat

SEQ ID NO: 178925 - DNA, 565 bp, Homo sapiens
  Payload ID: 15268
  Gene Symbol: SLMAP
  Gene Name: sarcolemma associated protein
  ENST ID: ENST00000461354
  CDS Start-End: 261-565
agcattccattttggacaagggtggtgaagaagtaagagattcagtgacctgacctattttaaaagtactttgcgtacctgtagattttgagcattcatagcctgaagcagttttattgatataagatatttaactgtaataagattttacttttatttttttcttggtagaaaatcagacaagagcaaaagaatctgatttttcagatactctgagtccaagcaaggaaaaaagcagtgacgacactacagacgcccaaatggatgagcaagacctaaatgagcctcttgccaaagtgtcccttttaaaagatgacttgcagggtgcacagtcagaaattgaggcaaagcaagaaatacagcatcttcgaaaggaattgatcgaagcccaggagctagctagaacaagtaaacaaaaatgctttgaacttcaagctcttttggaagaagaaagaaaagcctatcgaaatcaagttgaggaatccactaaacaaatacaggttcttcaagcccaattgcagaggttacacatcgatactgagaatctccgggaggagaaggacag

SEQ ID NO: 178926 - DNA, 1305 bp, Homo sapiens
  Payload ID: 15268
  Gene Symbol: SLMAP
  Gene Name: sarcolemma associated protein
  ENST ID: ENST00000494088
  CDS Start-End: 152-1108
ataatttaatatgagctacgtgtaataaccagcattccattttggacaagggtggtgaagaaaaaatcagacaagagcaaaagaatctgatttttcagatactctgagtccaagcaaggaaaaaagcagtgacgacactacagacgcccaaatggatgagcaagacctaaatgagcctcttgccaaagtgtcccttttaaaagctcttttggaagaagaaagaaaagcctatcgaaatcaagttgaggaatccactaaacaaatacaggttcttcaagcccaattgcagaggttacacatcgatactgagaatctccgggaggagaaggacagtgaaatcacaagtactagagatgaattgcttagtgcccgagatgaaattttgctccttcatcaagcagcagcaaaggttgcctctgagcgggacactgacattgcttctttacaagaagagcttaagaaggtgagagctgagcttgagcggtggcggaaagcagcgtctgaatatgagaaagaaatcacaagtctgcaaaacagttttcagcttagatgtcaacagtgtgaggaccagcagagagaagaagcaacaaggttgcaaggtgaactagagaagttgagaaaggaatggaatgcattggaaaccgaatgccattctctaaaaagggaaaatgttttgctatcatcagaactgcaacggcaagaaaaagaattgcacaattctcagaagcagagtttagagcttaccagtgatctcagcatccttcaaatgtctaggaaagaacttgagaatcaagtgggatccttgaaagaacagcatcttcgggattcagctgatttaaaaactcttctcagtaaggcagaaaaccaagcaaaggatgtgcagaaagagtatgaaaagacacagactgtactctcagaactgaagttgaagtttgaaatgactgagcaggaaaagcagtcaatcacagatgagctcaaacagtgtaaaaacaacctgaagctgctccgagagaaaggaaataatccttccatattacaacccgtcccagccgtattcatcggcctattcctggctttcctgttttggtgtttcggtccattgtggtagagaaagaaaccctggccctggatgcccatgttggctgccctggttgcagtaacagccatcgtgctgtacgtgccaggtctggccagagcttctccatgagagcgttccttgagtccgtacaccgtcctccctctagaagctggcatcacactcatgctggggacaaacagaaccattttcttcctctttacctctta

SEQ ID NO: 178927 - DNA, 1383 bp, Homo sapiens
  Payload ID: 15268
  Gene Symbol: SLMAP
  Gene Name: sarcolemma associated protein
  ENST ID: ENST00000495364
  CDS Start-End: 223-1311
gtttccagttggcaagtggacagccttgaacaaaagccccagccctcagcaaagcagacatgatccacattataatttaatatgagctacgtgtaataaccagcattccattttggacaagggtggtgaagaaaaaatcagacaagagcaaaagaatctgatttttcagatactctgagtccaagcaaggaaaaaagcagtgacgacactacagacgcccaaatggatgagcaagacctaaatgagcctcttgccaaagtgtcccttttaaaagatgacttgcagggtgcacagtcagaaattgaggcaaagcaagaaatacagcatcttcgaaaggaattgatcgaagcccaggagctagctagaacaagtaaacaaaaatgctttgaacttcaagctcttttggaagaagaaagaaaagcctatcgaaatcaagttgaggaatccactaaacaaatacaggttcttcaagcccaattgcagaggttacacatcgatactgagaatctccgggaggagaaggacagtgaaatcacaagtactagagatgaattgcttagtgcccgagatgaaattttgctccttcatcaagcagcagcaaaggttgcctctgagcgggacactgacattgcttctttacaagaagagcttaagaaggtgagagctgagcttgagcggtggcggaaagcagcgtctgaatatgagaaagaaatcacaagtctgcaaaacagttttcagcttagatgtcaacagtgtgaggaccagcagagagaagaagcaacaaggttgcaaggtgaactagagaagttgagaaaggaatggaatgcattggaaaccgaatgccattctctaaaaagggaaaatgttttgctatcatcagaactgcaacggcaagaaaaagaattgcacaattctcagaagcagagtttagagcttaccagtgatctcagcatccttcaaatgtctaggaaagaacttgagaatcaagtgggatccttgaaagaacagcatcttcgggattcagctgatttaaaaactcttctcagtaaggcagaaaaccaagcaaaggatgtgcagaaagagtatgaaaagacacagactgtactctcagaactgaagttgaagtttgaaatgactgagcaggaaaagcagtcaatcacagatgagctcaaacagtgtaaaaacaacctgaagctgctccgagagaaaggaaataataaaccctggccctggatgcccatgttggctgccctggttgcagtaacagccatcgtgctgtacgtgccaggtctggccagagcttctccatgagagcgttccttgagtccgtacaccgtcctccctctagaagctggcatcacactcatgctggggacaaacaga

SEQ ID NO: 178928 - DNA, 511 bp, Homo sapiens
  Payload ID: 15268
  Gene Symbol: SLMAP
  Gene Name: sarcolemma associated protein
  ENST ID: ENST00000465203
  CDS Start-End: 1-511
gaaaggactcaggaagaattaagagaattagccaacaaatataatggagcagttaatgagattaaagatttatctgataaattaaaggtagcagagggaaaacaagaggaaatccaacagaagggacaggctgagaaaaaagaattacaacataaaatagatgaaatggaagaaaaagaacaggagctccaggcaaaaatagaagctttgcaagctgataatgatttcaccaatgaaaggctaacagctttacaagggatacaagttgatgacttcttacctaaaataaatgggagcacagaaaaagagcacttgctttcaaagagtggcggggactgcacttttattcatcaattcatagaatgccagaagaagctgatcgtcgaagggcatctaaccaaagcggtagaagaaacaaagctttcaaaagaaaatcagacaagagcaaaagaatctgatttttcagatactctgagtccaagcaaggaaaaaagcagtgacgacactacag

SEQ ID NO: 178929 - DNA, 587 bp, Homo sapiens
  Payload ID: 15268
  Gene Symbol: SLMAP
  Gene Name: sarcolemma associated protein
  ENST ID: ENST00000466255
  CDS Start-End: 260-587
gcattccattttggacaagggtggtgaagaagtaagagattcagtgacctgacctattttaaaagtactttgcgtacctgtagattttgagcattcatagcctgaagcagttttattgatataagatatttaactgtaataagattttacttttatttttttcttggtagaaaatcagacaagagcaaaagaatctgatttttcagatactctgagtccaagcaaggaaaaaagcagtgacgacactacagacgcccaaatggatgagcaagacctaaatgagcctcttgccaaagtgtcccttttaaaagctcttttggaagaagaaagaaaagcctatcgaaatcaagttgaggaatccactaaacaaatacaggttcttcaagcccaattgcagaggttacacatcgatactgagaatctccgggaggagaaggacagtgaaatcacaagtactagagatgaattgcttagtgcccgagatgaaattttgctccttcatcaagcagcagcaaaggttgcctctgagcgggacactgacattgcttctttacaagaagagcttaagaaggtgagagctgagcttg

SEQ ID NO: 178930 - DNA, 855 bp, Homo sapiens
  Payload ID: 15268
  Gene Symbol: SLMAP
  Gene Name: sarcolemma associated protein
  ENST ID: ENST00000460223
  CDS Start-End: 1-197
aagaacttgagaatcaagtgggatccttgaaagaacagcatcttcgggattcagctgatttaaaaactcttctcagtaaggcagaaaaccaagcaaaggatgtgcagaaagagccttccatattacaacccgtcccagccgtattcatcggcctattcctggctttcctgttttggtgtttcggtccattgtggtagagaaagaaaccctggccctggatgcccatgttggctgccctggttgcagtaacagccatcgtgctgtacgtgccaggtctggccagagcttctccatgagagcgttccttgagtccgtacaccgtcctccctctagaagctggcatcacactcatgctggggacaaacagaaccattttcttcctctttacctcttaaaacagcagaagtacaagaatacagctgtagggtcattgctttaaattatataaaatgtatctgtctataaagaagatataaaattgtgactttattctactgtaagcaataatttgcttgcaatttttcatgtaatttttaaattagtatgttaagattctgaatattatggtggcctaaagtaggcttcttggtacaccagattatttataacattaaatttatgagtattttactctgaattctgatcaccagataattcatttttctgatttgataactacccaaaccaaacaaccaatacatacatgggaagagaggccctgtgtgctcagtgcctatcagtttgaaatatatacacatatatatattttttacatatttacgccatttttacttgttatgaaaccactgagctattgggaacaagacttagagacaactatttgcgtggattttt

SEQ ID NO: 178931 - DNA, 722 bp, Homo sapiens
  Payload ID: 15269
  Gene Symbol: SLN
  Gene Name: sarcolipin
  Uniprot ID: O00631
  ENST ID: ENST00000305991
  CDS Start-End: 175-270
agtccagacagcctgggaggggagaaggagttggagctcaagttggagacagcgaggagaaacctgccatagccagggtgtgtctttgatcctcttcaggaggtgaggagaagccagaggtccttggtgtgccctcagaaatctgcctgcagttctcaccaagccgctgtgaaaatggggataaacacccgggagctgtttctcaacttcactattgtcttgattacggttattcttatgtggctccttgtgaggtcctatcagtactgagaggccatgccatggtcctgggattgactgagatgctccggagctgcctgctctatgccctgagaccccactgctgtcattgtcacaggatgccattctccatccgagggcacctgtgacctgcactcacaatatctgctatgctgtagtgctaggattgattatgtgttctccaaagatgctgctcccaagggctgccaagtgtttgccagggaacggtagatttattccccaactcttaactgaaaatgtgttagacaagccacaaagttaaaattaaactggattcatgatgatgtaggattgttacaagcccctgatctgtctcaccacacatcccttcaacccacacggtctgcaaccaaactctaattcaacctgccagaaggaatgttagaggaagtctttgtcagcccttatagctatcatgtgaataaagttaagtcaacttc

SEQ ID NO: 178932 - DNA, 436 bp, Homo sapiens
  Payload ID: 15269
  Gene Symbol: SLN
  Gene Name: sarcolipin
  Uniprot ID: O00631
  ENST ID: ENST00000525934
  CDS Start-End: 118-213
ctgtctgctgctgaggcctgcagagattaatataaacggcaggaggtgaggagaagccagaggtccttggtgtgccctcagaaatctgcctgcagttctcaccaagccgctgtgaaaatggggataaacacccgggagctgtttctcaacttcactattgtcttgattacggttattcttatgtggctccttgtgaggtcctatcagtactgagaggccatgccatggtcctgggattgactgagatgctccggagctgcctgctctatgccctgagaccccactgctgtcattgtcacaggatgccattctccatccgagggcacctgtgacctgcactcacaatatctgctatgctgtagtgctaggattgattatgtgttctccaaagatgctgctcccaagggctgccaagtgtttgccagggaacggtaga

SEQ ID NO: 178933 - DNA, 906 bp, Homo sapiens
  Payload ID: 15269
  Gene Symbol: SLN
  Gene Name: sarcolipin
  Uniprot ID: O00631
  ENST ID: ENST00000531293
  CDS Start-End: 354-449
attttcttgctcttgagctctggcacttctctgctgctgtctgctgctgaggcctgcagagattaatataaacggcagcctcgaaccttcggagggtgttcctttgagatgtttcatcagtgacatcacagtgattgccagcttccacggactactttaggcgctgcccagagtccaggagtccagacagcctgggaggggagaaggagttggagctcaagttggagacagcgaggagaaacctgccatagccagggtgtgtctttgatcctcttcaggaggtgaggagaagccagaggtccttggtgtgccctcagaaatctgcctgcagttctcaccaagccgctgtgaaaatggggataaacacccgggagctgtttctcaacttcactattgtcttgattacggttattcttatgtggctccttgtgaggtcctatcagtactgagaggccatgccatggtcctgggattgactgagatgctccggagctgcctgctctatgccctgagaccccactgctgtcattgtcacaggatgccattctccatccgagggcacctgtgacctgcactcacaatatctgctatgctgtagtgctaggattgattatgtgttctccaaagatgctgctcccaagggctgccaagtgtttgccagggaacggtagatttattccccaactcttaactgaaaatgtgttagacaagccacaaagttaaaattaaactggattcatgatgatgtaggattgttacaagcccctgatctgtctcaccacacatcccttcaacccacacggtctgcaaccaaactctaattcaacctgccagaaggaatgttagaggaagtctttgtcagcccttatagctatcatgtgaataaagttaagtcaacttcaaaaa

SEQ ID NO: 178934 - DNA, 2952 bp, Homo sapiens
  Payload ID: 15270
  Gene Symbol: SAGE1
  Gene Name: sarcoma antigen 1
  Uniprot ID: Q9NXZ1
  ENST ID: ENST00000324447
  CDS Start-End: 75-2789
ctgcacagcaacataagcagaggaatgcagaaccttctcacccagcgggatgaaatcgcctggactatctgcagatgcaggcttctccacttcaaacgagtcaaccaactccacctgaagaacttcatgctgctgcctatgtgtttacaaatgatgggcagcaaatgaggagtgatgaagtaaatctggttgcaacagggcatcaaagcaaaaagaaacattccagaaaatccaagagacactcttcatctaagagaaggaagagtatgtcctcgtggttagacaaacaggaagatgctgcagtcactcacagcatttgtgaagagaggataaataacggccaaccagtagctgataatgtcttgtcaactgctccaccatggcctgatgctaccatcgctcacaatatccgtgaagagaggatggaaaatggccaatctcgaactgacaaagtcttgtcaactgctccaccacagcttgttcatatggctgcagctggtattccatccatgagtaccagggatctgcattctaccgtcactcacaatatccgtgaagagagaatggaaaatggccaaccccaacctgataacgtcttgtcaactggtcccacagggcttattaatatggcagcaactcctattccagccatgagtgccagagatctctatgctacagtcactcacaatgtctgtgaacagaagatggaaaatgtccaaccagcacctgataacgtgttgttgactcttcgaccacggcgtattaatatgacagacactggtatttcacccatgagtaccagggatccatatgctaccatcacttacaatgtccctgaggagaagatggaaaagggccaaccccaacctgataacatcttgtcaactgcttcaacagggcttattaatgtggcaggagctggtactccagccatcagcaccaatggcctgtattccaccgtccctcacaatgtctgtgaagagaagatggaaaatgaccaaccgcaacctaataacgtattgtcaactgttcaaccagtgattatttatttgacagcaactggtattccgggcatgaataccagggatcagtatgctaccatcactcacaatgtctgtgaagagagagtggtaaataaccaaccactacctagtaacgccttgtcaactgttctaccagggcttgcttatttggcaacagctgatatgccagccatgagtaccagggatcagcatgctaccatcattcacaatctgcgtgaagagaagaaagataacagccaaccaacccctgataacgtcttgtcagctgttacaccagagcttattaacttggcaggagctggtattccacccatgagtaccagggatcagtatgctaccgtcaatcaccatgtccatgaagcaaggatggaaaatggccaacgaaaacaggataacgtcttgtcaaatgttctatccgggcttattaatatggcaggagctagtattccagcaatgagttccagggatctgtatgctaccattactcacagtgttcgtgaagagaagatggaaagtggcaaaccccaaactgataaggtcatatcaaatgatgcaccacagcttggtcatatggctgcaggtggtattccatccatgagtaccaaggatctgtatgctaccgtcactcaaaatgtccatgaagagaggatggaaaataaccaaccacaacctagttatgacttgtcaactgttctaccaggacttacttatttgacagtagctggtattccggccatgagtaccagggatcagtatgctaccgtcactcacaatgtccatgaagagaagattaaaaatggccaagcagcatccgataatgtcttctcgactgttccaccagcatttattaatatggcagcaactggtgtttcatccatgagtaccagggatcagtatgctgcagtcactcacaacatccgtgaagagaagataaataacagccaaccagcacctggtaacatcttgtcaactgctcctccatggcttcgtcatatggcagcagctggaatttcatccacgattaccagggatctgtatgtcaccgccactcacagtgtccatgaggagaagatgacaaatggccaacaggcacctgataactccttgtcaacggttccacctggttgtattaatctgtcaggagctggtatttcatgcagaagtaccagggatctgtatgctactgtcattcacgatatccaggaggaggagatggaaaatgatcaaacccctcctgatggcttcctgtcaaattctgattcaccagagctgataaatatgacaggacattgtatgccacccaatgcattggattctttctctcacgacttcacaagtctcagcaaagatgagctgctttacaaacctgatagtaatgaatttgcggtaggcaccaaaaactacagtgtctctgcaggtgacccaccagttacagtaatgtctttggtggaaactgtgccaaatacaccacaaatatctcctgccatggcaaagaaaattaatgatgatataaaatatcaattaatgaaagaagttcgaaggtttgggcaaaattatgaaagaattttcattttgcttgaagaggtacaaggatctatgaaagtcaagagacaatttgttgaatttaccatcaaggaagcagcaaggtttaaaaaagttgtcttaattcagcaactcgagaaggcgcttaaagaaatagattcccactgccatctcagaaaagttaagcacatgagaaaaagataattgtgttagtgcaaagaccaaggagaaacaaggacatatgctgtaggatggaacaggttattgctgaagctccctataatcctgaaatgaagagaattcccttccagaagctacgaaaaagggagctgtttaaatttaataaatctctgttagtaaaagctgc

SEQ ID NO: 178935 - DNA, 2879 bp, Homo sapiens
  Payload ID: 15270
  Gene Symbol: SAGE1
  Gene Name: sarcoma antigen 1
  Uniprot ID: Q9NXZ1
  ENST ID: ENST00000370709
  CDS Start-End: 1-2715
atgcaggcttctccacttcaaacgagtcaaccaactccacctgaagaacttcatgctgctgcctatgtgtttacaaatgatgggcagcaaatgaggagtgatgaagtaaatctggttgcaacagggcatcaaagcaaaaagaaacattccagaaaatccaagagacactcttcatctaagagaaggaagagtatgtcctcgtggttagacaaacaggaagatgctgcagtcactcacagcatttgtgaagagaggataaataacggccaaccagtagctgataatgtcttgtcaactgctccaccatggcctgatgctaccatcgctcacaatatccgtgaagagaggatggaaaatggccaatctcgaactgacaaagtcttgtcaactgctccaccacagcttgttcatatggctgcagctggtattccatccatgagtaccagggatctgcattctaccgtcactcacaatatccgtgaagagagaatggaaaatggccaaccccaacctgataacgtcttgtcaactggtcccacagggcttattaatatggcagcaactcctattccagccatgagtgccagagatctctatgctacagtcactcacaatgtctgtgaacagaagatggaaaatgtccaaccagcacctgataacgtgttgttgactcttcgaccacggcgtattaatatgacagacactggtatttcacccatgagtaccagggatccatatgctaccatcacttacaatgtccctgaggagaagatggaaaagggccaaccccaacctgataacatcttgtcaactgcttcaacagggcttattaatgtggcaggagctggtactccagccatcagcaccaatggcctgtattccaccgtccctcacaatgtctgtgaagagaagatggaaaatgaccaaccgcaacctaataacgtattgtcaactgttcaaccagtgattatttatttgacagcaactggtattccgggcatgaataccagggatcagtatgctaccatcactcacaatgtctgtgaagagagagtggtaaataaccaaccactacctagtaacgccttgtcaactgttctaccagggcttgcttatttggcaacagctgatatgccagccatgagtaccagggatcagcatgctaccatcattcacaatctgcgtgaagagaagaaagataacagccaaccaacccctgataacgtcttgtcagctgttacaccagagcttattaacttggcaggagctggtattccacccatgagtaccagggatcagtatgctaccgtcaatcaccatgtccatgaagcaaggatggaaaatggccaacgaaaacaggataacgtcttgtcaaatgttctatccgggcttattaatatggcaggagctagtattccagcaatgagttccagggatctgtatgctaccattactcacagtgttcgtgaagagaagatggaaagtggcaaaccccaaactgataaggtcatatcaaatgatgcaccacagcttggtcatatggctgcaggtggtattccatccatgagtaccaaggatctgtatgctaccgtcactcaaaatgtccatgaagagaggatggaaaataaccaaccacaacctagttatgacttgtcaactgttctaccaggacttacttatttgacagtagctggtattccggccatgagtaccagggatcagtatgctaccgtcactcacaatgtccatgaagagaagattaaaaatggccaagcagcatccgataatgtcttctcgactgttccaccagcatttattaatatggcagcaactggtgtttcatccatgagtaccagggatcagtatgctgcagtcactcacaacatccgtgaagagaagataaataacagccaaccagcacctggtaacatcttgtcaactgctcctccatggcttcgtcatatggcagcagctggaatttcatccacgattaccagggatctgtatgtcaccgccactcacagtgtccatgaggagaagatgacaaatggccaacaggcacctgataactccttgtcaacggttccacctggttgtattaatctgtcaggagctggtatttcatgcagaagtaccagggatctgtatgctactgtcattcacgatatccaggaggaggagatggaaaatgatcaaacccctcctgatggcttcctgtcaaattctgattcaccagagctgataaatatgacaggacattgtatgccacccaatgcattggattctttctctcacgacttcacaagtctcagcaaagatgagctgctttacaaacctgatagtaatgaatttgcggtaggcaccaaaaactacagtgtctctgcaggtgacccaccagttacagtaatgtctttggtggaaactgtgccaaatacaccacaaatatctcctgccatggcaaagaaaattaatgatgatataaaatatcaattaatgaaagaagttcgaaggtttgggcaaaattatgaaagaattttcattttgcttgaagaggtacaaggatctatgaaagtcaagagacaatttgttgaatttaccatcaaggaagcagcaaggtttaaaaaagttgtcttaattcagcaactcgagaaggcgcttaaagaaatagattcccactgccatctcagaaaagttaagcacatgagaaaaagataattgtgttagtgcaaagaccaaggagaaacaaggacatatgctgtaggatggaacaggttattgctgaagctccctataatcctgaaatgaagagaattcccttccagaagctacgaaaaagggagctgtttaaatttaataaatctctgttagtaaaagctgca

SEQ ID NO: 178936 - DNA, 1824 bp, Homo sapiens
  Payload ID: 15270
  Gene Symbol: SAGE1
  Gene Name: sarcoma antigen 1
  ENST ID: ENST00000537770
  CDS Start-End: 75-1661
ctgcacagcaacataagcagaggaatgcagaaccttctcacccagcgggatgaaatcgcctggactatctgcagatgcaggcttctccacttcaaacgagtcaaccaactccacctgaagaacttcatgctgctgcctatgtgtttacaaatgatgggcagcaaatgaggagtgatgaagtaaatctggttgcaacagggcatcaaagcaaaaagaaacattccagaaaatccaagagacactcttcatctaagagaaggaagagtatgtcctcgtggttagacaaacaggaagatgctgcagtcactcacagcatttgtgaagagaggataaataacggccaaccagtagctgataatgtcttgtcaactgctccaccatggcctgatgctaccatcgctcacaatatccgtgaagagaggatggaaaatggccaatctcgaactgacaaagtcttgtcaactgctccaccacagcttgttcatatggctgcagctggtattccatccatgagtaccagggatctgcatgctaccgtcactcaaaatgtccatgaagagaggatggaaaataaccaaccacaacctagttatgacttgtcaactgttctaccaggacttacttatttgacagtagctggtattccggccatgagtaccagggatcagtatgctaccgtcactcacaatgtccatgaagagaagattaaaaatggccaagcagcatccgataatgtcttctcgactgttccaccagcatttattaatatggcagcaactggtgtttcatccatgagtaccagggatcagtatgctgcagtcactcacaacatccgtgaagagaagataaataacagccaaccagcacctggtaacatcttgtcaactgctcctccatggcttcgtcatatggcagcagctggaatttcatccacgattaccagggatctgtatgtcaccgccactcacagtgtccatgaggagaagatgacaaatggccaacaggcacctgataactccttgtcaacggttccacctggttgtattaatctgtcaggagctggtatttcatgcagaagtaccagggatctgtatgctactgtcattcacgatatccaggaggaggagatggaaaatgatcaaacccctcctgatggcttcctgtcaaattctgattcaccagagctgataaatatgacaggacattgtatgccacccaatgcattggattctttctctcacgacttcacaagtctcagcaaagatgagctgctttacaaacctgatagtaatgaatttgcggtaggcaccaaaaactacagtgtctctgcaggtgacccaccagttacagtaatgtctttggtggaaactgtgccaaatacaccacaaatatctcctgccatggcaaagaaaattaatgatgatataaaatatcaattaatgaaagaagttcgaaggtttgggcaaaattatgaaagaattttcattttgcttgaagaggtacaaggatctatgaaagtcaagagacaatttgttgaatttaccatcaaggaagcagcaaggtttaaaaaagttgtcttaattcagcaactcgagaaggcgcttaaagaaatagattcccactgccatctcagaaaagttaagcacatgagaaaaagataattgtgttagtgcaaagaccaaggagaaacaaggacatatgctgtaggatggaacaggttattgctgaagctccctataatcctgaaatgaagagaattcccttccagaagctacgaaaaagggagctgtttaaatttaataaatctctgttagtaaaagctgc

SEQ ID NO: 178937 - DNA, 1484 bp, Homo sapiens
  Payload ID: 15271
  Gene Symbol: SARDH
  Gene Name: sarcosine dehydrogenase
  ENST ID: ENST00000298628
  CDS Start-End: 294-1484
agttgcaacttgtctttgagtgcagggacaggagaagtgtgggctacccggccactgccctggagctgtggtgactgctgcgtttttctcccatgcacttgcacgtccaggactcctgggagaacttgggccacactccttccttgccctcttgagctcattcgtcaccctgttgggtgagcacagccctagctcaggccactgggcaagccacaccatccaaagaggaggtcctctgccccaggacccccacaccaccccagctccctgtttcgctgaggcctggagcccccatggcctcactgagccgagccctacgtgtggctgctgcccaccctcgccagagccctacccggggcatggggccatgcaacctgtccagcgcagctggccccacagccgagaagagtgtgccatatcagcggaccctgaaggagggacagggcacctcggtggtggcccaaggcccaagccggcccctgcccagcacggccaacgtggtggtcattggtggaggcagcttgggctgccagaccctgtaccacctggccaagctgggcatgagtggggcggtgctgctggagcgggagcggctgacctccgggaccacctggcacacggcaggcctgctgtggcagctgcggcccagtgacgtggaggtggagcttctggcccacactcggcgggtggtgagccgggagctggaggaggagacgggactacacacgggctggatccagaatgggggcctcttcatcgcgtccaaccggcagcgcctggacgagtacaagaggctcatgtcgctgggcaaggcgtatggtgtggaatcccatgtgctgagcccggcagagaccaagactctgtacccgctgatgaatgtggacgacctctacgggaccctgtatgtgccgcacgacggtaccatggaccccgctggcacctgtaccaccctcgccagggcagcttctgcccgaggagcacaggtcattgagaactgcccagtgaccggcattcgtgtgtggacggatgattttggggtgcggcgggtcgcgggtgtggagactcagcatggttccatccagacaccctgcgtggtcaactgtgcaggagtgtgggcaagtgctgtgggccggatggctggagtcaaggtcccgctggtggccatgcaccatgcctatgtcgtcaccgagcgcatcgaggggattcagagtttcactttgttgcccacactggagtacagtggcacagtgtcagctcactgcaacctccgcctcccgggttcaagcaattctcgtgcctcagcctcccatgtagctgggattaaatgtgcccgtcaccacacccggctgatttttttttgtattttagtagagacggagtttcaccatgttgccaaggctggtctcgaactcctgagctcaggcaatccacccatctcggacttccaaagtgctaggattacaggcgtgagccaccatgcttag

SEQ ID NO: 178938 - DNA, 1326 bp, Homo sapiens
  Payload ID: 15271
  Gene Symbol: SARDH
  Gene Name: sarcosine dehydrogenase
  ENST ID: ENST00000371867
  CDS Start-End: 138-989
ggaccctgaaggagggacagggcacctcggtggtggcccaaggcccaagccggcccctgcccagcacggccaacgtggtggtcattggtggaggcagcttgggctgccagaccctgtaccacctggccaagctgggcatgagtggggcggtgctgctggagcgggagcggctgacctccgggaccacctggcacacggcaggcctgctgtggcagctgcggcccagtgacgtggaggtggagcttctggcccacactcggcgggtggtgagccgggagctggaggaggagacgggactacacacgggctggatccagaatgggggcctcttcatcgcgtccaaccggcagcgcctggacgagtacaagaggctcatgtcgctgggcaaggcgtatggtgtggaatcccatgtgctgagcccggcagagaccaagactctgtacccgctgatgaatgtggacgacctctacgggaccctgtatgtgccgcacgacggtaccatggaccccgctggcacctgtaccaccctcgccagggcagcttctgcccgaggagcacaggtcattgagaactgcccagtgaccggcattcgtgtgtggacggatgattttggggtgcggcgggtcgcgggtgtggagactcagcatggttccatccagacaccctgcgtggtcaactgtgcaggagtgtgggcaagtgctgtgggccggatggctggagtcaaggtcccgctggtggccatgcaccatgcctatgtcgtcaccgagcgcatcgaggggattcagaacatgcccaatgtccgtgatcatgatgcctctgtctacctccgcctccaaggggatgccttgtctgtgggtggctatgaggccaaccccatcttttgggaggaggcagtcaaatacagacccagggcagctggagggctttgcctcaaaacatccacagagaaggtctgcgcagtgtggagtgatgacctcagaagggcatgagagcacacaagtcctacgtccttcagcaaatgacactgccctcccaaccagctgctgcagcggcatttcccctggcctgggctgtttcccgggcagcttctggggttagggcagccctgcagccctgttctatgtgtatatgcatttagtccacacatggaacgactgagtggctactttgggctaaaaactgctttaatttctggagaaagagggaaactaagataaaagtccctgactctgggtgcctatattttggtggagagacatacaataaacaaacaaatggctgggcacggtggctcacacctgtaatcccagcactttgggaggctga

SEQ ID NO: 178939 - DNA, 2266 bp, Homo sapiens
  Payload ID: 15271
  Gene Symbol: SARDH
  Gene Name: sarcosine dehydrogenase
  ENST ID: ENST00000371868
  CDS Start-End: 835-1941
gtgccgtgtcggcagttaggagggcaggtggcggggtggggggttgtctgcaggagcagcggccagggaggggcatggggctgtggggctgtggggtgtctgatgggggcagatcccagggaggccaaggcagtggcagaaaagctggactctggagcccacgcacctgcctggcttcgtgccactgccaggtccaggacttgtctgtgcccttgggcgagatataacttctctgcgcctcactttcctcatctgtagaaaggggcacacctggtaggagtgtaagacgcttcccgcaggggctggcccagagcaggagctgggcctgggattgccgtggctccagggagcagccctggctgaggtcctgggtaaccacctctccctgtcgttccccaccttgggtgcatccagctcctcctccagcctcctgggccctggctgggctctcagacccaccaggcaaccctgcggcctcctttgtgcctctgttttgcctggacctcatgggggccccctgcccgcgtccacaacacacgggcactcagtgcagggctctccgagggcagggccaggcctgaccccatcacagcctcagcgggaccccgctctggggagggaagcggggaggggccaaagaggcaggctgaggaccacgtcttttcttcccaggtcctcgagtacgactactacggggcttacgggagccgcgcgcacgaggactacgcctaccgcaggctgctggcagacgagtacaccttcgccttcccgccccaccacgacacgatcaagaaggagtgcctggcctgcagaggggccgccgctgtgtttgacatgtcctacttcgggaagttctacctggtggggctggatgcaaggaaggctgccgactggctcttctccgcagatgtcagccgacccccaggctccaccgtgtacacgtgcatgctcaaccaccgtgggggcaccgagagtgacctgactgtcagccgcctggcacccagccaccaggcctccccgctggcccccgcctttgaaggggacggttactacctggccatgggcggggccgtggcccagcacaactggtcccacatcaccaccgtgctgcaggaccagaagtcccagtgccagctcatcgacagctccgaggacctgggtatgatcagtatccagggcccagccagccgagccattttgcaggaggtgctggacgcagacctgagcaacgaggccttcccgttctccacccacaagctactgagagccgcagggcacctggtccgagccatgcggctgtcctttgtgggggagctgggctgggagctgcacattccaaaggcgtcctgcgtgcctgtgtaccgggctgtgatggccgcgggtgccaagcacggcctcatcaacgcagggtaccgcgccatcgactccctgagcattgagaaaggctaccggcactggcacgcggacctgcggccagacgacagccccctggaggcaggcctggccttcacctgcaagctcaagtcgccggtgcccttcctggggagggaggccctggagcagcagcgggccgcaggcctccgccggcgcctggtgtgcttcaccatggaggagccgctgtggacgcgtccccaccctgcggtttctggggccccagctttctctactgcttcttccagcaaagtacccatgtttggcctggaggccatctggaggaacggccaagtggtgggccatgtccggagggctgactttgggttcgccatcgacaagaccatcgcctacggttacatccatgaccccagcggtgggccggtctcgctggactttgtgaagagcggggactatgccctggagagaatgggggtgacctatggtgcccaggctcacctgaagtcgcccttcgaccccaacaacaagagggtgaagggaatctactgagggctcagaccacatgccccatcccatgctgtccatccattctcacaggtcccaaatggccctgggtcccaggaccctggacccagccagaacttgtgccctccctgtccttagcctaggcctagtcctgcgaaaacccccaaaccagatacggacagagaccaagatggcccatcctgtggtcactgactggaaggcagtctctaatccaccccaatcctcccagaaagcaaacctgtaagtgtcttgggctcagggaccatggcttgtagccctttccaagcttctagaaggtgcttagtaaatacttgataagccccacgtg

SEQ ID NO: 178940 - DNA, 3344 bp, Homo sapiens
  Payload ID: 15271
  Gene Symbol: SARDH
  Gene Name: sarcosine dehydrogenase
  Uniprot ID: Q9UL12
  ENST ID: ENST00000371872
  CDS Start-End: 259-3015
agtgtgggctacccggccactgccctggagctgtggtgactgctgcgtttttctcccatgcacttgcacgtccaggactcctgggagaacttgggccacactccttccttgccctcttgagctcattcgtcaccctgttgggtgagcacagccctagctcaggccactgggcaagccacaccatccaaagaggaggtcctctgccccaggacccccacaccaccccagctccctgtttcgctgaggcctggagcccccatggcctcactgagccgagccctacgtgtggctgctgcccaccctcgccagagccctacccggggcatggggccatgcaacctgtccagcgcagctggccccacagccgagaagagtgtgccatatcagcggaccctgaaggagggacagggcacctcggtggtggcccaaggcccaagccggcccctgcccagcacggccaacgtggtggtcattggtggaggcagcttgggctgccagaccctgtaccacctggccaagctgggcatgagtggggcggtgctgctggagcgggagcggctgacctccgggaccacctggcacacggcaggcctgctgtggcagctgcggcccagtgacgtggaggtggagcttctggcccacactcggcgggtggtgagccgggagctggaggaggagacgggactacacacgggctggatccagaatgggggcctcttcatcgcgtccaaccggcagcgcctggacgagtacaagaggctcatgtcgctgggcaaggcgtatggtgtggaatcccatgtgctgagcccggcagagaccaagactctgtacccgctgatgaatgtggacgacctctacgggaccctgtatgtgccgcacgacggtaccatggaccccgctggcacctgtaccaccctcgccagggcagcttctgcccgaggagcacaggtcattgagaactgcccagtgaccggcattcgtgtgtggacggatgattttggggtgcggcgggtcgcgggtgtggagactcagcatggttccatccagacaccctgcgtggtcaactgtgcaggagtgtgggcaagtgctgtgggccggatggctggagtcaaggtcccgctggtggccatgcaccatgcctatgtcgtcaccgagcgcatcgaggggattcagaacatgcccaatgtccgtgatcatgatgcctctgtctacctccgcctccaaggggatgccttgtctgtgggtggctatgaggccaaccccatcttttgggaggaggtgtcagacaagtttgccttcggcctctttgacctggactgggaggtgttcacccagcacattgaaggcgccatcaacagggtccccgtgctggagaagacaggaatcaagtccacggtctgcggccctgaatccttcacgcccgaccacaagcccctgatgggggaggcacctgagctccgagggttcttcctgggctgtggcttcaacagcgcaggaatgatgctgggtggtggctgtgggcaggagctggcccactggatcatccatgggcgcccggagaaggacatgcatggctatgacatcaggcgcttccatcactcgctcacggaccacccccgctggatccgagagcgaagccatgagtcctacgccaagaactactccgtcgtcttcccccacgatgagccgctggccgggcgcaacatgaggagagacccgctgcacgaggaactccttggacaaggctgcgtgttccaggagcggcatggctgggagcgaccgggatggtttcatccccgaggcccagctccggtcctcgagtacgactactacggggcttacgggagccgcgcgcacgaggactacgcctaccgcaggctgctggcagacgagtacaccttcgccttcccgccccaccacgacacgatcaagaaggagtgcctggcctgcagaggggccgccgctgtgtttgacatgtcctacttcgggaagttctacctggtggggctggatgcaaggaaggctgccgactggctcttctccgcagatgtcagccgacccccaggctccaccgtgtacacgtgcatgctcaaccaccgtgggggcaccgagagtgacctgactgtcagccgcctggcacccagccaccaggcctccccgctggcccccgcctttgaaggggacggttactacctggccatgggcggggccgtggcccagcacaactggtcccacatcaccaccgtgctgcaggaccagaagtcccagtgccagctcatcgacagctccgaggacctgggtatgatcagtatccagggcccagccagccgagccattttgcaggaggtgctggacgcagacctgagcaacgaggccttcccgttctccacccacaagctactgagagccgcagggcacctggtccgagccatgcggctgtcctttgtgggggagctgggctgggagctgcacattccaaaggcgtcctgcgtgcctgtgtaccgggctgtgatggccgcgggtgccaagcacggcctcatcaacgcagggtaccgcgccatcgactccctgagcattgagaaaggctaccggcactggcacgcggacctgcggccagacgacagccccctggaggcaggcctggccttcacctgcaagctcaagtcgccggtgcccttcctggggagggaggccctggagcagcagcgggccgcaggcctccgccggcgcctggtgtgcttcaccatggaggacaaagtacccatgtttggcctggaggccatctggaggaacggccaagtggtgggccatgtccggagggctgactttgggttcgccatcgacaagaccatcgcctacggttacatccatgaccccagcggtgggccggtctcgctggactttgtgaagagcggggactatgccctggagagaatgggggtgacctatggtgcccaggctcacctgaagtcgcccttcgaccccaacaacaagagggtgaagggaatctactgagggctcagaccacatgccccatcccatgctgtccatccattctcacaggtcccaaatggccctgggtcccaggaccctggacccagccagaacttgtgccctccctgtccttagcctaggcctagtcctgcgaaaacccccaaaccagatacggacagagaccaagatggcccatcctgtggtcactgactggaaggcagtctctaatccaccccaatcctcccagaaagcaaacctgtaagtgtcttgggctcagggaccatggcttgtagccctttccaagcttctagaaggtgcttagtaaatacttgataagccccacgtgaaaa

SEQ ID NO: 178941 - DNA, 1957 bp, Homo sapiens
  Payload ID: 15271
  Gene Symbol: SARDH
  Gene Name: sarcosine dehydrogenase
  ENST ID: ENST00000427237
  CDS Start-End: 133-1957
cctggagttccggccaggccactgcttgggaagcaagaaggtgaaggcacctctgctgggccaagcactcttagggccgaggggcactgcagctgacaagagctccctgtttcgctgaggcctggagcccccatggcctcactgagccgagccctacgtgtggctgctgcccaccctcgccagagccctacccggggcatggggccatgcaacctgtccagcgcagctggccccacagccgagaagagtgtgccatatcagcggaccctgaaggagggacagggcacctcggtggtggcccaaggcccaagccggcccctgcccagcacggccaacgtggtggtcattggtggaggcagcttgggctgccagaccctgtaccacctggccaagctgggcatgagtggggcggtgctgctggagcgggagcggctgacctccgggaccacctggcacacggcaggcctgctgtggcagctgcggcccagtgacgtggaggtggagcttctggcccacactcggcgggtggtgagccgggagctggaggaggagacgggactacacacgggctggatccagaatgggggcctcttcatcgcgtccaaccggcagcgcctggacgagtacaagaggctcatgtcgctgggcaaggcgtatggtgtggaatcccatgtgctgagcccggcagagaccaagactctgtacccgctgatgaatgtggacgacctctacgggaccctgtatgtgccgcacgacggtaccatggaccccgctggcacctgtaccaccctcgccagggcagcttctgcccgaggagcacaggtcattgagaactgcccagtgaccggcattcgtgtgtggacggatgattttggggtgcggcgggtcgcgggtgtggagactcagcatggttccatccagacaccctgcgtggtcaactgtgcaggagtgtgggcaagtgctgtgggccggatggctggagtcaaggtcccgctggtggccatgcaccatgcctatgtcgtcaccgagcgcatcgaggggattcagaacatgcccaatgtccgtgatcatgatgcctctgtctacctccgcctccaaggggatgccttgtctgtgggtggctatgaggccaaccccatcttttgggaggaggtgtcagacaagtttgccttcggcctctttgacctggactgggaggtgttcacccagcacattgaaggcgccatcaacagggtccccgtgctggagaagacaggaatcaagtccacggtctgcggccctgaatccttcacgcccgaccacaagcccctgatgggggaggcacctgagctccgagggttcttcctgggctgtggcttcaacagcgcaggaatgatgctgggtggtggctgtgggcaggagctggcccactggatcatccatgggcgcccggagaaggacatgcatggctatgacatcaggcgcttccatcactcgctcacggaccacccccgctggatccgagagcgaagccatgagtcctacgccaagaactactccgtcgtcttcccccacgatgagccgctggccgggcgcaacatgaggagagacccgctgcacgaggaactccttggacaaggctgcgtgttccaggagcggcatggctgggagcgaccgggatggtttcatccccgaggcccagctccggtcctcgagtacgactactacggggcttacgggagccgcgcgcacgaggactacgcctaccgcaggctgctggcagacgagtacaccttcgccttcccgccccaccacgacacgatcaagaaggagtgcctggcctgcagaggggccgccgctgtgtttgacatgtcctacttcgggaagttctacctggtggggctggatgcaaggaaggctgccgactggctcttctccgcagatgtcagccgacccccaggctccaccgtgtacacgt

SEQ ID NO: 178942 - DNA, 3216 bp, Homo sapiens
  Payload ID: 15271
  Gene Symbol: SARDH
  Gene Name: sarcosine dehydrogenase
  Uniprot ID: Q9UL12
  ENST ID: ENST00000439388
  CDS Start-End: 135-2891
ggcctggagttccggccaggccactgcttgggaagcaagaaggtgaaggcacctctgctgggccaagcactcttagggccgaggggcactgcagctgacaagagctccctgtttcgctgaggcctggagcccccatggcctcactgagccgagccctacgtgtggctgctgcccaccctcgccagagccctacccggggcatggggccatgcaacctgtccagcgcagctggccccacagccgagaagagtgtgccatatcagcggaccctgaaggagggacagggcacctcggtggtggcccaaggcccaagccggcccctgcccagcacggccaacgtggtggtcattggtggaggcagcttgggctgccagaccctgtaccacctggccaagctgggcatgagtggggcggtgctgctggagcgggagcggctgacctccgggaccacctggcacacggcaggcctgctgtggcagctgcggcccagtgacgtggaggtggagcttctggcccacactcggcgggtggtgagccgggagctggaggaggagacgggactacacacgggctggatccagaatgggggcctcttcatcgcgtccaaccggcagcgcctggacgagtacaagaggctcatgtcgctgggcaaggcgtatggtgtggaatcccatgtgctgagcccggcagagaccaagactctgtacccgctgatgaatgtggacgacctctacgggaccctgtatgtgccgcacgacggtaccatggaccccgctggcacctgtaccaccctcgccagggcagcttctgcccgaggagcacaggtcattgagaactgcccagtgaccggcattcgtgtgtggacggatgattttggggtgcggcgggtcgcgggtgtggagactcagcatggttccatccagacaccctgcgtggtcaactgtgcaggagtgtgggcaagtgctgtgggccggatggctggagtcaaggtcccgctggtggccatgcaccatgcctatgtcgtcaccgagcgcatcgaggggattcagaacatgcccaatgtccgtgatcatgatgcctctgtctacctccgcctccaaggggatgccttgtctgtgggtggctatgaggccaaccccatcttttgggaggaggtgtcagacaagtttgccttcggcctctttgacctggactgggaggtgttcacccagcacattgaaggcgccatcaacagggtccccgtgctggagaagacaggaatcaagtccacggtctgcggccctgaatccttcacgcccgaccacaagcccctgatgggggaggcacctgagctccgagggttcttcctgggctgtggcttcaacagcgcaggaatgatgctgggtggtggctgtgggcaggagctggcccactggatcatccatgggcgcccggagaaggacatgcatggctatgacatcaggcgcttccatcactcgctcacggaccacccccgctggatccgagagcgaagccatgagtcctacgccaagaactactccgtcgtcttcccccacgatgagccgctggccgggcgcaacatgaggagagacccgctgcacgaggaactccttggacaaggctgcgtgttccaggagcggcatggctgggagcgaccgggatggtttcatccccgaggcccagctccggtcctcgagtacgactactacggggcttacgggagccgcgcgcacgaggactacgcctaccgcaggctgctggcagacgagtacaccttcgccttcccgccccaccacgacacgatcaagaaggagtgcctggcctgcagaggggccgccgctgtgtttgacatgtcctacttcgggaagttctacctggtggggctggatgcaaggaaggctgccgactggctcttctccgcagatgtcagccgacccccaggctccaccgtgtacacgtgcatgctcaaccaccgtgggggcaccgagagtgacctgactgtcagccgcctggcacccagccaccaggcctccccgctggcccccgcctttgaaggggacggttactacctggccatgggcggggccgtggcccagcacaactggtcccacatcaccaccgtgctgcaggaccagaagtcccagtgccagctcatcgacagctccgaggacctgggtatgatcagtatccagggcccagccagccgagccattttgcaggaggtgctggacgcagacctgagcaacgaggccttcccgttctccacccacaagctactgagagccgcagggcacctggtccgagccatgcggctgtcctttgtgggggagctgggctgggagctgcacattccaaaggcgtcctgcgtgcctgtgtaccgggctgtgatggccgcgggtgccaagcacggcctcatcaacgcagggtaccgcgccatcgactccctgagcattgagaaaggctaccggcactggcacgcggacctgcggccagacgacagccccctggaggcaggcctggccttcacctgcaagctcaagtcgccggtgcccttcctggggagggaggccctggagcagcagcgggccgcaggcctccgccggcgcctggtgtgcttcaccatggaggacaaagtacccatgtttggcctggaggccatctggaggaacggccaagtggtgggccatgtccggagggctgactttgggttcgccatcgacaagaccatcgcctacggttacatccatgaccccagcggtgggccggtctcgctggactttgtgaagagcggggactatgccctggagagaatgggggtgacctatggtgcccaggctcacctgaagtcgcccttcgaccccaacaacaagagggtgaagggaatctactgagggctcagaccacatgccccatcccatgctgtccatccattctcacaggtcccaaatggccctgggtcccaggaccctggacccagccagaacttgtgccctccctgtccttagcctaggcctagtcctgcgaaaacccccaaaccagatacggacagagaccaagatggcccatcctgtggtcactgactggaaggcagtctctaatccaccccaatcctcccagaaagcaaacctgtaagtgtcttgggctcagggaccatggcttgtagccctttccaagcttctagaaggtgcttagtaaatacttgataagccccacgtg

SEQ ID NO: 178943 - DNA, 2367 bp, Homo sapiens
  Payload ID: 15271
  Gene Symbol: SARDH
  Gene Name: sarcosine dehydrogenase
  ENST ID: ENST00000422262
  CDS Start-End: 127-1935
ggcattcgtgtgtggacggatgattttggggtgcggcgggtcgcgggtgtggagactcagcatggttccatccagacaccctgcgtggtcaactgtgcaggagtgtgggcaagtgctgtgggccggatggctggagtcaaggtcccgctggtggccatgcaccatgcctatgtcgtcaccgagcgcatcgaggggattcagaacatgcccaatgtccgtgatcatgatgcctctgtctacctccgcctccaaggggatgccttgtctgtgggtggctatgaggccaaccccatcttttgggaggaggtgtcagacaagtttgccttcggcctctttgacctggactgggaggtgttcacccagcacattgaaggcgccatcaacagggtccccgtgctggagaagacaggaatcaagtccacggtctgcggccctgaatccttcacgcccgaccacaagcccctgatgggggaggcacctgagctccgagggttcttcctgggctgtggcttcaacagcgcaggaatgatgctgggtggtggctgtgggcaggagctggcccactggatcatccatgggcgcccggagaaggacatgcatggctatgacatcaggcgcttccatcactcgctcacggaccacccccgctggatccgagagcgaagccatgagtcctacgccaagaactactccgtcgtcttcccccacgatgagccgctggccgggcgcaacatgaggagagacccgctgcacgaggaactccttggacaaggctgcgtgttccaggagcggcatggctgggagcgaccgggatggtttcatccccgaggcccagctccggtcctcgagtacgactactacggggcttacgggagccgcgcgcacgaggactacgcctaccgcaggctgctggcagacgagtacaccttcgccttcccgccccaccacgacacgatcaagaaggagtgcctggcctgcagaggggccgccgctgtgtttgacatgtcctacttcgggaagttctacctggtggggctggatgcaaggaaggctgccgactggctcttctccgcagatgtcagccgacccccaggctccaccgtgtacacgtgcatgctcaaccaccgtgggggcaccgagagtgacctgactgtcagccgcctggcacccagccaccaggcctccccgctggcccccgcctttgaaggggacggttactacctggccatgggcggggccgtggcccagcacaactggtcccacatcaccaccgtgctgcaggaccagaagtcccagtgccagctcatcgacagctccgaggacctgggtatgatcagtatccagggcccagccagccgagccattttgcaggaggtgctggacgcagacctgagcaacgaggccttcccgttctccacccacaagctactgagagccgcagggcacctggtccgagccatgcggctgtcctttgtgggggagctgggctgggagctgcacattccaaaggcgtcctgcgtgcctgtgtaccgggctgtgatggccgcgggtgccaagcacggcctcatcaacgcagggtaccgcgccatcgactccctgagcattgagaaaggctaccggcactggcacgcggacctgcggccagacgacagccccctggaggcaggcctggccttcacctgcaagctcaagtcgccggtgcccttcctggggagggaggccctggagcagcagcgggccgcaggcctccgccggcgcctggtgtgcttcaccatggaggacaaagtacccatgtttggcctggaggccatctggaggaacggccaagtggtgggccatgtccggagggctgactttgggttcgccatcgacaagaccatcgccacggttacatccatgaccccagcggtgggccggtctcgctggactttgtgaagagcggggactatgccctggagagaatgggggtgacctatggtgcccaggctcacctgaagtcgcccttcgaccccaacaacaagagggtgaagggaatctactgagggctcagaccacatgccccatcccatgctgtccatccattctcacaggtcccaaatggccctgggtcccaggaccctggacccagccagaacttgtgccctccctgtccttagcctaggcctagtcctgcgaaaacccccaaaccagatacggacagagaccaagatggcccatcctgtggtcactgactggaaggcagtctctaatccaccccaatcctcccagaaagcaaacctgtaagtgtcttgggctcagggaccatggcttgtagccctttccaagcttctagaaggtgcttagtaaatacttgataagccccacgtg

SEQ ID NO: 178944 - DNA, 1954 bp, Homo sapiens
  Payload ID: 15271
  Gene Symbol: SARDH
  Gene Name: sarcosine dehydrogenase
  ENST ID: ENST00000616662
  CDS Start-End: 133-1557
cctggagttccggccaggccactgcttgggaagcaagaaggtgaaggcacctctgctgggccaagcactcttagggccgaggggcactgcagctgacaagagctccctgtttcgctgaggcctggagcccccatggcctcactgagccgagccctacgtgtggctgctgcccaccctcgccagagccctacccggggcatggggccatgcaacctgtccagcgcagctggccccacagccgagaagagtgtgccatatcagcggaccctgaaggagggacagggcacctcggtggtggcccaaggcccaagccggcccctgcccagcacggccaacgtggtggtcattggtggaggcagcttgggctgccagaccctgtaccacctggccaagctgggcatgagtggggcggtgctgctggagcgggagcggctgacctccgggaccacctggcacacggcaggcctgctgtggcagctgcggcccagtgacgtggaggtggagcttctggcccacactcggcgggtggtgagccgggagctggaggaggagacgggactacacacgggctggatccagaatgggggcctcttcatcgcgtccaaccggcagcgcctggacgagtacaagaggctcatgtcgctgggcaaggcgtatggtgtggaatcccatgtgctgagcccggcagagaccaagactctgtacccgctgatgaatgtggacgacctctacgggaccctgtatgtgccgcacgacggtaccatggaccccgctggcacctgtaccaccctcgccagggcagcttctgcccgaggagcacaggtcattgagaactgcccagtgaccggcattcgtgtgtggacggatgattttggggtgcggcgggtcgcgggtgtggagactcagcatggttccatccagacaccctgcgtggtcaactgtgcaggagtgtgggcaagtgctgtgggccggatggctggagtcaaggtcccgctggtggccatgcaccatgcctatgtcgtcaccgagcgcatcgaggggattcagaacatgcccaatgtccgtgatcatgatgcctctgtctacctccgcctccaaggggatgccttgtctgtgggtggctatgaggccaaccccatcttttgggaggaggtgtcagacaagtttgccttcggcctctttgacctggactgggaggtgttcacccagcacattgaaggcgccatcaacagggtccccgtgctggagaagacaggaatcaagtccacggtctgcggccctgaatccttcacgcccgaccacaagcccctgatgggggaggcacctgagctccgagggttcttcctgggctgtggcttcaacagcgcaggaatgatgctgggtggtggctgtgggcaggagctggcccactggatcatccatgggcgcccggagaaggacatgcatggctatgacatcaggcgcttccatcactcgctcacggaccacccccgctggatccgagagcgaagccatgagtcctacgccgaactactccgtcgtcttcccccacgatgagccgctggccgggcgcaacatgaggagagacccgctgcacgaggaactccttggacaaggctgcgtgttccaggagcggcatggctgggagcgaccgggatggtttcatccccgaggcccagctccggtcctcgagtacgactactacggggcttacgggagccgcgcgcacgaggactacgcctaccgcaggctgctggcagacgagtacaccttcgccttcccgccccaccacgacacgatcaagaaggagtgcctggcctgcagaggggccgccgctgtgtttgacatgtcctacttcgggaagttctacctggtggggctggatgcaaggaaggctgccgactggctcttctccgcagatgtcagccgacccccaggctccaccgtgtacacg

SEQ ID NO: 178945 - DNA, 2788 bp, Homo sapiens
  Payload ID: 15272
  Gene Symbol: SSPN
  Gene Name: sarcospan
  Uniprot ID: Q14714
  ENST ID: ENST00000242729
  CDS Start-End: 178-909
ctctgctgcgggctccccgtggcctttggaggctcggtgagtcggctccaaatgttttccatatttgttcagcctccataattcgaataccagggcaggccgagccagccgtgcgccgcgctccagggcccagggcgccgcacacgcacccacccacccacccagcctcgcagcgccatgggcaagaacaagcagccacgcggccagcagaggcaggggggcccgccggccgcggacgccgctgggcccgacgacatggagccgaagaagggcacgggggcccccaaggagtgcggggaggaggagccccggacctgctgcggctgccggttcccgctgctgctcgccctgctgcagctggccctgggcatcgccgtgaccgtggtgggcttcctcatggcgagcatcagctcctccctgctagtcagggacactccattttgggctgggatcattgtctgcttagtggcctatcttggcttgtttatgctttgtgtctcatatcaggttgacgaacggacatgtattcaattttctatgaaactgttatactttctgctgagtgccctgggcctgacggtctgtgtgctggccgtggcctttgccgcccaccactattcgcagctcacacagtttacctgtgagaccacactcgactcttgccagtgcaaactgccctcctcggagccgctcagcaggacctttgtttaccgggatgtgacggactgtaccagcgtcactggcactttcaaactgttcttactcatccagatgattcttaatttggtctgcggccttgtgtgcttgttggcctgctttgtgatgtggaaacataggtaccaggtcttctatgtgggtgtcaggatatgctccctcacggcttccgaaggcccccagcaaaagatctaacattcttgctcaaagttgcgagagaaagtagcacatggagtagctgaggttaaacaaacaaaaaaaaattttaaacaaagaaaggaaaaaaattgacaataaaagtcactcttctaattgaatatttttatatttttatgaaacaaaagagcatttcttcaggtttctattgtattttttttaacattcttgcagagaaagcaagatccaaattgattttgggatattaaaagttaacagaacactgaacaaggaaagaatggcatagatctatctttacagtctggagttaattcctgttaactcattttatccattccttacataatcttctttcctgttagtccagtttgatggtgtgaatggtgaatttcaggcccagttgctaaattttgtggcatcttcctctagtccttcccacctccagtcatcagccccactctgtcttggagacaggcaggaggtgggggaagagctgaatctctttattttccctggtagagacatcttcaaggcatgaaatagcttaaagagcagagtagaaacggaagaggctttgcaaaaggctagataactaacaacacctgggttggggcggcggcctcttctcttcagctcccttagcttggctccgtaagtggatcacttgccaaatgctttagatgattgcctctcaataattgaaaggtggtggtagttgtattctaaatgatgtagaaggtttaaaaataattacattatgcttctattctatcatctaaaacaaatcattaaaactaatttctagctaattgttaattataattatgctcagaagtctatttaatgagctctgactgtacttacgctgcactgtcggtgttaagagaaattactctcacaagagcagaggcctgaagattctttcttctgaaagccaagcaccacaaggaaaaaaaaaattattaatagctcaggttaaaaacacccatttaaacaaaaacaagagcatttgtaataggaagtgtttatacaaacagcacatttgtgatatgttgaaaagcatctctcttggcaaccaatctatgtttgaggaagattgggtaatgctgatgtgttccattcatgaaactgtatttgatacataatcctattattaattcgtatgcttagtcaacctaggaaatcaaaataatgttttgaagttcttatttgagcaatatggccttgacttggagggtagttttagttgttttgtttttaagtgactgtggtttaaagcacaaatgccccaaggtggggagacttctctctgtgattattgttgctattaaattctgaactgtatccatattttaaggaaggagctaaaaatggaaattcatgaaacataaatggtatcaagaactttatcagtatgctttgttgaaagcagaaattaagataataattgagttcaattcgcctctccgcattgcctattgatacactttactaatcatgaaattctaacctaaaaggaaaacattttcctgcttgtcttagaagaaagtggaataattccactgattgtgataatggtttcaatttctacacaatataaatatccagtataaaggaaagcgttaagtcggtaagctagaggattgtaaatatcttttatgtcctctagataaaacacccgattaacagatgttaaaccttttaatgttttgatttgctttaaaaatggccttcctacacattagctccagctaaaaagacacattggagagcttagaggataagtctctggagcagaatttatcacacacaaaagttacaccaacagaataccaagcagaatgatgaggacctgtaaaataccttgtgccctattaaaaaaaaaaaaaaaaaaaaa

SEQ ID NO: 178946 - DNA, 4348 bp, Homo sapiens
  Payload ID: 15272
  Gene Symbol: SSPN
  Gene Name: sarcospan
  Uniprot ID: Q14714
  ENST ID: ENST00000422622
  CDS Start-End: 223-645
gcacacgcgcgcactcgcagcctgtctgaagtgcagaggttcaggcggccaagggacccgcgccggtttccgcgggcgacctgcaaatcctgcccggggcccggcaggcgctgcgtcccggcgcgttggcagttggcgacccccctcgaatcccccctctgctgcgggctccccgtggcctttggaggctcggtctgcttagtggcctatcttggcttgtttatgctttgtgtctcatatcaggttgacgaacggacatgtattcaattttctatgaaactgttatactttctgctgagtgccctgggcctgacggtctgtgtgctggccgtggcctttgccgcccaccactattcgcagctcacacagtttacctgtgagaccacactcgactcttgccagtgcaaactgccctcctcggagccgctcagcaggacctttgtttaccgggatgtgacggactgtaccagcgtcactggcactttcaaactgttcttactcatccagatgattcttaatttggtctgcggccttgtgtgcttgttggcctgctttgtgatgtggaaacataggtaccaggtcttctatgtgggtgtcaggatatgctccctcacggcttccgaaggcccccagcaaaagatctaacattcttgctcaaagttgcgagagaaagtagcacatggagtagctgaggttaaacaaacaaaaaaaaattttaaacaaagaaaggaaaaaaattgacaataaaagtcactcttctaattgaatatttttatatttttatgaaacaaaagagcatttcttcaggtttctattgtattttttttaacattcttgcagagaaagcaagatccaaattgattttgggatattaaaagttaacagaacactgaacaaggaaagaatggcatagatctatctttacagtctggagttaattcctgttaactcattttatccattccttacataatcttctttcctgttagtccagtttgatggtgtgaatggtgaatttcaggcccagttgctaaattttgtggcatcttcctctagtccttcccacctccagtcatcagccccactctgtcttggagacaggcaggaggtgggggaagagctgaatctctttattttccctggtagagacatcttcaaggcatgaaatagcttaaagagcagagtagaaacggaagaggctttgcaaaaggctagataactaacaacacctgggttggggcggcggcctcttctcttcagctcccttagcttggctccgtaagtggatcacttgccaaatgctttagatgattgcctctcaataattgaaaggtggtggtagttgtattctaaatgatgtagaaggtttaaaaataattacattatgcttctattctatcatctaaaacaaatcattaaaactaatttctagctaattgttaattataattatgctcagaagtctatttaatgagctctgactgtacttacgctgcactgtcggtgttaagagaaattactctcacaagagcagaggcctgaagattctttcttctgaaagccaagcaccacaaggaaaaaaaaaattattaatagctcaggttaaaaacacccatttaaacaaaaacaagagcatttgtaataggaagtgtttatacaaacagcacatttgtgatatgttgaaaagcatctctcttggcaaccaatctatgtttgaggaagattgggtaatgctgatgtgttccattcatgaaactgtatttgatacataatcctattattaattcgtatgcttagtcaacctaggaaatcaaaataatgttttgaagttcttatttgagcaatatggccttgacttggagggtagttttagttgttttgtttttaagtgactgtggtttaaagcacaaatgccccaaggtggggagacttctctctgtgattattgttgctattaaattctgaactgtatccatattttaaggaaggagctaaaaatggaaattcatgaaacataaatggtatcaagaactttatcagtatgctttgttgaaagcagaaattaagataataattgagttcaattcgcctctccgcattgcctattgatacactttactaatcatgaaattctaacctaaaaggaaaacattttcctgcttgtcttagaagaaagtggaataattccactgattgtgataatggtttcaatttctacacaatataaatatccagtataaaggaaagcgttaagtcggtaagctagaggattgtaaatatcttttatgtcctctagataaaacacccgattaacagatgttaaaccttttaatgttttgatttgctttaaaaatggccttcctacacattagctccagctaaaaagacacattggagagcttagaggataagtctctggagcagaatttatcacacacaaaagttacaccaacagaataccaagcagaatgatgaggacctgtaaaataccttgtgccctattaaaaaaaaaaaaaaaaaaaaagccagtaactgaatccattttgatttttggttgagtttcctacacaaagaagaaaataactgagaatctggaatgttgtagtccatcctttaaagagtaagaaagtagcagttaatgctagtaaccgtgaattaggcaccactgaaagcacatcccgaatttctttaacaacaacattttatagtgaacactacaagtttttatatttaaaaattaagactctgtatatccttaaggtgctctatgctttaccagtaattcacagggtatttcaaatggtagaatcattttagcttctgtgcttcctttttctaaataatgcaacttgtaagagttgacattgtaataagctttataatagtataaccgtcaggagatatatatatatatatatacacatacacacacacacacacatatatactatacatatataaaatggggatattactattgtatgattaaatcattcttaagtccccaaggaaaaaaaatcataaacaaatagaaagaactaaacagaaaagaaagaaagaaaagatccctttgctatgagctcgctgtatattgataagtgtaagaattgtgttgcatgaataaccgctttgggctggatttgaagtattttgatgttgtgttttgcaaatattgaagttacaataatggcaacagaaaaggaacagatacacagctttacacttagcagaatgttacatttaaaatctgacaaggcgccaagatggtgactgtctcctctaaaccacgaaagagtaagatttgtgcaaccctcctcctcttccacctccttcaggagaattaaatgaatcaagactttggaaagacggggaagagccgggacttggcagtacttgaaacaggaggaatacaccagcctaaatgtacagactttgtagccgagcccactcgatcggtctgtgccttcacgtgaccaccatctgtgcctccctcgctccatccaaatttgtgtaggctgctccttggagctatgcctaaaatatagctacaccagagccctggaaactgtagtcaagtaacaggcctcactgttttttttctttggattaaaagtgtatatctctctactgaggggtttccagctttacacttctataggttgttctgacagtgagaacacattatgtacatgttttctattcatgtccagggcatgagaatcttaatattcttatacttccctttttgcatgcagtatgtctggaatatgtttataaaattttagcaaggggtgagatcaagggacaaaggtagagtggttatttaaagacaatcagaaatgaacttaaaagctgccctgcaaaaccaatcctttcctatcatgaagagtaccttcatattttctagagattgtctctgaaccgttgctacatagccataaatttctgtaaatcatgttggctatcagttcttgctattctcagagcactctatcatgtttttaggtgtatattgtgtattcaggatagcattaaaaagaactgatggcaaatgtattgactcacagtggaaacattcatttggatgaagaattagtggtttagcctttgaaatgaataccttgaatcatttcttctgattttctagtagtttattatctcaaatgattattatccccttcaaaaatactggtctgtactttggtgttgtggattcatttttctggcattgatcaaatagcaaatacaaaataaagcatttctacatgtttgaggtggttgtttttaaaggggatatgtgtaatgcagattttctttattaataaaattttcataatctctgaaaaca

SEQ ID NO: 178947 - DNA, 419 bp, Homo sapiens
  Payload ID: 15272
  Gene Symbol: SSPN
  Gene Name: sarcospan
  ENST ID: ENST00000535504
  CDS Start-End: 1-387
atgggcaagaacaagcagccacgcggccagcagaggcaggggggcccgccggccgcggacgccgctgggcccgacgacatggagccgaagaagggcacgggggcccccaaggagtgcggggaggaggagccccggacctgctgcggctgccggttcccgctgctgctcgccctgctgcagctggccctgggcatcgccgtgaccgtggtgggcttcctcatggcgagcatcagctcctccctgctagtcagggacactccattttgggctgggatcattgtctgcttagtggcctatcttggcttgtttatgctttgtgtctcatatcaggttgacgaacggacatgtattcaattttctatgaaaatccattgtcatgacttctgagctgtttgaaagagaatgttctcagaatcaag

SEQ ID NO: 178948 - DNA, 587 bp, Homo sapiens
  Payload ID: 15272
  Gene Symbol: SSPN
  Gene Name: sarcospan
  Uniprot ID: Q14714
  ENST ID: ENST00000540266
  CDS Start-End: 95-517
attgtaccaggattgatgtgctcggtgcccagaaggcagtaagctctgctccctagcagccttggtctgcttagtggcctatcttggcttgtttatgctttgtgtctcatatcaggttgacgaacggacatgtattcaattttctatgaaactgttatactttctgctgagtgccctgggcctgacggtctgtgtgctggccgtggcctttgccgcccaccactattcgcagctcacacagtttacctgtgagaccacactcgactcttgccagtgcaaactgccctcctcggagccgctcagcaggacctttgtttaccgggatgtgacggactgtaccagcgtcactggcactttcaaactgttcttactcatccagatgattcttaatttggtctgcggccttgtgtgcttgttggcctgctttgtgatgtggaaacataggtaccaggtcttctatgtgggtgtcaggatatgctccctcacggcttccgaaggcccccagcaaaagatctaacattcttgctcaaagttgcgagagaaagtagcacatggagtagctgaggttaaacaaacaaaaaaaaatt

SEQ ID NO: 178949 - DNA, 553 bp, Homo sapiens
  Payload ID: 15272
  Gene Symbol: SSPN
  Gene Name: sarcospan
  ENST ID: ENST00000538142
  CDS Start-End: 193-553
actctgcttgaacctccttaagggtattttaacttctcactctgcttgaacctccgtccttcgggacgcaaggattcagggagcttcctttcctggctgcgagggatcttcctgagcagagctctccgggttccccggctcgcggggcccggcgaagggcaggtctgcttagtggcctatcttggcttgtttatgctttgtgtctcatatcaggttgacgaacggacatgtattcaattttctatgaaactgttatactttctgctgagtgccctgggcctgacggtctgtgtgctggccgtggcctttgccgcccaccactattcgcagctcacacagtttacctgtgagaccacactcgactcttgccagtgcaaactgccctcctcggagccgctcagcaggacctttgtttaccgggatgtgacggactgtaccagcgtcactggcactttcaaactgttcttactcatccagatgattcttaatttggtctgcggccttgtgtgcttgttggcctgctttgtgatgtggaaacataggtaccaggtct

SEQ ID NO: 178950 - DNA, 3880 bp, Homo sapiens
  Payload ID: 15273
  Gene Symbol: SASS6
  Gene Name: SAS-6 centriolar assembly protein
  Uniprot ID: Q6UVJ0
  ENST ID: ENST00000287482
  CDS Start-End: 142-2115
cccctcgtttctccctccccgcctcctccgcagaagccgagcgccaaactcaaactttatcaggacccggacctctcaggctaatcccgagggccgggcctgttgggcttttctgcacaccagccgaggcagcgagccaacatgagccaagtgctgttccaccaactagtcccgttgcaggtgaaatgcaaagactgtgaggagaggagagtaagtataagaatgagcattgaactacaatcagtttctaatccagttcacagaaaggacttagttattcgtctgactgatgacacggatccattttttttatataaccttgttatatctgaggaagattttcaaagtttaaaattccagcaaggtcttctggtagacttcttagctttcccacaaaaatttatagatctccttcagcaatgtactcaagaacatgccaaagaaattccaaggtttttgctacagttagtttctccagcagctattttggataactcacctgcatttttaaatgtggtagagacaaatccttttaagcatcttacacacctctcactaaaacttttacctggaaatgatgtggagataaagaaatttctcgcaggctgtttgaaatgtagcaaggaagaaaaattatcattgatgcaatcactagatgatgctactaagcaactggactttacacgaaagacattagcagaaaaaaaacaagaattagataagttacggaatgaatgggcgtcacatacagcagccttgacaaacaagcattctcaggaactgacaaatgaaaaggaaaaagccttgcaggcacaggttcaatatcaacagcagcatgaacaacagaaaaaagatttagaaatcctccatcaacaaaacatccaccagctacaaaacagactgtctgagttagaagcggctaataaagacttaaccgaaagaaaatataaaggagactccactattagagaacttaaagcaaaactttctggtgttgaagaggagctacagcggactaagcaagaagtcctctctttgcgaagagagaattctacactagatgttgaatgccacgagaaagaaaagcacgttaatcagctacaaacaaaagtggcagttttagaacaggaaatcaaggataaggaccagcttgttttaagaacaaaagaggcatttgatacaatccaggaacaaaaggtggttttagaagaaaatggtgagaaaaatcaagtacaactaggaaagcttgaagctacaataaaatcattatctgcagaacttctgaaggcaaatgaaattatcaagaagttacaaggggatctgaaaactttaatgggtaagttgaaattgaagaatacagttactattcagcaagaaaaactcttggctgagaaggaggaaaaattacaaaaggaacaaaaggaattacaagatgttggacagtctcttcgaattaaagagcaagaggtatgcaaattacaagaacaattagaagctacagttaaaaaacttgaagaaagcaaacaacttctaaaaaataatgaaaagttaatcacgtggttaaataaagaactaaatgaaaatcagctagtgagaaagcaagatgtattgggaccttctactactccgcctgcacattccagcagcaacacaatcagaagtggaatttctcctaacctgaatgtggttgatggtagactgacttacccaacctgtgggattggttatcctgtctcctctgcatttgcattccagaataccttccctcattcgatatctgccaaaaataccagccaccctggttcaggaacaaaggttcagtttaatttgcagtttacaaaaccaaatgcatcactaggagatgttcagtcaggagcaactattagtatgccttgctcaactgataaggaaaatggtgaaaatgtagggttggaatccaaatacctgaagaaaagggaagatagcattcctttacgcggactcagccagaacctatttagtaattcagaccatcagagagatggcactttaggagcattacatacatcttccaaacccacagcgctcccctctgcgtcttcagcctatttccctgggcagttaccaaacagttaattctagtgtcatgttttactttttattggtattttagaaactcaggtgcttaaaaaatatgtcaacacaaaccagatcctcaaatagcaagtttcaaattttacttgagctgttaaagactggatactttaagtactgcttttatggcagtttataatataggaacaaatttgtacttggggattggtaaagattgtgagtaaatgacattttttggtttgtgaacatggcgttttatagaataatatgaattttattaagctattctttagaaattcagttctaaggaaagagttgatccttatgagggagattctgatcatattaaaaatctgggtaaactaaaacctgctcataacctcatagtatgcaaccaaagaatactaattcattttatcactttcattggtaaaacttttaaattcaacacctgaaaatcatgagggaaaatgattacctcttgagatatattattgatgacatttaaagggaaaagtcctaaatttaccttaaataactgaaatgaattaagccttcatagcgtattttccttgaagcatttaaatttgctagtgatgaatcaaataaatttgatatacttaaaataatttggacagtttttatgtgaccagattaagtgcttttgtcatttgagctgacaagtttttaaaacttcagtgcttcctaaatgtttatactcatctagtttttctcaatttgtagttttattatgcagttaaatctgtatcagtggacttttaaaacttggtactactactaaatctactatatcatgaatattcatttatttttatagtatcagaacttgggttgatttcaatgttaataaactaggcaaaacaaataactgttagaaggtacaattttcttctcttccctgtaactgaaagttttaagaattgttccttggggaaaaatttttttaaaattcacctagaatcatagggcctcattttgttttcttattgacaaacaatacctggtagcattctctaaagagtcttctagatcaatttttataaagtactaatgctcatgtgataatttaaaattattttcaactactttattacacagatgaagaaacatttcaagatattgatgtaataacattactgagtcccatggtaagaaagaatctttgctaattttttttttttttttacgaagccagtatcttgaaactattggcaattgcaagtgtctttaaactagggatctaatctgaaaattcagtaactaatattaggcagttgatactcccccacctcccccatttagatacactactgtattagtgagaatacttggtacagtaacttgaaagcacttgctattctggaaagaagcctcttggtgattttggaaggagctttattgtaaatactatggaaggggctttgttgtaaatactatgtaatatatataaaatattgtgacatgttttggatgggatgcatgacatacaggtagctctcttttttaaaatataggtatctctttgcatatatatacacaaggaaagttgaattttcaggagagatcattctgatatcttgcaaatttgtattaaatgtatacagacttccaagtgtgctaattctttacctcctaaacttttagttgcaattgttttgcagtgtaaaattgtacatgtgttaataatcaaaaagtgttgcatttaatgttatttctgtaaactttgagctttgttaataaactattatgcagcatctacactttg

SEQ ID NO: 178951 - DNA, 7810 bp, Homo sapiens
  Payload ID: 15274
  Gene Symbol: SATB1
  Gene Name: SATB homeobox 1
  Uniprot ID: Q01826
  ENST ID: ENST00000338745
  CDS Start-End: 1736-4027
tttctcgctcgctcccgttccccggacgcggcggatgagccggccccgctggggaaggctccgggcggcggcgggcggccgggaggaggctgcgtgctcggggctggggctgcgagcggggtgattttgtattaaaatgaggaggaggaagaagaggcacccacagcggcagcggcggcggcggcggcagcagcagcaggagcagcggcggagagggctgcagcccgggcggacgcgcggagccgagcggggcacggcggcggcagcgacagcggccgggatgagtcaactaataatttaatgggggcagagacggcagcgaggggtagagctagcgagggagagagcgagagaagcagccccgtccggggactcgcgctcacactcacgcacacacacaaacacacacacacctctccctgtgccacccagcaacacccggcctcgtcacaacaacaacagccgcggccgccctctatcctgcccgggggcccagccgaaagccagggcgactctagaggacgctgcccgcccccctctttcatttcgggaaactcctgatcagttttgtcggggtttctgggtttcttttcccccaaagtcctagtgccattgtggtgctcgttgtttacctcggactctggacgagtgagagcttggcgactttttggggggagggggcggggagtttgtcgctgcctaggcggtggaggtggctgggggtgccttctgatcttcctcctcctccccctccccccgaacctcttctctcctcacttgctgggaccccagacgctcacagccccgcgtcaatgggcagggagagggtccttgcggctgttgtcagcgagggcagaatcaaaagtggcattttagtgcctttccggggcttttctcgcgaccccctgccccccaccctcgctgtcccccgctagatgccctcgttgggggtgcgaggctgtggggaaaagtttaaggtttgttaatattagtcgcgattgttggcgaggggggtgggggtgattggaagggaggcgaggtggccttcccaatgcgcgttattcggggttattgaagaataatattgcaagtgacagccagaagtagactttctgtcctcacaccgaagaacccgagtgagcaggagggagggagagacgcgaagagaccttttttcctttttggagaccttgtccgcagtgatttttttttttttaagagaatcctcagtcaccacgtcgtttccccagcaccatcacagtgtacagctcataacgggttttgctttgtttttacgatttccccccaacgaatcacttgtcagatcaattttatcttcttcctcctccctgcttcccactctcccctcctccccatcgcaaaccctgttctctgaggttagacattttacaaacccctatatgttggttttcgaattgtgattttttttttaaacccctttctcatggctactcttctagacgtttatttctgcccttcccccgcttaggggggcgggggtaggggaaaggaaaataatacaatttcaggggaagtcgccttcaggtctgctgcttttttatttttttttttttaattaaaaaaaaaaaggacatagaaaacatcagtcttgaacttctcttcaagaacccgggctgcaaaggaaatctcctttgtttttgttatttatgtgctgtcaagttttgaagtggtgatctttagacagtgactgagtatggatcatttgaacgaggcaactcaggggaaagaacattcagaaatgtctaacaatgtgagtgatccgaagggtccaccagccaagattgcccgcctggagcagaacgggagcccgctaggaagaggaaggcttgggagtacaggtgcaaaaatgcagggagtgcctttaaaacactcgggccatctgatgaaaaccaaccttaggaaaggaaccatgctgccagttttctgtgtggtggaacattatgaaaacgccattgaatatgattgcaaggaggagcatgcagaatttgtgctggtgagaaaggatatgcttttcaaccagctgatcgaaatggcattgctgtctctaggttattcacatagctctgctgcccaggccaaagggctaatccaggttggaaagtggaatccagttccactgtcttacgtgacagatgcccctgatgctacagtagcagatatgcttcaagatgtgtatcatgtggtcacattgaaaattcagttacacagttgccccaaactagaagacttgcctcccgaacaatggtcgcacaccacagtgaggaatgctctgaaggacttactgaaagatatgaatcagagttcattggccaaggagtgccccctttcacagagtatgatttcttccattgtgaacagtacttactatgcaaatgtctcagcagcaaaatgtcaagaatttggaaggtggtacaaacatttcaagaagacaaaagatatgatggttgaaatggatagtctttctgagctatcccagcaaggcgccaatcatgtcaattttggccagcaaccagttccagggaacacagccgagcagcctccatcccctgcgcagctctcccatggcagccagccctctgtccggacacctcttccaaacctgcaccctgggctcgtatcaacacctatcagtcctcaattggtcaaccagcagctggtgatggctcagctgctgaaccagcagtatgcagtgaatagacttttagcccagcagtccttaaaccaacaatacttgaaccaccctccccctgtcagtagatctatgaataagcctttggagcaacaggtttcgaccaacacagaggtgtcttccgaaatctaccagtgggtacgcgatgaactgaaacgagcaggaatctcccaggcggtatttgcacgtgtggcttttaacagaactcagggcttgctttcagaaatcctccgaaaggaagaggaccccaagactgcatcccagtctttgctggtaaaccttcgggctatgcagaatttcttgcagttaccggaagctgaaagagaccgaatataccaggacgaaagggaaaggagcttgaatgctgcctcggccatgggtcctgcccccctcatcagcacaccacccagccgtcctccccaggtgaaaacagctactattgccactgaaaggaatgggaaaccagagaacaataccatgaacattaatgcttccatttatgatgagattcagcaggaaatgaagcgtgctaaagtgtctcaagcactgtttgcaaaggttgcagcaaccaaaagccagggatggttgtgcgagctgttacgctggaaagaagatccttctccagaaaacagaaccctgtgggagaacctctccatgatccgaaggttcctcagtcttcctcagccagaacgtgatgccatttatgaacaggagagcaacgcggtgcatcaccatggcgacaggccgccccacattatccatgttccagcagagcagattcagcaacagcagcagcaacagcaacagcagcagcagcagcagcaggcaccgccgcctccacagccacagcagcagccacagacaggccctcggctccccccacggcaacccacggtggcctctccagcagagtcagatgaggaaaaccgacagaagacccggccacgaacaaaaatttcagtggaagccttgggaatcctccagagtttcatacaagacgtgggcctgtaccctgacgaagaggccatccagactctgtctgcccagctcgaccttcccaagtacaccatcatcaagttctttcagaaccagcggtactatctcaagcaccacggcaaactgaaggacaattccggtttagaggtcgatgtggcagaatataaagaagaggagctgctgaaggatttggaagagagtgtccaagataaaaatactaacacccttttttcagtgaaactagaagaagagctgtcagtggaaggaaacacagacattaatactgatttgaaagactgagataaaagtatttgtttcgttcaacagtgccactggtatttactaacaaaatgaaaagtccaccttgtcttctctcagaaaacctttgttgttcattgtttggccaatgaatcttcaaaaacttgcacaaacagaaaagttggaaaaggataatacagactgcactaaatgttttcctctgttttacaaactgcttggcagccccaggtgaagcatcaaggattgtttggtattaaaatttgtgttcacgggatgcaccaaagtgtgtaccccgtaagcatgaaaccagtgttttttgttttttttttagttcttattccggagcctcaaacaagcattataccttctgtgattatgatttcctctcctataattatttctgtagcactccacactgatctttggaaacttgccccttatttaaaaaaaaaaaagaaaaaaaagagtttgttactctattgtatgttacaaaagaactatagactgtggaatgcagtttaaagatgacatatgccaacaaatgccttgtattatatggcactgccgtaattcaaatttgtttttattttggaaataaaagttcactgtacttttttttcattctcattgttacatgattttttaaaaaaaggaaaagaaaatgtgaaacacaatttagtcctcattatttatttgtagatcctgcagcatcatgttgtaattaattttttggaagtttccgttaaatgtaatattgcttctcttgttaccatactgattcttttctatttataaatgtattttgatgggcagtaaaacaaagtgtcttaaaagttttaaatagagaaaatgtgctttacacagttgcctataaaaagtgctctatgttatccaagcaattcatactataagcttcactcttattgttgtatgcaatttttactatcatgcaaataagcttaggtaaataaaactaatagatcaccttagaaaattatgcaattaatgtgaaaataattgatgtttgcaatgtgtcttcctttggtttacaatcaattttaaagctacatctgtataaaatttctgtataaaggtgtatttcttttttatgagtttatggctatgaaaacagctattttgttacagctggctgtttttataagtgtatcacaattttctttatgcagaaatgttctgactaggagtggttattgactgtaactacacaattaaaattgtttgtatcgtatgacatggtagggtttgtctgcttatgtgaagtaactaaaggagtcaaaggatggccctctcatttaggtgcatgttaataacttgttatttcactgattttaaaaagagcaattgacaagttacttgaaacactgtaaatttaaatcacaaacacatgctcatttttaaataggtatgaaatttcacaatgaaaataacctgtttggttaacattttgcttaataagtagagataggatggtcaaaagactctccgacaaaaacaaatccagtctctagcagttatgttgttagaatggattcatctgtgcttatttcacaatacttcatttatagcaatgcttttccttaagctaatgtataaatatttctaaaggccattaatagtaacaaaataagtaggggaaaaaatggaccttctgtataaaaaccccttagcttttttttttcacaagttataagtggaataagttaataactgagctcgtaagtgtatctcataactataagagctacatgaagaaaataggaataacacacctggtatttaaacacaatcttcaaaattcttgcaacattaaacatagtaaaatgccagaatataaaatgaggtgtgctaatggtcacaggattgaggccagcattacagtttggggtgatttttcttttatttgctccctcactttgtttcctagatgctagtaggggtatctgggttgcttgagataccattttgcaattgccccttctctttctgcctaccatcttctcaggccctgatgagcttattggtaggcaactgggctgctttagtgttgaacttgtactttagaaactgaagtggaatcattgaaaactttcaataaagctttaaagttccatttacttttgaagcacagctaagctcctctgaaggcagctggtttgttgcaaacttaaaattgtactgaaaagttgccactttttatttagtaagaaaacaaacattctggctcactagagttcagaaaagtaataatttgagccaaaggaatttgaattaagaaaatagaaactaggtttcatgtatttaaaaaataggaaataaaatagaaactcaaatgccatgaagttatcttcctcttccttatatcccctaagtttgggttgcaaataactttccaattcctaataacctaaattattttgaaatagtgttttcagtgaaatgatgaatgtttgaatgtttgtttggtaatcaacataacaatgctaacaaaattcccacttagattttttaacttttaaaagtcagcgtggttttgataatttgatattttaaatgcccacacatacacacacacacacacacacacacacacaagcacatgttaataaactgataggatggagtgagcaaaattgttttcagggaagatggcacattttagaaaagacttgcccagatgatcttccatattgctcccccaatgtcatttatcgctcatgccaatcctcctcttgttacctgtggctatggtaaaattcctttaacaagcttcattgtgtccaagtatttcagagacttttaaaagctgggcatgacatagcgttttgtgctgttaagaccttagcagagtcaggtagtttacgggtaatattcaaccttgtgcatctgaatctgtcatggattcccttcactcagcactttgccactaatttgtattacactctgtggccatataatacttgcacattatgcaaaaaaaaatgttgatagtatctccttgccacacaatatgcagagttgacaacctttgaaaaccaaggtaactaatatgtatgtcctagttgtgtggcgcttggtaacaaagtctgtacatattatgtataaaatgtgtattggttagcatttagtactaagaaattctgagtttaaaataagtgatttttttcaaagtagcgatatctatatctgtgtttatctaaaaatactggcttgaatagaaaacattctcagatgattcaagattgagtaaaaatgagaatcccatacattccattattaaattctgccctattcccaattgttagcatctggctgatattaaggtctttgattgtcacaatattctcaataaatgagacattctgaactgcctggtgatattttcaaaaagagcaattaaaatgtgtattccctctaatacagctgatagaactgttgtgttaaagcaagttggaaatttgcatgatagtgtggaaaccaatggaggtccaaaatattaatcatatctaaaatatcagaaaatatcaatactagtcttctttatgcatatttttgactttttaagagggcttatgaattcaatgtttcttctgaggcaatccttttaatgtaaatactaaatacttgcatgtcttttgacaaaggctaaactacaatctattaatatgcacatttttgataaaatataaagtaccctaattaaagaaattgtggtagaaggtgtatgtcctgaatactatacctgtttaacaataccaaatgttaaataaaaatagtttgaaatta

SEQ ID NO: 178952 - DNA, 594 bp, Homo sapiens
  Payload ID: 15274
  Gene Symbol: SATB1
  Gene Name: SATB homeobox 1
  ENST ID: ENST00000415069
  CDS Start-End: 96-594
aaacaacaagcaacaagaggaagccgcaggcgacaagaggaggagtgcgcgtgttgggggcccccggagaggtgatctttagacagtgactgagtatggatcatttgaacgaggcaactcaggggaaagaacattcagaaatgtctaacaatgtgagtgatccgaagggtccaccagccaagattgcccgcctggagcagaacgggagcccgctaggaagaggaaggcttgggagtacaggtgcaaaaatgcagggagtgcctttaaaacactcgggccatctgatgaaaaccaaccttaggaaaggaaccatgctgccagttttctgtgtggtggaacattatgaaaacgccattgaatatgattgcaaggaggagcatgcagaatttgtgctggtgagaaaggatatgcttttcaaccagctgatcgaaatggcattgctgtctctaggttattcacatagctctgctgcccaggccaaagggctaatccaggttggaaagtggaatccagttccactgtcttacgtgacagatgcccctgatgctacagtagcagatatgcttcaagatgtgtatcatgtggtcacattga

SEQ ID NO: 178953 - DNA, 579 bp, Homo sapiens
  Payload ID: 15274
  Gene Symbol: SATB1
  Gene Name: SATB homeobox 1
  ENST ID: ENST00000444341
  CDS Start-End: 368-579
tttttgcaccattatgcattcctacttctccctctttctttaagcatggagaagcctacttaaccttattataacaataacagaataggttattaatatttaatatgcacatgattaaaatttctctcccttaaacataggtcagctgtattattactaaccggcatgtaatttttcatttaaaatattggtattctgccccatgccgtttctgaaatgcagtctactttagtagtgatttaatacacaacgtttagaaaattgtggtcggctagtgagaaaagaatttaccagtcatggataatcaattatgcatgaattcagatgtaacagatggaatctggtgatctttagacagtgactgagtatggatcatttgaacgaggcaactcaggggaaagaacattcagaaatgtctaacaatgtgagtgatccgaagggtccaccagccaagattgcccgcctggagcagaacgggagcccgctaggaagaggaaggcttgggagtacaggtgcaaaaatgcagggagtgcctttaaaacactcgggccatctgatgaaaaccaaccttaggaaagg

SEQ ID NO: 178954 - DNA, 464 bp, Homo sapiens
  Payload ID: 15274
  Gene Symbol: SATB1
  Gene Name: SATB homeobox 1
  ENST ID: ENST00000450898
  CDS Start-End: 441-464
tcctcctccgccgccgccgccgccgccgccactttctcgctcgctcccgttccccggacgcggcggatgagccggccccgctggggaaggctccgggcggcggcgggcggccgggaggaggctgcgtgctcggggctggggctgcgagcggggtgattttgtattaaaatgaggaggaggaagaagaggcacccacagcggcagcggcggcggcggcggcagcagcagcaggagcagcggcggagagggctgcagcccgggcggacgcgcggagccgagcggggcacggcggcggcagcgacagcggccgggatgagacatagaaaacatcagtcttgaacttctcttcaagaacccgggctgcaaaggaaatctcctttgtttttgttatttatgtgctgtcaagttttgaagtggtgatctttagacagtgactgagtatggatcatttgaacgaggcaact

SEQ ID NO: 178955 - DNA, 564 bp, Homo sapiens
  Payload ID: 15274
  Gene Symbol: SATB1
  Gene Name: SATB homeobox 1
  ENST ID: ENST00000457005
  CDS Start-End: 176-564
aaagtcctagtgccattgtggtgctcgttgtttacctcggactctggacgagacatagaaaacatcagtcttgaacttctcttcaagaacccgggctgcaaaggaaatctcctttgtttttgttatttatgtgctgtcaagttttgaagtggtgatctttagacagtgactgagtatggatcatttgaacgaggcaactcaggggaaagaacattcagaaatgtctaacaatgtgagtgatccgaagggtccaccagccaagattgcccgcctggagcagaacgggagcccgctaggaagaggaaggcttgggagtacaggtgcaaaaatgcagggagtgcctttaaaacactcgggccatctgatgaaaaccaaccttaggaaaggaaccatgctgccagttttctgtgtggtggaacattatgaaaacgccattgaatatgattgcaaggaggagcatgcagaatttgtgctggtgagaaaggatatgcttttcaaccagctgatcgaaatggcattgctgtctctaggttattcacatagctctgctgcccaggccaaagg

SEQ ID NO: 178956 - DNA, 4589 bp, Homo sapiens
  Payload ID: 15274
  Gene Symbol: SATB1
  Gene Name: SATB homeobox 1
  Uniprot ID: Q01826
  ENST ID: ENST00000417717
  CDS Start-End: 972-3359
cttctctcctcacttgctgggaccccagacgctcacagccccgcgtcaatgggcagggagagggtccttgcggctgttgtcagcgagggcagaatcaaaagtggcattttagtgcctttccggggcttttctcgcgaccccctgccccccaccctcgctgtcccccgctagatgccctcgttgggggtgcgaggctgtggggaaaagtttaaggtttgttaatattagtcgcgattgttggcgaggggggtgggggtgattggaagggaggcgaggtggccttcccaatgcgcgttattcggggttattgaagaataatattgcaagtgacagccagaagtagactttctgtcctcacaccgaagaacccgagtgagcaggagggagggagagacgcgaagagaccttttttcctttttggagaccttgtccgcagtgatttttttttttttaagagaatcctcagtcaccacgtcgtttccccagcaccatcacagtgtacagctcataacgggttttgctttgtttttacgatttccccccaacgaatcacttgtcagatcaattttatcttcttcctcctccctgcttcccactctcccctcctccccatcgcaaaccctgttctctgaggttagacattttacaaacccctatatgttggttttcgaattgtgattttttttttaaacccctttctcatggctactcttctagacgtttatttctgcccttcccccgcttaggggggcgggggtaggggaaaggaaaataatacaatttcaggggaagtcgccttcaggtctgctgcttttttatttttttttttttaattaaaaaaaaaaaggacatagaaaacatcagtcttgaacttctcttcaagaacccgggctgcaaaggaaatctcctttgtttttgttatttatgtgctgtcaagttttgaagtggtgatctttagacagtgactgagtatggatcatttgaacgaggcaactcaggggaaagaacattcagaaatgtctaacaatgtgagtgatccgaagggtccaccagccaagattgcccgcctggagcagaacgggagcccgctaggaagaggaaggcttgggagtacaggtgcaaaaatgcagggagtgcctttaaaacactcgggccatctgatgaaaaccaaccttaggaaaggaaccatgctgccagttttctgtgtggtggaacattatgaaaacgccattgaatatgattgcaaggaggagcatgcagaatttgtgctggtgagaaaggatatgcttttcaaccagctgatcgaaatggcattgctgtctctaggttattcacatagctctgctgcccaggccaaagggctaatccaggttggaaagtggaatccagttccactgtcttacgtgacagatgcccctgatgctacagtagcagatatgcttcaagatgtgtatcatgtggtcacattgaaaattcagttacacagttgccccaaactagaagacttgcctcccgaacaatggtcgcacaccacagtgaggaatgctctgaaggacttactgaaagatatgaatcagagttcattggccaaggagtgccccctttcacagagtatgatttcttccattgtgaacagtacttactatgcaaatgtctcagcagcaaaatgtcaagaatttggaaggtggtacaaacatttcaagaagacaaaagatatgatggttgaaatggatagtctttctgagctatcccagcaaggcgccaatcatgtcaattttggccagcaaccagttccagggaacacagccgagcagcctccatcccctgcgcagctctcccatggcagccagccctctgtccggacacctcttccaaacctgcaccctgggctcgtatcaacacctatcagtcctcaattggtcaaccagcagctggtgatggctcagctgctgaaccagcagtatgcagtgaatagacttttagcccagcagtccttaaaccaacaatacttgaaccaccctccccctgtcagtagatctatgaataagcctttggagcaacaggtttcgaccaacacagaggtgtcttccgaaatctaccagtgggtacgcgatgaactgaaacgagcaggaatctcccaggcggtatttgcacgtgtggcttttaacagaactcagggcttgctttcagaaatcctccgaaaggaagaggaccccaagactgcatcccagtctttgctggtaaaccttcgggctatgcagaatttcttgcagttaccggaagctgaaagagaccgaatataccaggacgaaagggaaaggagcttgaatgctgcctcggccatgggtcctgcccccctcatcagcacaccacccagccgtcctccccaggtgaaaacagctactattgccactgaaaggaatgggaaaccagagaacaataccatgaacattaatgcttccatttatgatgagattcagcaggaaatgaagcgtgctaaagtgtctcaagcactgtttgcaaaggttgcagcaaccaaaagccagggatggttgtgcgagctgttacgctggaaagaagatccttctccagaaaacagaaccctgtgggagaacctctccatgatccgaaggttcctcagtcttcctcagccagaacgtgatgccatttatgaacaggagagcaacgcggtgcatcaccatggcgacaggccgccccacattatccatgttccagcagagcagattcagagcccctctcccaccacccttgggaaaggagagtctagaggcgttttcttaccaggcctgccgacccctgcaccatggctcggtgctgctcctcagcaacagcagcagcaacagcaacagcagcagcagcagcagcaggcaccgccgcctccacagccacagcagcagccacagacaggccctcggctccccccacggcaacccacggtggcctctccagcagagtcagatgaggaaaaccgacagaagacccggccacgaacaaaaatttcagtggaagccttgggaatcctccagagtttcatacaagacgtgggcctgtaccctgacgaagaggccatccagactctgtctgcccagctcgaccttcccaagtacaccatcatcaagttctttcagaaccagcggtactatctcaagcaccacggcaaactgaaggacaattccggtttagaggtcgatgtggcagaatataaagaagaggagctgctgaaggatttggaagagagtgtccaagataaaaatactaacacccttttttcagtgaaactagaagaagagctgtcagtggaaggaaacacagacattaatactgatttgaaagactgagataaaagtatttgtttcgttcaacagtgccactggtatttactaacaaaatgaaaagtccaccttgtcttctctcagaaaacctttgttgttcattgtttggccaatgaatcttcaaaaacttgcacaaacagaaaagttggaaaaggataatacagactgcactaaatgttttcctctgttttacaaactgcttggcagccccaggtgaagcatcaaggattgtttggtattaaaatttgtgttcacgggatgcaccaaagtgtgtaccccgtaagcatgaaaccagtgttttttgttttttttttagttcttattccggagcctcaaacaagcattataccttctgtgattatgatttcctctcctataattatttctgtagcactccacactgatctttggaaacttgccccttatttaaaaaaaaaaaagaaaaaaaagagtttgttactctattgtatgttacaaaagaactatagactgtggaatgcagtttaaagatgacatatgccaacaaatgccttgtattatatggcactgccgtaattcaaatttgtttttattttggaaataaaagttcactgtacttttttttcattctcattgttacatgattttttaaaaaaaggaaaagaaaatgtgaaacacaatttagtcctcattatttatttgtagatcctgcagcatcatgttgtaattaattttttggaagtttccgttaaatgtaatattgcttctcttgttaccatactgattcttttctatttataaatgtattttgatgggcagtaaaacaaagtgtcttaaaagttttaaatagagaaaatgtgctttacacagttgcctataaaaagtgctctatgttatccaagcaattcatactataagcttcactcttattgttgtatgcaatttttactatcatgcaaataagcttaggtaaataaaactaatagatcaccttagaaaattatgcaattaatgtgaaaataattgatgtttgcaatgtgtcttcctttggtttacaatcaattttaaagctacatctgtataaaatttctgtataaaggtgtatttcttttttatgagtttatggctatgaaaacagctattttgttacagctggctgtttttataagtgtatcacaattttctttatgcagaaatgttctgactaggagtggttattgactgtaactacacaattaaaattgtttgtatcgtatg

SEQ ID NO: 178957 - DNA, 3755 bp, Homo sapiens
  Payload ID: 15274
  Gene Symbol: SATB1
  Gene Name: SATB homeobox 1
  Uniprot ID: Q01826
  ENST ID: ENST00000454909
  CDS Start-End: 234-2525
agagctatgacctgatttgtgacgcaccctcagaactgcagtaatggtccagctgcttcacaggcaactggtaaccacctcatttggggatgtttctgccttgctagcagtgccagagagaacttcatcattgtcacctcatcaaagactactttttcagacatctcctgtagggctagattcagagagcagcttctgatatttggagggtgatctttagacagtgactgagtatggatcatttgaacgaggcaactcaggggaaagaacattcagaaatgtctaacaatgtgagtgatccgaagggtccaccagccaagattgcccgcctggagcagaacgggagcccgctaggaagaggaaggcttgggagtacaggtgcaaaaatgcagggagtgcctttaaaacactcgggccatctgatgaaaaccaaccttaggaaaggaaccatgctgccagttttctgtgtggtggaacattatgaaaacgccattgaatatgattgcaaggaggagcatgcagaatttgtgctggtgagaaaggatatgcttttcaaccagctgatcgaaatggcattgctgtctctaggttattcacatagctctgctgcccaggccaaagggctaatccaggttggaaagtggaatccagttccactgtcttacgtgacagatgcccctgatgctacagtagcagatatgcttcaagatgtgtatcatgtggtcacattgaaaattcagttacacagttgccccaaactagaagacttgcctcccgaacaatggtcgcacaccacagtgaggaatgctctgaaggacttactgaaagatatgaatcagagttcattggccaaggagtgccccctttcacagagtatgatttcttccattgtgaacagtacttactatgcaaatgtctcagcagcaaaatgtcaagaatttggaaggtggtacaaacatttcaagaagacaaaagatatgatggttgaaatggatagtctttctgagctatcccagcaaggcgccaatcatgtcaattttggccagcaaccagttccagggaacacagccgagcagcctccatcccctgcgcagctctcccatggcagccagccctctgtccggacacctcttccaaacctgcaccctgggctcgtatcaacacctatcagtcctcaattggtcaaccagcagctggtgatggctcagctgctgaaccagcagtatgcagtgaatagacttttagcccagcagtccttaaaccaacaatacttgaaccaccctccccctgtcagtagatctatgaataagcctttggagcaacaggtttcgaccaacacagaggtgtcttccgaaatctaccagtgggtacgcgatgaactgaaacgagcaggaatctcccaggcggtatttgcacgtgtggcttttaacagaactcagggcttgctttcagaaatcctccgaaaggaagaggaccccaagactgcatcccagtctttgctggtaaaccttcgggctatgcagaatttcttgcagttaccggaagctgaaagagaccgaatataccaggacgaaagggaaaggagcttgaatgctgcctcggccatgggtcctgcccccctcatcagcacaccacccagccgtcctccccaggtgaaaacagctactattgccactgaaaggaatgggaaaccagagaacaataccatgaacattaatgcttccatttatgatgagattcagcaggaaatgaagcgtgctaaagtgtctcaagcactgtttgcaaaggttgcagcaaccaaaagccagggatggttgtgcgagctgttacgctggaaagaagatccttctccagaaaacagaaccctgtgggagaacctctccatgatccgaaggttcctcagtcttcctcagccagaacgtgatgccatttatgaacaggagagcaacgcggtgcatcaccatggcgacaggccgccccacattatccatgttccagcagagcagattcagcaacagcagcagcaacagcaacagcagcagcagcagcagcaggcaccgccgcctccacagccacagcagcagccacagacaggccctcggctccccccacggcaacccacggtggcctctccagcagagtcagatgaggaaaaccgacagaagacccggccacgaacaaaaatttcagtggaagccttgggaatcctccagagtttcatacaagacgtgggcctgtaccctgacgaagaggccatccagactctgtctgcccagctcgaccttcccaagtacaccatcatcaagttctttcagaaccagcggtactatctcaagcaccacggcaaactgaaggacaattccggtttagaggtcgatgtggcagaatataaagaagaggagctgctgaaggatttggaagagagtgtccaagataaaaatactaacacccttttttcagtgaaactagaagaagagctgtcagtggaaggaaacacagacattaatactgatttgaaagactgagataaaagtatttgtttcgttcaacagtgccactggtatttactaacaaaatgaaaagtccaccttgtcttctctcagaaaacctttgttgttcattgtttggccaatgaatcttcaaaaacttgcacaaacagaaaagttggaaaaggataatacagactgcactaaatgttttcctctgttttacaaactgcttggcagccccaggtgaagcatcaaggattgtttggtattaaaatttgtgttcacgggatgcaccaaagtgtgtaccccgtaagcatgaaaccagtgttttttgttttttttttagttcttattccggagcctcaaacaagcattataccttctgtgattatgatttcctctcctataattatttctgtagcactccacactgatctttggaaacttgccccttatttaaaaaaaaaaaagaaaaaaaagagtttgttactctattgtatgttacaaaagaactatagactgtggaatgcagtttaaagatgacatatgccaacaaatgccttgtattatatggcactgccgtaattcaaatttgtttttattttggaaataaaagttcactgtacttttttttcattctcattgttacatgattttttaaaaaaaggaaaagaaaatgtgaaacacaatttagtcctcattatttatttgtagatcctgcagcatcatgttgtaattaattttttggaagtttccgttaaatgtaatattgcttctcttgttaccatactgattcttttctatttataaatgtattttgatgggcagtaaaacaaagtgtcttaaaagttttaaatagagaaaatgtgctttacacagttgcctataaaaagtgctctatgttatccaagcaattcatactataagcttcactcttattgttgtatgcaatttttactatcatgcaaataagcttaggtaaataaaactaatagatcaccttagaaaattatgcaattaatgtgaaaataattgatgtttgcaatgtgtcttcctttggtttacaatcaattttaaagctacatctgtataaaatttctgtataaaggtgtatttcttttttatgagtttatggctatgaaaacagctattttgttacagctggctgtttttataagtgtatcacaattttctttatgcagaaatgttctgactaggagtggttattgactgtaactacacaattaaaattgtttgtatcgtatg

SEQ ID NO: 178958 - DNA, 975 bp, Homo sapiens
  Payload ID: 15274
  Gene Symbol: SATB1
  Gene Name: SATB homeobox 1
  ENST ID: ENST00000440737
  CDS Start-End: 302-975
ctccttctcttccttcccttggccccgcgcgctcgctcgctcgctcctcgcctcgctctcccctttaaacgcccacttcgtatggggaaagaggacaacttgaagtcaagttgcaattaacttccgcggcagccgcagctccggcggcggcggcggcggcaggagaggcagaagccgccgcctcggaagtccgacgccggcgcgcccgcccggggagccgttcttggtttcaggcccgcactcgacagccaccgccgcccccaacgtccatgcctgagtgatctttagacagtgactgagtatggatcatttgaacgaggcaactcaggggaaagaacattcagaaatgtctaacaatgtgagtgatccgaagggtccaccagccaagattgcccgcctggagcagaacgggagcccgctaggaagaggaaggcttgggagtacaggtgcaaaaatgcagggagtgcctttaaaacactcgggccatctgatgaaaaccaaccttaggaaaggaaccatgctgccagttttctgtgtggtggaacattatgaaaacgccattgaatatgattgcaaggaggagcatgcagaatttgtgctggtgagaaaggatatgcttttcaaccagctgatcgaaatggcattgctgtctctaggttattcacatagctctgctgcccaggccaaagggctaatccaggttggaaagtggaatccagttccactgtcttacgtgacagatgcccctgatgctacagtagcagatatgcttcaagatgtgtatcatgtggtcacattgaaaattcagttacacagttgccccaaactagaagacttgcctcccgaacaatggtcgcacaccacagtgaggaatgctctgaaggacttactgaaagatatgaatcagagttcattggccaaggagtgccccctttcacagagtatgatttcttccattgtgaacagtacttacta

SEQ ID NO: 178959 - DNA, 939 bp, Homo sapiens
  Payload ID: 15274
  Gene Symbol: SATB1
  Gene Name: SATB homeobox 1
  ENST ID: ENST00000452260
  CDS Start-End: 422-939
ttattaaagtgtttctgctgtattttgtaatgtgtttctaattgttaaaaattgggactacgtaaatgcaatttgctgttttctttttagctatacttgtaataattcttgttctaaaagtaagcccatttttccccacttagtttttttataggccagttatctttttattcatgtgtattggtacagtttccacagatcattttgttaatttgaataagaatgtaatgctatcatctagaaatatagtaacatctgtatcatatctagataggccattttacaaatacattatatttgtggagagatatctagagctaaaacatttacataggacacatatatacacgtaggtccccgcccaactataacgtgtcttctttttaaattctggcaggtgatctttagacagtgactgagtatggatcatttgaacgaggcaactcaggggaaagaacattcagaaatgtctaacaatgtgagtgatccgaagggtccaccagccaagattgcccgcctggagcagaacgggagcccgctaggaagaggaaggcttgggagtacaggtgcaaaaatgcagggagtgcctttaaaacactcgggccatctgatgaaaaccaaccttaggaaaggaaccatgctgccagttttctgtgtggtggaacattatgaaaacgccattgaatatgattgcaaggaggagcatgcagaatttgtgctggtgagaaaggatatgcttttcaaccagctgatcgaaatggcattgctgtctctaggttattcacatagctctgctgcccaggccaaagggctaatccaggttggaaagtggaatccagttccactgtcttacgtgacagatgcccctgatgctacagtagcagatatgcttcaagatgtgtatcatgtggtcacattgaaaattcagttacacaggtg

SEQ ID NO: 178960 - DNA, 583 bp, Homo sapiens
  Payload ID: 15274
  Gene Symbol: SATB1
  Gene Name: SATB homeobox 1
  ENST ID: ENST00000414509
  CDS Start-End: 236-583
atttggggatgtttctgccttgctagcagtgccagagagaacttcatcattgtcacctcatcaaagactactttttcagacatctcctgtagggctagattcagagagcagcttctgatatttggaggatcttgtaacctcgtaatatggctcttaaaaacgcactagtattcccactttctgaagtttgtagaagctgctatatatttctgtgatctttagacagtgactgagtatggatcatttgaacgaggcaactcaggggaaagaacattcagaaatgtctaacaatgtgagtgatccgaagggtccaccagccaagattgcccgcctggagcagaacgggagcccgctaggaagaggaaggcttgggagtacaggtgcaaaaatgcagggagtgcctttaaaacactcgggccatctgatgaaaaccaaccttaggaaaggaaccatgctgccagttttctgtgtggtggaacattatgaaaacgccattgaatatgattgcaaggaggagcatgcagaatttgtgctggtgagaaaggatatgcttttcaaccagctgatcgaaatggcattgctg

SEQ ID NO: 178961 - DNA, 626 bp, Homo sapiens
  Payload ID: 15274
  Gene Symbol: SATB1
  Gene Name: SATB homeobox 1
  ENST ID: ENST00000493952
  CDS Start-End: 292-540
tccttcccttggccccgcgcgctcgctcgctcgctcctcgcctcgctctcccctttaaacgcccacttcgtatggggaaagaggacaacttgaagtcaagttgcaattaacttccgcggcagccgcagctccggcggcggcggcggcggcaggagaggcagaagccgccgcctcggaagtccgacgccggcgcgcccgcccggggagccgttcttggtttcaggcccgcactcgacagccaccgccgcccccaacgtccatgcctgagtgatctttagacagtgactgagtatggatcatttgaacgaggcaactcaggggaaagaacattcagaaatgtctaacaatgtgagtgatccgaagggtccaccagccaagattgcccgcctggagcagaacgggagcccgctaggaagaggaaggcttgggagtacaggtgcaaaaatgcagggagtgcctttaaaacactcgggccatctgatgaaaaccaaccttaggaaagatattgaaattgtgtattatgagcaccagtttggttaagtactttttgtggaaccagttagagctaatatctaaaaaaggaagaaaatgatttgtggaaccagttagagttaatatctaaaaaa

SEQ ID NO: 178962 - DNA, 1000 bp, Homo sapiens
  Payload ID: 15274
  Gene Symbol: SATB1
  Gene Name: SATB homeobox 1
  ENST ID: ENST00000491519
  CDS Start-End: 417-833
ttcgtcaccattattatttgatcagaaaggtaattctgcattcattgcttttggaaaatgcactgttaatttagagcacagcttaccttaggaccaagttcatattctacttaaatatttctgttacgactttaaataatatgagaatgtatatatttgtgtgcatttgcctgtactgtacccagtctgccttggaagcacagtgaatctcttgtgattatttattttcatggctaatatttcctcccgccacccccaagctgtatttctgaagattgttggttttccatctcttcttcttcatctttttgataggaaccatgctgccagttttctgtgtggtggaacattatgaaaacgccattgaatatgattgcaaggaggagcatgcagaatttgtgctggtgagaaaggatatgcttttcaaccagctgatcgaaatggcattgctgtctctaggttattcacatagctctgctgcccaggccaaagggctaatccaggttggaaagtggaatccagttccactgtcttacgtgacagatgcccctgatgctacagtagcagatatgcttcaagatgtgtatcatgtggtcacattgaaaattcagttacacagttgccccaaactagaagacttgcctcccgaacaatggtcgcacaccacagtgaggaatgctctgaaggacttactgaaagatatgaatcagagttcattggccaaggagtgccccctttcacagcatcctgagatctcaaatatgttggacaatttatttattaatggaaaaataaattttaaaaagaaactacctcgtgctcctgaagcttagcttcagtactgctctcctgaaacatgacagtcatttccgtaggaattaaatacacttaggtgtttagttgatgttcagtctgtattataaatgatattggagcaacaattacaaatctatcatgttatacaaatgtgtttttaataaactgtactttatttcacagt

SEQ ID NO: 178963 - DNA, 558 bp, Homo sapiens
  Payload ID: 15274
  Gene Symbol: SATB1
  Gene Name: SATB homeobox 1
  ENST ID: ENST00000475083
  CDS Start-End: 59-558
tattaacaaaatcatgtaagcagtagaaaggtgggttcttctgaagataaatggaaccatgctgccagttttctgtgtggtggaacattatgaaaacgccattgaatatgattgcaaggaggagcatgcagaatttgtgctggtgagaaaggatatgcttttcaaccagctgatcgaaatggcattgctgtctctaggttattcacatagctctgctgcccaggccaaagggctaatccaggttggaaagtggaatccagttccactgtcttacgtgacagatgcccctgatgctacagtagcagatatgcttcaagatgtgtatcatgtggtcacattgaaaattcagttacacagttgccccaaactagaagacttgcctcccgaacaatggtcgcacaccacagtgaggaatgctctgaaggacttactgaaagatatgaatcagagttcattggccaaggagtgccccctttcacagagtatgatttcttccattgtgaacagtacttactatgcaaatgtctcagcagcaaaatgtcaagaatttggaaggtg

SEQ ID NO: 178964 - DNA, 5318 bp, Homo sapiens
  Payload ID: 15275
  Gene Symbol: SATB2
  Gene Name: SATB homeobox 2
  Uniprot ID: Q9UPW6
  ENST ID: ENST00000260926
  CDS Start-End: 414-2615
gagagagagagagagagactgagaaagtcgaactcgagcttaggtaaccaacaaacccaattactaggctttattgatactaaaaggaaaagttcccctcgtaaaatttctctgagcttattagttatttaaatcagccccagggttggacgcgtgacgccgaaggcaccttctgtcggctcctggaggtgagcagccagcgtccctgcgccgacccacagcccctcgctccgtcctgggcacttggggcgaaggcgggcgcagcgagccgagaagtactgaactcctaatatcaccaattcttctaagttcctggacattgatccggaggaggattcgcagttcaacatcaaggtccctgtgcgttttattgcgacctgccggtgggaactttgtctccgagtcggagcagcatggagcggcggagcgagagcccgtgtctgcgggacagccccgaccggcggagcggcagcccggacgtcaaggggcctcccccagtgaaggtggcccggctggagcagaacggcagccccatgggagcccgcgggaggcccaacggcgccgtggccaaggccgtgggaggtttgatgattcctgtcttttgtgtcgtggagcagttggacggctctcttgaatatgacaacagagaagaacacgccgagtttgtcctggtgcggaaagatgtgctttttagccagctggtggagactgcgctcctggccctggggtattctcacagctctgcggcccaggcccaaggaataatcaagctgggaaggtggaaccctctccccctcagttatgtgacagatgcacccgacgcgacagtggccgacatgctacaagatgtctatcatgttgtgacgttgaaaatccaattacaaagttgttcaaagttggaagacttgcctgcggagcagtggaaccatgccacagtccgcaatgccttaaaggaactgctcaaagagatgaaccagagcacattagccaaagaatgccctctctcccagagtatgatttcatccattgtaaatagcacatattatgccaatgtgtcagcaaccaagtgccaggagtttgggagatggtataaaaagtacaagaagattaaagtggaaagagtggaacgagaaaacctttcagactattgtgttctgggccagcgtccaatgcatttaccaaatatgaaccagctggcatccctggggaaaaccaacgaacagtctcctcacagccaaattcaccacagtactccaatccgaaaccaagtgcccgcattacagcccatcatgagccctggtcttctttctccccagcttagtccacaacttgtaaggcaacaaatagccatggcccatctgataaaccaacagattgccgttagccggctcctggctcaccagcatcctcaagccatcaaccagcagttcctgaaccatccacccatccccagagcagttaagccagagccaaccaactcttccgtggaagtctctccagatatctaccagcaagtcagagatgagctgaagagggccagtgtgtcccaagctgtctttgcaagagtggcattcaaccgcacacagggattgttgtctgagattctgcgtaaggaagaagaccctcggacagcctctcagtctcttctagtaaacctgagggccatgcagaatttcctcaatctgccagaagtggagcgagatcgcatctaccaggatgagagggagcggagcatgaatcccaatgtgagcatggtctcctcggcctccagcagtcccagctcctcccgaacccctcaggccaaaacctcgacaccgacaacagacctccctattaaggtggacggcgccaacatcaacatcacagctgccatttatgacgagatccaacaggagatgaaaagggccaaggtgtctcaagccctgtttgccaaagtggctgcaaataaaagtcagggctggctgtgtgaactgctccgctggaaggagaacccaagcccagaaaaccgcaccctctgggaaaacctctgtaccatccgtcgcttcctgaaccttccccagcatgagagggatgtcatctatgaggaggagtcaaggcatcaccacagcgaacgcatgcaacacgtggtccagcttccccctgagccggtgcaggtacttcatagacagcagtctcagccagccaaggagagttcccctcccagagaagaagcgcctcccccacctcctccgactgaagacagttgtgccaaaaagccccggtctcgcacaaagatctccttagaagccctggggatcctccaaagctttattcatgatgtaggcctgtacccagaccaggaagccatccacactctttcggctcagctggatctccccaaacacaccatcatcaagttcttccagaaccagcggtaccacgtgaagcaccacgggaagctgaaagagcacctgggctccgcggtggacgtggctgaatataaggacgaggagctgctgaccgagtcagaggagaacgacagcgaggaaggctccgaggagatgtacaaagtggaggctgaggaggaaaatgctgacaaaagcaaggcagcacctgccgaaattgaccagagataatgtgaacttctactaggcaaagcaatacatcggtccaaggattttctgctttcatttctttaaaagttttttgttagtttgttttttgtttttgtttttgggtttttttggctttatttttgtctttttatgtctgttttgtttttcttacccttttggacatttctttgttgcacaggatacacctatagactgaataagttcagtatttccgaatcagacatcgccttggcaaagacactaaagcgttacactttatcccgtctctatgactggatcatagtcattataatcacaggagactctgccttcattatccttgcacttaacggaagttacatcaggcaagtaccaggatgaaaagaactatgaaataaatgaaggaagctacaagtgtgtgtgtatatgtatatgtatatatctctatatttacatatatatattaaaattgcatgggacagagactttgcaatccgaaagaatagactgtgaaatgagttcttaaagaaaagacttgtttatgtattaaaaaaaccacttcacagtgagtcgctttggctttttgataaactgcggcctgctctcagggtggggtgactatttttgaattcctatttattttttgtgtttgtccctgattttttttttttaattctatggcttcctatctggcagcttaatgggtaatttttgaggtatgtatttaacaaaataaacgacactgccgaaaaaaaaaaaagtgaagtgaaaacaatcagggcacattaaaatgatacaagtcaaataaatcttaaagacacaatgcacacttaaaatgactcaataaaatgacttgctacgttccgttattcaatttgtcattactgtagtgaacagatgcatttctgtggaattccaaataagtaaaactgaaattcagtgcagagaaaactttgtccactagtgcaagtcttgatcaaatgacattttgacattggacatatggaattcatagtatgagccacattttgttgtgaaatttatttacctgcttgtggcttcaaatctgaaaattaataagcctgctcgtttaaaagttgtttgttgttgctgtttttttgtctttttgttttttactagaaaatagttcagtgtaatattaagttagaaaagaagttgctgcccagttaaaggggctccctctcaaataaatctccatccttccctctcccaaaagacatttctgatttctgcttcactttgggcttcctcttcttcgtacacattccatctacctaatcaaacattttcagtccctgatctctcctgtcccttttcctgggatgacagccctaacaagaactgtttttgaatcgttgtgcagctccaggcaatagagtatgtgaagcgatttcagtagaatcacttactcatcctaaaagaaaacattatcccagttacctacatcgcaattaccttatgtaaagcagaactaatgctgactggatgtttaatgggatgagcattaaagctgcaatctactatagtactccagatctctttcggcttcctatgagaaacaccagaagcattactttccacttctacttacagtaattgcaagaggagacctcacattcaggactggcctagtgaacgtaatccatgctttaaactggccattaaacagtcccacatggttggattttttttttttttttgagttgtgctttcacaaaaccttgtcaaagacctcatgcaatatcactttgaaagttattttctgtttactacacaaacattgtaatataactgttaatactatttatatatttgaaaggtataaaaggtaggagttaaaaaaaaaacctctatgtgtagatattaactcagaacttacaatatacagggagaagacatgttgcaatacaagctaattctagctgctcagtaacctctggagtttttaaagggacattttcctgtactttttcaaataatgatgtttaaaaattatcttgacataagcgtcatatacctttgcaaaaggatggttgtttgcagttagccctggccccatccttcctatttctgtagtatgctgcagctttaatcagaaagtccatggttgctgcttcctgatctccgagttactctttccaaattgtcttcttacactgttgctgaaggtcactctgtacacgtaatggaaactgattttgccaagctcttacaaggtggttcatctatcgatggcatccgcatttggtatcttttacacttcaaccaaaaatttattaggtatttttcaatgctaagtcttgccttttattttttaatttcactgccaagtttgcagtggttctaagtgaatctgtgggcattttagcctgtggtcttgccagatctttgcgaattacaatgcatatatgtctatttattcaatatctgtcatataatatctatttggaagaagaaactttctcttgtagtgcctcttgacaaagcacaatttcccgcctttttttttttttgtgaaatgaaaaaaacaaattgtgttttattgcggtatcaacaatgtgaataaggattaacatattgtaaatgttcttttttccatgtaaatcaactatctttgttatcactaagtgataattaatttttaacttatgtgcattgttaggctgttagaattttttggttgttaaaataaacgcattcaat

SEQ ID NO: 178965 - DNA, 2135 bp, Homo sapiens
  Payload ID: 15275
  Gene Symbol: SATB2
  Gene Name: SATB homeobox 2
  Uniprot ID: Q9UPW6
  ENST ID: ENST00000428695
  CDS Start-End: 52-1899
gcgttttattgcgacctgccggtgggaactttgtctccgagtcggagcagcatggagcggcggagcgagagcccgtgtctgcgggacagccccgaccggcggagcggcagcccggacgtcaaggggcctcccccagtgaaggtggcccggctggagcagaacggcagccccatgggagcccgcgggaggcccaacggcgccgtggccaaggccgtgggaggtttgatgattcctgtcttttgtgtcgtggagcagttggacggctctcttgaatatgacaacagagaagaacacgccgagtttgtcctggtgcggaaagatgtgctttttagccagctggtggagactgcgctcctggccctggggtattctcacagctctgcggcccaggcccaagtggaaagagtggaacgagaaaacctttcagactattgtgttctgggccagcgtccaatgcatttaccaaatatgaaccagctggcatccctggggaaaaccaacgaacagtctcctcacagccaaattcaccacagtactccaatccgaaaccaagtgcccgcattacagcccatcatgagccctggtcttctttctccccagcttagtccacaacttgtaaggcaacaaatagccatggcccatctgataaaccaacagattgccgttagccggctcctggctcaccagcatcctcaagccatcaaccagcagttcctgaaccatccacccatccccagagcagttaagccagagccaaccaactcttccgtggaagtctctccagatatctaccagcaagtcagagatgagctgaagagggccagtgtgtcccaagctgtctttgcaagagtggcattcaaccgcacacagggattgttgtctgagattctgcgtaaggaagaagaccctcggacagcctctcagtctcttctagtaaacctgagggccatgcagaatttcctcaatctgccagaagtggagcgagatcgcatctaccaggatgagagggagcggagcatgaatcccaatgtgagcatggtctcctcggcctccagcagtcccagctcctcccgaacccctcaggccaaaacctcgacaccgacaacagacctccctattaaggtggacggcgccaacatcaacatcacagctgccatttatgacgagatccaacaggagatgaaaagggccaaggtgtctcaagccctgtttgccaaagtggctgcaaataaaagtcagggctggctgtgtgaactgctccgctggaaggagaacccaagcccagaaaaccgcaccctctgggaaaacctctgtaccatccgtcgcttcctgaaccttccccagcatgagagggatgtcatctatgaggaggagtcaaggcatcaccacagcgaacgcatgcaacacgtggtccagcttccccctgagccggtgcaggtacttcatagacagcagtctcagccagccaaggagagttcccctcccagagaagaagcgcctcccccacctcctccgactgaagacagttgtgccaaaaagccccggtctcgcacaaagatctccttagaagccctggggatcctccaaagctttattcatgatgtaggcctgtacccagaccaggaagccatccacactctttcggctcagctggatctccccaaacacaccatcatcaagttcttccagaaccagcggtaccacgtgaagcaccacgggaagctgaaagagcacctgggctccgcggtggacgtggctgaatataaggacgaggagctgctgaccgagtcagaggagaacgacagcgaggaaggctccgaggagatgtacaaagtggaggctgaggaggaaaatgctgacaaaagcaaggcagcacctgccgaaattgaccagagataatgtgaacttctactaggcaaagcaatacatcggtccaaggattttctgctttcatttctttaaaagttttttgttagtttgttttttgtttttgtttttgggtttttttggctttatttttgtctttttatgtctgttttgtttttcttacccttttggacatttctttgttgcacaggatacacctatagactgaataagttcagtatttccgaatcagacatcgccttggcaaa

SEQ ID NO: 178966 - DNA, 6194 bp, Homo sapiens
  Payload ID: 15275
  Gene Symbol: SATB2
  Gene Name: SATB homeobox 2
  ENST ID: ENST00000443023
  CDS Start-End: 1467-3491
cgatcgccctcctatctccaaagtcgaaagtactccgcgcagttaacagagctgggagccgaggcagccgcggtcgcctcttgcgcgtcggtctgcgtctccgccggcagacgcggcacccagcgactgccttgtcgccgccgcctccgcgccgggacgagtgcgcctaggggctgggcgaggcggccgcgccctggacccgccacaaggaggaggaccagaccctgggccccggtgcccgcctgcgcccagacgcacccacccgctggccgcggccaccgcctcgcgccgcactcggttctctgccatcggtccttcgccgcctcgtgcatgaggtcctcgtcaccccgctccgaccgccgactctccccttcctcttccctcctccctgcctcccacccgcccctcgcctgtccctctgcctccttcgcagccccgccgccgttgggtcgccgtgctcacagcgattgattgattgatgtttaatttcctgccaggcggggcccccctccccccgcaacctccccagccctcctccccgccccccactcccctcttttcttgcggtggaccagtctggcttgggtttagatccatcccccccacccccatcccgaaataatccagagacttcccctacccccaccccaaattattattttgaaggcgctagatctggggaccgaaagggggagggggagaaatcggaaaccgaggacaacccaaaaggactcactttgcctgatgactcaacgcaactaataatcatctccctctcagtgtgtctctctctgcggcttgtcagtgagtccggctctggctgctggcagaggcggccgagaggggagaggctggaggtgacagcttgggcggccgccgcgtttcctcccgcgcgcggtcccgggtccctgcgtcttctcggctcttggtgttaccggtcccaccgctctggccgcgcctcctcgcgagctagccgccctgcgaaccagcagccccggctcgccgccgccgccgccgcctccgggttctcagccctttctctccagaacgggtctccttcccgaaggtgtgaaaaggctctttcagcctccttctcttcccccctcctccgccgtcccctcccccgctcgctcgggtgtccctttggaggagtcctttccctctcctcctcctccccctcctccctccccccatcatcatcataacaaccatctccgcaccagaagaagacaccctgacccaggaccttaaacattaggacctggggaagagggaaggggaaggagtaaagaggaagactaggagaacactgcaaagccaagcaccagaaactttccaccctggattctctacttttgctccatggacagagccccagtcagccaagtttcagacagaccgtgagcagtccctgtgcgttttattgcgacctgccggtgggaactttgtctccgagtcggagcagcatggagcggcggagcgagagcccgtgtctgcgggacagccccgaccggcggagcggcagcccggacgtcaaggggcctcccccagtgaaggtggcccggctggagcagaacggcagccccatgggagcccgcgggaggcccaacggcgccgtggccaaggccgtgggaggaataatcaagctgggaaggtggaaccctctccccctcagttatgtgacagatgcacccgacgcgacagtggccgacatgctacaagatgtctatcatgttgtgacgttgaaaatccaattacaaagttgttcaaagttggaagacttgcctgcggagcagtggaaccatgccacagtccgcaatgccttaaaggaactgctcaaagagatgaaccagagcacattagccaaagaatgccctctctcccagagtatgatttcatccattgtaaatagcacatattatgccaatgtgtcagcaaccaagtgccaggagtttgggagatggtataaaaagtacaagaagattaaagtggaaagagtggaacgagaaaacctttcagactattgtgttctgggccagcgtccaatgcatttaccaaatatgaaccagctggcatccctggggaaaaccaacgaacagtctcctcacagccaaattcaccacagtactccaatccgaaaccaagtgcccgcattacagcccatcatgagccctggtcttctttctccccagcttagtccacaacttgtaaggcaacaaatagccatggcccatctgataaaccaacagattgccgttagccggctcctggctcaccagcatcctcaagccatcaaccagcagttcctgaaccatccacccatccccagagcagttaagccagagccaaccaactcttccgtggaagtctctccagatatctaccagcaagtcagagatgagctgaagagggccagtgtgtcccaagctgtctttgcaagagtggcattcaaccgcacacagggattgttgtctgagattctgcgtaaggaagaagaccctcggacagcctctcagtctcttctagtaaacctgagggccatgcagaatttcctcaatctgccagaagtggagcgagatcgcatctaccaggatgagagggagcggagcatgaatcccaatgtgagcatggtctcctcggcctccagcagtcccagctcctcccgaacccctcaggccaaaacctcgacaccgacaacagacctccctattaaggtggacggcgccaacatcaacatcacagctgccatttatgacgagatccaacaggagatgaaaagggccaaggtgtctcaagccctgtttgccaaagtggctgcaaataaaagtcagggctggctgtgtgaactgctccgctggaaggagaacccaagcccagaaaaccgcaccctctgggaaaacctctgtaccatccgtcgcttcctgaaccttccccagcatgagagggatgtcatctatgaggaggagtcaaggcatcaccacagcgaacgcatgcaacacgtggtccagcttccccctgagccggtgcaggtacttcatagacagcagtctcagccagccaaggagagttcccctcccagagaagaagcgcctcccccacctcctccgactgaagacagttgtgccaaaaagccccggtctcgcacaaagatctccttagaagccctggggatcctccaaagctttattcatgatgtaggcctgtacccagaccaggaagccatccacactctttcggctcagctggatctccccaaacacaccatcatcaagttcttccagaaccagcggtaccacgtgaagcaccacgggaagctgaaagagcacctgggctccgcggtggacgtggctgaatataaggacgaggagctgctgaccgagtcagaggagaacgacagcgaggaaggctccgaggagatgtacaaagtggaggctgaggaggaaaatgctgacaaaagcaaggcagcacctgccgaaattgaccagagataatgtgaacttctactaggcaaagcaatacatcggtccaaggattttctgctttcatttctttaaaagttttttgttagtttgttttttgtttttgtttttgggtttttttggctttatttttgtctttttatgtctgttttgtttttcttacccttttggacatttctttgttgcacaggatacacctatagactgaataagttcagtatttccgaatcagacatcgccttggcaaagacactaaagcgttacactttatcccgtctctatgactggatcatagtcattataatcacaggagactctgccttcattatccttgcacttaacggaagttacatcaggcaagtaccaggatgaaaagaactatgaaataaatgaaggaagctacaagtgtgtgtgtatatgtatatgtatatatctctatatttacatatatatattaaaattgcatgggacagagactttgcaatccgaaagaatagactgtgaaatgagttcttaaagaaaagacttgtttatgtattaaaaaaaccacttcacagtgagtcgctttggctttttgataaactgcggcctgctctcagggtggggtgactatttttgaattcctatttattttttgtgtttgtccctgattttttttttttaattctatggcttcctatctggcagcttaatgggtaatttttgaggtatgtatttaacaaaataaacgacactgccgaaaaaaaaaaaagtgaagtgaaaacaatcagggcacattaaaatgatacaagtcaaataaatcttaaagacacaatgcacacttaaaatgactcaataaaatgacttgctacgttccgttattcaatttgtcattactgtagtgaacagatgcatttctgtggaattccaaataagtaaaactgaaattcagtgcagagaaaactttgtccactagtgcaagtcttgatcaaatgacattttgacattggacatatggaattcatagtatgagccacattttgttgtgaaatttatttacctgcttgtggcttcaaatctgaaaattaataagcctgctcgtttaaaagttgtttgttgttgctgtttttttgtctttttgttttttactagaaaatagttcagtgtaatattaagttagaaaagaagttgctgcccagttaaaggggctccctctcaaataaatctccatccttccctctcccaaaagacatttctgatttctgcttcactttgggcttcctcttcttcgtacacattccatctacctaatcaaacattttcagtccctgatctctcctgtcccttttcctgggatgacagccctaacaagaactgtttttgaatcgttgtgcagctccaggcaatagagtatgtgaagcgatttcagtagaatcacttactcatcctaaaagaaaacattatcccagttacctacatcgcaattaccttatgtaaagcagaactaatgctgactggatgtttaatgggatgagcattaaagctgcaatctactatagtactccagatctctttcggcttcctatgagaaacaccagaagcattactttccacttctacttacagtaattgcaagaggagacctcacattcaggactggcctagtgaacgtaatccatgctttaaactggccattaaacagtcccacatggttggattttttttttttttttgagttgtgctttcacaaaaccttgtcaaagacctcatgcaatatcactttgaaagttattttctgtttactacacaaacattgtaatataactgttaatactatttatatatttgaaaggtataaaaggtaggagttaaaaaaaaaacctctatgtgtagatattaactcagaacttacaatatacagggagaagacatgttgcaatacaagctaattctagctgctcagtaacctctggagtttttaaagggacattttcctgtactttttcaaataatgatgtttaaaaattatcttgacataagcgtcatatacctttgcaaaaggatggttgtttgcagttagccctggccccatccttcctatttctgtagtatgctgcagctttaatcagaaagtccatggttgctgcttcctgatctccgagttactctttccaaattgtcttcttacactgttgctgaaggtcactctgtacacgtaatggaaactgattttgccaagctcttacaaggtggttcatctatcgatggcatccgcatttggtatcttttacacttcaaccaaaaatttattaggtatttttcaatgctaagtcttgccttttattttttaatttcactgccaagtttgcagtggttctaagtgaatctgtgggcattttagcctgtggtcttgccagatctttgcgaattacaatgcatatatgtctatttattcaatatctgtcatataatatctatttggaagaagaaactttctcttgtagtgcctcttgacaaagcacaatttcccgcctttttttttttttgtgaaatgaaaaaaacaaattgtgttttattgcggtatcaacaatgtgaataaggattaacatattgtaaatgttcttttttccatgtaaatcaactatctttgttatcactaagtgataattaatttttaacttatgtgcattgttaggctgttagaattttttggttgttaaaataaacgcattcaat

SEQ ID NO: 178967 - DNA, 5730 bp, Homo sapiens
  Payload ID: 15275
  Gene Symbol: SATB2
  Gene Name: SATB homeobox 2
  Uniprot ID: Q9UPW6
  ENST ID: ENST00000417098
  CDS Start-End: 818-3019
aaattattattttgaaggcgctagatctggggaccgaaagggggagggggagaaatcggaaaccgaggacaacccaaaaggactcactttgcctgatgactcaacgcaactaataatcatctccctctcagtgtgtctctctctgcggcttgtcagtgagtccggctctggctgctggcagaggcggccgagaggggagaggctggaggtgacagcttgggcggccgccgcgtttcctcccgcgcgcggtcccgggtccctgcgtcttctcggctcttggtgttaccggtcccaccgctctggccgcgcctcctcgcgagctagccgccctgcgaaccagcagccccggctcgccgccgccgccgccgcctccgggttctcagccctttctctccagaacgggtctccttcccgaaggtgtgaaaaggctctttcagcctccttctcttcccccctcctccgccgtcccctcccccgctcgctcgggtgtccctttggaggagtcctttccctctcctcctcctccccctcctccctccccccatcatcatcataacaaccatctccgcaccagaagaagacaccctgacccaggaccttaaacattaggacctggggaagagggaaggggaaggagtaaagaggaagactaggagaacactgcaaagccaagcaccagaaactttccaccctggattctctacttttgctccatggacagagccccagtcagccaagtttcagacagaccgtgagcagtccctgtgcgttttattgcgacctgccggtgggaactttgtctccgagtcggagcagcatggagcggcggagcgagagcccgtgtctgcgggacagccccgaccggcggagcggcagcccggacgtcaaggggcctcccccagtgaaggtggcccggctggagcagaacggcagccccatgggagcccgcgggaggcccaacggcgccgtggccaaggccgtgggaggtttgatgattcctgtcttttgtgtcgtggagcagttggacggctctcttgaatatgacaacagagaagaacacgccgagtttgtcctggtgcggaaagatgtgctttttagccagctggtggagactgcgctcctggccctggggtattctcacagctctgcggcccaggcccaaggaataatcaagctgggaaggtggaaccctctccccctcagttatgtgacagatgcacccgacgcgacagtggccgacatgctacaagatgtctatcatgttgtgacgttgaaaatccaattacaaagttgttcaaagttggaagacttgcctgcggagcagtggaaccatgccacagtccgcaatgccttaaaggaactgctcaaagagatgaaccagagcacattagccaaagaatgccctctctcccagagtatgatttcatccattgtaaatagcacatattatgccaatgtgtcagcaaccaagtgccaggagtttgggagatggtataaaaagtacaagaagattaaagtggaaagagtggaacgagaaaacctttcagactattgtgttctgggccagcgtccaatgcatttaccaaatatgaaccagctggcatccctggggaaaaccaacgaacagtctcctcacagccaaattcaccacagtactccaatccgaaaccaagtgcccgcattacagcccatcatgagccctggtcttctttctccccagcttagtccacaacttgtaaggcaacaaatagccatggcccatctgataaaccaacagattgccgttagccggctcctggctcaccagcatcctcaagccatcaaccagcagttcctgaaccatccacccatccccagagcagttaagccagagccaaccaactcttccgtggaagtctctccagatatctaccagcaagtcagagatgagctgaagagggccagtgtgtcccaagctgtctttgcaagagtggcattcaaccgcacacagggattgttgtctgagattctgcgtaaggaagaagaccctcggacagcctctcagtctcttctagtaaacctgagggccatgcagaatttcctcaatctgccagaagtggagcgagatcgcatctaccaggatgagagggagcggagcatgaatcccaatgtgagcatggtctcctcggcctccagcagtcccagctcctcccgaacccctcaggccaaaacctcgacaccgacaacagacctccctattaaggtggacggcgccaacatcaacatcacagctgccatttatgacgagatccaacaggagatgaaaagggccaaggtgtctcaagccctgtttgccaaagtggctgcaaataaaagtcagggctggctgtgtgaactgctccgctggaaggagaacccaagcccagaaaaccgcaccctctgggaaaacctctgtaccatccgtcgcttcctgaaccttccccagcatgagagggatgtcatctatgaggaggagtcaaggcatcaccacagcgaacgcatgcaacacgtggtccagcttccccctgagccggtgcaggtacttcatagacagcagtctcagccagccaaggagagttcccctcccagagaagaagcgcctcccccacctcctccgactgaagacagttgtgccaaaaagccccggtctcgcacaaagatctccttagaagccctggggatcctccaaagctttattcatgatgtaggcctgtacccagaccaggaagccatccacactctttcggctcagctggatctccccaaacacaccatcatcaagttcttccagaaccagcggtaccacgtgaagcaccacgggaagctgaaagagcacctgggctccgcggtggacgtggctgaatataaggacgaggagctgctgaccgagtcagaggagaacgacagcgaggaaggctccgaggagatgtacaaagtggaggctgaggaggaaaatgctgacaaaagcaaggcagcacctgccgaaattgaccagagataatgtgaacttctactaggcaaagcaatacatcggtccaaggattttctgctttcatttctttaaaagttttttgttagtttgttttttgtttttgtttttgggtttttttggctttatttttgtctttttatgtctgttttgtttttcttacccttttggacatttctttgttgcacaggatacacctatagactgaataagttcagtatttccgaatcagacatcgccttggcaaagacactaaagcgttacactttatcccgtctctatgactggatcatagtcattataatcacaggagactctgccttcattatccttgcacttaacggaagttacatcaggcaagtaccaggatgaaaagaactatgaaataaatgaaggaagctacaagtgtgtgtgtatatgtatatgtatatatctctatatttacatatatatattaaaattgcatgggacagagactttgcaatccgaaagaatagactgtgaaatgagttcttaaagaaaagacttgtttatgtattaaaaaaaccacttcacagtgagtcgctttggctttttgataaactgcggcctgctctcagggtggggtgactatttttgaattcctatttattttttgtgtttgtccctgattttttttttttaattctatggcttcctatctggcagcttaatgggtaatttttgaggtatgtatttaacaaaataaacgacactgccgaaaaaaaaaaaagtgaagtgaaaacaatcagggcacattaaaatgatacaagtcaaataaatcttaaagacacaatgcacacttaaaatgactcaataaaatgacttgctacgttccgttattcaatttgtcattactgtagtgaacagatgcatttctgtggaattccaaataagtaaaactgaaattcagtgcagagaaaactttgtccactagtgcaagtcttgatcaaatgacattttgacattggacatatggaattcatagtatgagccacattttgttgtgaaatttatttacctgcttgtggcttcaaatctgaaaattaataagcctgctcgtttaaaagttgtttgttgttgctgtttttttgtctttttgttttttactagaaaatagttcagtgtaatattaagttagaaaagaagttgctgcccagttaaaggggctccctctcaaataaatctccatccttccctctcccaaaagacatttctgatttctgcttcactttgggcttcctcttcttcgtacacattccatctacctaatcaaacattttcagtccctgatctctcctgtcccttttcctgggatgacagccctaacaagaactgtttttgaatcgttgtgcagctccaggcaatagagtatgtgaagcgatttcagtagaatcacttactcatcctaaaagaaaacattatcccagttacctacatcgcaattaccttatgtaaagcagaactaatgctgactggatgtttaatgggatgagcattaaagctgcaatctactatagtactccagatctctttcggcttcctatgagaaacaccagaagcattactttccacttctacttacagtaattgcaagaggagacctcacattcaggactggcctagtgaacgtaatccatgctttaaactggccattaaacagtcccacatggttggattttttttttttttttgagttgtgctttcacaaaaccttgtcaaagacctcatgcaatatcactttgaaagttattttctgtttactacacaaacattgtaatataactgttaatactatttatatatttgaaaggtataaaaggtaggagttaaaaaaaaaacctctatgtgtagatattaactcagaacttacaatatacagggagaagacatgttgcaatacaagctaattctagctgctcagtaacctctggagtttttaaagggacattttcctgtactttttcaaataatgatgtttaaaaattatcttgacataagcgtcatatacctttgcaaaaggatggttgtttgcagttagccctggccccatccttcctatttctgtagtatgctgcagctttaatcagaaagtccatggttgctgcttcctgatctccgagttactctttccaaattgtcttcttacactgttgctgaaggtcactctgtacacgtaatggaaactgattttgccaagctcttacaaggtggttcatctatcgatggcatccgcatttggtatcttttacacttcaaccaaaaatttattaggtatttttcaatgctaagtcttgccttttattttttaatttcactgccaagtttgcagtggttctaagtgaatctgtgggcattttagcctgtggtcttgccagatctttgcgaattacaatgcatatatgtctatttattcaatatctgtcatataatatctatttggaagaagaaactttctcttgtagtgcctcttgacaaagcacaatttcccgcctttttttttttttgtgaaatgaaaaaaacaaattgtgttttattgcggtatcaacaatgtgaataaggattaacatattgtaaatgttcttttttccatgtaaatcaactatctttgttatcactaagtgataattaatttttaacttatgtgcattgttaggctgttagaattttttggttgttaaaataaacgcattcaataaatatga

SEQ ID NO: 178968 - DNA, 2656 bp, Homo sapiens
  Payload ID: 15275
  Gene Symbol: SATB2
  Gene Name: SATB homeobox 2
  Uniprot ID: Q9UPW6
  ENST ID: ENST00000457245
  CDS Start-End: 394-2595
agaggcgcttaagttaccaagggattagggctgatctcaggagaggtaaacgaccatccttggaacacggagcccttcttccctgcccggtatctgcgcgtgccttgggtagtccgcacaaccctccccagctccggatgccctgggatacccggacccaggagagagcgcgtcagcggggcgcagctactttgcactcgccgattctgacacaacagatagttaattggggccttcgaaatcaaggactaagaagtactgaactcctaatatcaccaattcttctaagttcctggacattgatccggaggaggattcgcagttcaacatcaaggtccctgtgcgttttattgcgacctgccggtgggaactttgtctccgagtcggagcagcatggagcggcggagcgagagcccgtgtctgcgggacagccccgaccggcggagcggcagcccggacgtcaaggggcctcccccagtgaaggtggcccggctggagcagaacggcagccccatgggagcccgcgggaggcccaacggcgccgtggccaaggccgtgggaggtttgatgattcctgtcttttgtgtcgtggagcagttggacggctctcttgaatatgacaacagagaagaacacgccgagtttgtcctggtgcggaaagatgtgctttttagccagctggtggagactgcgctcctggccctggggtattctcacagctctgcggcccaggcccaaggaataatcaagctgggaaggtggaaccctctccccctcagttatgtgacagatgcacccgacgcgacagtggccgacatgctacaagatgtctatcatgttgtgacgttgaaaatccaattacaaagttgttcaaagttggaagacttgcctgcggagcagtggaaccatgccacagtccgcaatgccttaaaggaactgctcaaagagatgaaccagagcacattagccaaagaatgccctctctcccagagtatgatttcatccattgtaaatagcacatattatgccaatgtgtcagcaaccaagtgccaggagtttgggagatggtataaaaagtacaagaagattaaagtggaaagagtggaacgagaaaacctttcagactattgtgttctgggccagcgtccaatgcatttaccaaatatgaaccagctggcatccctggggaaaaccaacgaacagtctcctcacagccaaattcaccacagtactccaatccgaaaccaagtgcccgcattacagcccatcatgagccctggtcttctttctccccagcttagtccacaacttgtaaggcaacaaatagccatggcccatctgataaaccaacagattgccgttagccggctcctggctcaccagcatcctcaagccatcaaccagcagttcctgaaccatccacccatccccagagcagttaagccagagccaaccaactcttccgtggaagtctctccagatatctaccagcaagtcagagatgagctgaagagggccagtgtgtcccaagctgtctttgcaagagtggcattcaaccgcacacagggattgttgtctgagattctgcgtaaggaagaagaccctcggacagcctctcagtctcttctagtaaacctgagggccatgcagaatttcctcaatctgccagaagtggagcgagatcgcatctaccaggatgagagggagcggagcatgaatcccaatgtgagcatggtctcctcggcctccagcagtcccagctcctcccgaacccctcaggccaaaacctcgacaccgacaacagacctccctattaaggtggacggcgccaacatcaacatcacagctgccatttatgacgagatccaacaggagatgaaaagggccaaggtgtctcaagccctgtttgccaaagtggctgcaaataaaagtcagggctggctgtgtgaactgctccgctggaaggagaacccaagcccagaaaaccgcaccctctgggaaaacctctgtaccatccgtcgcttcctgaaccttccccagcatgagagggatgtcatctatgaggaggagtcaaggcatcaccacagcgaacgcatgcaacacgtggtccagcttccccctgagccggtgcaggtacttcatagacagcagtctcagccagccaaggagagttcccctcccagagaagaagcgcctcccccacctcctccgactgaagacagttgtgccaaaaagccccggtctcgcacaaagatctccttagaagccctggggatcctccaaagctttattcatgatgtaggcctgtacccagaccaggaagccatccacactctttcggctcagctggatctccccaaacacaccatcatcaagttcttccagaaccagcggtaccacgtgaagcaccacgggaagctgaaagagcacctgggctccgcggtggacgtggctgaatataaggacgaggagctgctgaccgagtcagaggagaacgacagcgaggaaggctccgaggagatgtacaaagtggaggctgaggaggaaaatgctgacaaaagcaaggcagcacctgccgaaattgaccagagataatgtgaacttctactaggcaaagcaatacatcggtccaaggattttctgctttcatttcttt

SEQ ID NO: 178969 - DNA, 2166 bp, Homo sapiens
  Payload ID: 15275
  Gene Symbol: SATB2
  Gene Name: SATB homeobox 2
  ENST ID: ENST00000440919
  CDS Start-End: 334-714
gggtgtccctttggaggagtcctttccctctcctcctcctccccctcctccctccccccatcatcatcataacaaccatctccgcaccagaagaagacaccctgacccaggaccttaaacattaggacctggggaagagggaaggggaaggagtaaagaggaagactaggagaacactgcaaagccaagcaccagaaactttccaccctggattctctacttttgctccatggacagagccccagtcagccaagtttcagacagaccgtgagcagtccctgtgcgttttattgcgacctgccggtgggaactttgtctccgagtcggagcagcatggagcggcggagcgagagcccgtgtctgcgggacagccccgaccggcggagcggcagcccggacgtcaaggggcctcccccagtgaaggtggcccggctggagcagaacggcagccccatgggagcccgcgggaggcccaacggcgccgtggccaaggccgtgggaggtttgatgattcctgtcttttgtgtcgtggagcagttggacggctctcttgaatatgacaacagagaagaacacgccgagtttgtcctggtgcggaaagatgtgctttttagccagctggtggagactgcgctcctggccctggggtattctcacagctctgcggcccaggcccaaggctggagagcagcaaaccctgcctcctggatttaagggatcctcccacctcagcctccggagtagctggaaatccagcagcacgccaccatgcctggcttatttccgtatttttagtagtaatagggtttcactatattggccaggctggtctggaactcctgacctcaagtgaaatgcccacctcggcctcccaaagtactgggattacaggcgtgagccatcgcgcccagccatctttcatatatctttctaaagcaaaaaaagccaaattcttccatcatggtttcctttgggacttctagacctatagtaaacagccattcaggaagatggtttgtgcaaaaagaatgaaaataaaggcatgaaggaaaatgtatgcactagcatcttctgtctctccctctgagattttatgctctgcttcaaaaaccagtttaaaaataaaaaagatgagggcggttgcaatctgcttcattttatgcagattaggtatggccctcgggtacctgccaaattgctaatatggccttccgttgggcctgattagtgtgaacccggatcttttccattaaagcagaaatgaatttgttgggaataaggtaacaacaaaagtgatattttcactaataaccgtgggtcaggttacattaaagcagtttctcagtgtgtacctgaggcagactaccctcagcatttatgatttcctccatcctcacttggctcctctctgaggacatcgtggtttttagagaccagtgggaccgtgacctccttttataccgaagctactttgagaggtcattttcttctacattccaaatgcaaaatgttattctcatttttgtaaacacatctgtaggccttacacttgtaataacaagtatcttaaattatccagaatgaatgtttatataaggatatccactctgggcaattgaatttttggataattccaatagccattttgagtgcccctgggtgaagcattaattatcttccaaaaagataatggagacaataaatatggaactatcaagcatctcttatgactctattagaatacatttttaagaaaatattttggtaccaatgattgtattttgtgggaaaagaattagaggtttgtatgaactaagcagcaactggaagttcaaaaagacaaattgggccctatctgcagatttgggtgcctaaagacttatacaaagtaaagtcagctttgtcagttgcctaatttagcccatattgaaaatcactggagctttagcacgagcagtgtttcatgtgaagtcattttgtaacccaaattatttcttgcccatggaggagtaagaaacacatttaacagttgacattctgcatcatcatggacagaccagagagagaagtagctacacccaaaatacatacgaaagtcttttacgtgggtttgcttcccattaagtggtttatggatgaataaaatatttatttttaaaggcctta

SEQ ID NO: 178970 - DNA, 4972 bp, Homo sapiens
  Payload ID: 15275
  Gene Symbol: SATB2
  Gene Name: SATB homeobox 2
  Uniprot ID: Q9UPW6
  ENST ID: ENST00000614512
  CDS Start-End: 414-2261
gagagagagagagagagactgagaaagtcgaactcgagcttaggtaaccaacaaacccaattactaggctttattgatactaaaaggaaaagttcccctcgtaaaatttctctgagcttattagttatttaaatcagccccagggttggacgcgtgacgccgaaggcaccttctgtcggctcctggaggtgagcagccagcgtccctgcgccgacccacagcccctcgctccgtcctgggcacttggggcgaaggcgggcgcagcgagccgagaagtactgaactcctaatatcaccaattcttctaagttcctggacattgatccggaggaggattcgcagttcaacatcaaggtccctgtgcgttttattgcgacctgccggtgggaactttgtctccgagtcggagcagcatggagcggcggagcgagagcccgtgtctgcgggacagccccgaccggcggagcggcagcccggacgtcaaggggcctcccccagtgaaggtggcccggctggagcagaacggcagccccatgggagcccgcgggaggcccaacggcgccgtggccaaggccgtgggaggtttgatgattcctgtcttttgtgtcgtggagcagttggacggctctcttgaatatgacaacagagaagaacacgccgagtttgtcctggtgcggaaagatgtgctttttagccagctggtggagactgcgctcctggccctggggtattctcacagctctgcggcccaggcccaagtggaaagagtggaacgagaaaacctttcagactattgtgttctgggccagcgtccaatgcatttaccaaatatgaaccagctggcatccctggggaaaaccaacgaacagtctcctcacagccaaattcaccacagtactccaatccgaaaccaagtgcccgcattacagcccatcatgagccctggtcttctttctccccagcttagtccacaacttgtaaggcaacaaatagccatggcccatctgataaaccaacagattgccgttagccggctcctggctcaccagcatcctcaagccatcaaccagcagttcctgaaccatccacccatccccagagcagttaagccagagccaaccaactcttccgtggaagtctctccagatatctaccagcaagtcagagatgagctgaagagggccagtgtgtcccaagctgtctttgcaagagtggcattcaaccgcacacagggattgttgtctgagattctgcgtaaggaagaagaccctcggacagcctctcagtctcttctagtaaacctgagggccatgcagaatttcctcaatctgccagaagtggagcgagatcgcatctaccaggatgagagggagcggagcatgaatcccaatgtgagcatggtctcctcggcctccagcagtcccagctcctcccgaacccctcaggccaaaacctcgacaccgacaacagacctccctattaaggtggacggcgccaacatcaacatcacagctgccatttatgacgagatccaacaggagatgaaaagggccaaggtgtctcaagccctgtttgccaaagtggctgcaaataaaagtcagggctggctgtgtgaactgctccgctggaaggagaacccaagcccagaaaaccgcaccctctgggaaaacctctgtaccatccgtcgcttcctgaaccttccccagcatgagagggatgtcatctatgaggaggagtcaaggcatcaccacagcgaacgcatgcaacacgtggtccagcttccccctgagccggtgcaggtacttcatagacagcagtctcagccagccaaggagagttcccctcccagagaagaagcgcctcccccacctcctccgactgaagacagttgtgccaaaaagccccggtctcgcacaaagatctccttagaagccctggggatcctccaaagctttattcatgatgtaggcctgtacccagaccaggaagccatccacactctttcggctcagctggatctccccaaacacaccatcatcaagttcttccagaaccagcggtaccacgtgaagcaccacgggaagctgaaagagcacctgggctccgcggtggacgtggctgaatataaggacgaggagctgctgaccgagtcagaggagaacgacagcgaggaaggctccgaggagatgtacaaagtggaggctgaggaggaaaatgctgacaaaagcaaggcagcacctgccgaaattgaccagagataatgtgaacttctactaggcaaagcaatacatcggtccaaggattttctgctttcatttctttaaaagttttttgttagtttgttttttgtttttgtttttgggtttttttggctttatttttgtctttttatgtctgttttgtttttcttacccttttggacatttctttgttgcacaggatacacctatagactgaataagttcagtatttccgaatcagacatcgccttggcaaagacactaaagcgttacactttatcccgtctctatgactggatcatagtcattataatcacaggagactctgccttcattatccttgcacttaacggaagttacatcaggcaagtaccaggatgaaaagaactatgaaataaatgaaggaagctacaagtgtgtgtgtatatgtatatgtatatatctctatatttacatatatatattaaaattgcatgggacagagactttgcaatccgaaagaatagactgtgaaatgagttcttaaagaaaagacttgtttatgtattaaaaaaaccacttcacagtgagtcgctttggctttttgataaactgcggcctgctctcagggtggggtgactatttttgaattcctatttattttttgtgtttgtccctgattttttttttttaattctatggcttcctatctggcagcttaatgggtaatttttgaggtatgtatttaacaaaataaacgacactgccgaaaaaaaaaaaagtgaagtgaaaacaatcagggcacattaaaatgatacaagtcaaataaatcttaaagacacaatgcacacttaaaatgactcaataaaatgacttgctacgttccgttattcaatttgtcattactgtagtgaacagatgcatttctgtggaattccaaataagtaaaactgaaattcagtgcagagaaaactttgtccactagtgcaagtcttgatcaaatgacattttgacattggacatatggaattcatagtatgagccacattttgttgtgaaatttatttacctgcttgtggcttcaaatctgaaaattaataagcctgctcgtttaaaagttgtttgttgttgctgtttttttgtctttttgttttttactagaaaatagttcagtgtaatattaagttagaaaagaagttgctgcccagttaaaggggctccctctcaaataaatctccatccttccctctcccaaaagacatttctgatttctgcttcactttgggcttcctcttcttcgtacacattccatctacctaatcaaacattttcagtccctgatctctcctgtcccttttcctgggatgacagccctaacaagaactgtttttgaatcgttgtgcagctccaggcaatagagtatgtgaagcgatttcagtagaatcacttactcatcctaaaagaaaacattatcccagttacctacatcgcaattaccttatgtaaagcagaactaatgctgactggatgtttaatgggatgagcattaaagctgcaatctactatagtactccagatctctttcggcttcctatgagaaacaccagaagcattactttccacttctacttacagtaattgcaagaggagacctcacattcaggactggcctagtgaacgtaatccatgctttaaactggccattaaacagtcccacatggttggattttttttttttttttgagttgtgctttcacaaaaccttgtcaaagacctcatgcaatatcactttgaaagttattttctgtttactacacaaacattgtaatataactgttaatactatttatatatttgaaaggtataaaaggtaggagttaaaaaaaaaacctctatgtgtagatattaactcagaacttacaatatacagggagaagacatgttgcaatacaagctaattctagctgctcagtaacctctggagtttttaaagggacattttcctgtactttttcaaataatgatgtttaaaaattatcttgacataagcgtcatatacctttgcaaaaggatggttgtttgcagttagccctggccccatccttcctatttctgtagtatgctgcagctttaatcagaaagtccatggttgctgcttcctgatctccgagttactctttccaaattgtcttcttacactgttgctgaaggtcactctgtacacgtaatggaaactgattttgccaagctcttacaaggtggttcatctatcgatggcatccgcatttggtatcttttacacttcaaccaaaaatttattaggtatttttcaatgctaagtcttgccttttattttttaatttcactgccaagtttgcagtggttctaagtgaatctgtgggcattttagcctgtggtcttgccagatctttgcgaattacaatgcatatatgtctatttattcaatatctgtcatataatatctatttggaagaagaaactttctcttgtagtgcctcttgacaaagcacaatttcccgcctttttttttttttgtgaaatgaaaaaaacaaattgtgttttattgcggtatcaacaatgtgaataaggattaacatattgtaaatgttcttttttccatgtaaatcaactatctttgttatcactaagtgataattaatttttaacttatgtgcattgttaggctgttagaattttttggttgttaaaataaacgcattcaataaatatga

SEQ ID NO: 178971 - DNA, 2020 bp, Homo sapiens
  Payload ID: 15276
  Gene Symbol: SAYSD1
  Gene Name: SAYSVFN motif domain containing 1
  Uniprot ID: Q9NPB0
  ENST ID: ENST00000229903
  CDS Start-End: 101-652
cgcaggcgcacggcggccggcgcgggccgagcggaggcaactgctgtgcggcctgcgggcgcgcgctcccttatcggccaacggacgcgaggcgcgcgccatggaacagcggttagctgagtttcgggcggcgcggaaacgggcgggtctggcggcccaaccccctgctgccagtcagggcgcacaaaccccaggagagaaggcggaagcagcagcgactctaaaggcagccccaggctggctaaagcggttcctggtatggaaacctaggcccgcgagtgcccgggcccagcccggcctagttcaggaagcggctcagccccagggcagcacatcagagacaccatggaacacagccattcctctgccgtcgtgctgggaccagtctttcctgaccaatatcaccttcttgaaggttcttctctggttggtcctgctgggactgtttgtggaactggaatttggcctggcatattttgtcctgtccttgttctattggatgtacgtcgggacacgaggccctgaagagaagaaagagggagagaagagcgcctactctgtgttcaatccaggctgtgaagccatccagggcaccctgactgcagagcagttggagcgcgagttacagttgagacccctggcagggagataggacccagctgtgctgtcatgcagctaacctctgatgtggtcttcctcaccattggctatggatttgatttcaggtgtataggactaagggcagcttgcgggttagctctgtgactgcatagtttttctaccttctttccctgatcttttgctgccatttgatctttgatagttttggtgaaactctctaaaatacattcactgtgggtccgacgcaatttataaaaattatgtactcaagaagggagacctgtttgtttcatttctcatctgtttgggagatgattttagagcactagaaaggcactggggagattctcagcttaaaacatccagcagtttgaagtatgattaggtacatcagggctgcattgtcaatgttctctttaagtcttttaacatttatagcaattttttttttcccggagagtttaggttgcaagttttgggtttcttgtttgtttttgttttgcttcctgctttaattctttaattttcagtcattactggtattgaaaaataaaatatctttaaaacatctcctcttcagaaataggtccctcttcattgcccatcaccatcttccactctcctattattttgccactactcagtaaaggaaggtaggaagagacaaacgcctaagtgcaggtgtggggagggatttcacaagtggttattaacggccagttcagcaagaagtgttgagtgtgtacaaaggggagggctggaagtgttaactccagacccgttggctgcttgagttgtttcttatattctaaagcagcagtccctaacctttttggcaccagggaccagttttgtggaacacagtttttccatggacggggtggtggtggaggatgaaacttccacctcagatcatcaggcattagagtctcataaggagcacgcaacctagatccctcgcatgcgcagttcacaatacggttctaagggctttagagtaagcagctttttcacctgtgggcctctggtgagaaattctgtaaattgtgataatcaggctggattttaatgctgcttttccagtacaatgttagagtttgggttcattaaaattaggcaaactcccattgggttagggcttctctcattccattttgtggctaaccttactgtgtttcagcccttgctgaaaattcttctgatatgtgttgcccttcctcacagccctttggccattgggagtttggctgtccctcagagccatccggtcaagcagatggtctgttctatctcacagaaaagtcttttcttccatgagttctgtctgaactgaacatgtaaaaagtatgggaaacagatgaatccctattaaacatgaagttttgattgtatttaagat

SEQ ID NO: 178972 - DNA, 1972 bp, Homo sapiens
  Payload ID: 15276
  Gene Symbol: SAYSD1
  Gene Name: SAYSVFN motif domain containing 1
  Uniprot ID: Q9NPB0
  ENST ID: ENST00000373249
  CDS Start-End: 254-604
ggccatcaaaataactaaaccatgtcatttggagcaacaaagccactgcggcctccatttgggccaagctctgactgcaatgatgcctctgccccgacccgggcctcgctgtgactgacaatgccgctgcatcttttcagcagtcattgatgaggaagtatctacatcctccttcccactaccagattttgcttggagaaaagcagtttcctgaaataattctgtgacgagcttcttccacattaggacaaaaatgctggaagcggctcagccccagggcagcacatcagagacaccatggaacacagccattcctctgccgtcgtgctgggaccagtctttcctgaccaatatcaccttcttgaaggttcttctctggttggtcctgctgggactgtttgtggaactggaatttggcctggcatattttgtcctgtccttgttctattggatgtacgtcgggacacgaggccctgaagagaagaaagagggagagaagagcgcctactctgtgttcaatccaggctgtgaagccatccagggcaccctgactgcagagcagttggagcgcgagttacagttgagacccctggcagggagataggacccagctgtgctgtcatgcagctaacctctgatgtggtcttcctcaccattggctatggatttgatttcaggtgtataggactaagggcagcttgcgggttagctctgtgactgcatagtttttctaccttctttccctgatcttttgctgccatttgatctttgatagttttggtgaaactctctaaaatacattcactgtgggtccgacgcaatttataaaaattatgtactcaagaagggagacctgtttgtttcatttctcatctgtttgggagatgattttagagcactagaaaggcactggggagattctcagcttaaaacatccagcagtttgaagtatgattaggtacatcagggctgcattgtcaatgttctctttaagtcttttaacatttatagcaattttttttttcccggagagtttaggttgcaagttttgggtttcttgtttgtttttgttttgcttcctgctttaattctttaattttcagtcattactggtattgaaaaataaaatatctttaaaacatctcctcttcagaaataggtccctcttcattgcccatcaccatcttccactctcctattattttgccactactcagtaaaggaaggtaggaagagacaaacgcctaagtgcaggtgtggggagggatttcacaagtggttattaacggccagttcagcaagaagtgttgagtgtgtacaaaggggagggctggaagtgttaactccagacccgttggctgcttgagttgtttcttatattctaaagcagcagtccctaacctttttggcaccagggaccagttttgtggaacacagtttttccatggacggggtggtggtggaggatgaaacttccacctcagatcatcaggcattagagtctcataaggagcacgcaacctagatccctcgcatgcgcagttcacaatacggttctaagggctttagagtaagcagctttttcacctgtgggcctctggtgagaaattctgtaaattgtgataatcaggctggattttaatgctgcttttccagtacaatgttagagtttgggttcattaaaattaggcaaactcccattgggttagggcttctctcattccattttgtggctaaccttactgtgtttcagcccttgctgaaaattcttctgatatgtgttgcccttcctcacagccctttggccattgggagtttggctgtccctcagagccatccggtcaagcagatggtctgttctatctcacagaaaagtcttttcttccatgagttctgtctgaactgaacatgtaaaaagtatgggaaacagatgaatccctattaaacatgaagttttgattgtatttaagat

SEQ ID NO: 178973 - DNA, 3042 bp, Homo sapiens
  Payload ID: 15277
  Gene Symbol: SAFB
  Gene Name: scaffold attachment factor B
  Uniprot ID: Q15424
  ENST ID: ENST00000292123
  CDS Start-End: 108-2855
ggggcgactggagcggttccctcgcaggcggcgccattttgtgctaggagcctgataaaaccggcccggttctgtggaaagtgggcggcggagccagggtccctggaatggcggagactctgtcaggcctaggtgattctggagcggcgggcgcggcggctctgagctccgcctcgtcagagaccgggacgcggcgcctcagcgacctgcgagtgatcgatctgcgggcggagctgaggaaacggaatgtggactcgagcggcaacaagagcgttttgatggagcggctgaagaaggcaattgaagatgaaggtggtaatcctgacgaaattgaaattacctccgagggaaacaagaaaacatcaaagaggtctagcaaagggcgcaaaccagaagaagagggtgtggaagataacgggctggaggaaaactctggggatggacaggaggatgttgagaccagtctggagaacttgcaggacatcgacatcatggatatcagtgtgttggatgaagcagaaattgataatggaagcgttgcagattgtgtcgaagacgatgatgctgataacctccaggagtccctgtcggatagtagagagctagtcgagggggaaatgaaagagcttccggagcagcttcaggaacatgctatagaggacaaagaaactataaacaatttagatacttcatcatctgacttcactatattacaggaaattgaagagccatccctggagccagaaaatgagaaaatactcgacattttgggggaaacttgtaaatctgagccagtaaaagaagaaagttccgagctggagcagccatttgcacaggacacaagtagcgtggggccagacagaaagcttgcggaggaagaggacctatttgacagcgcccatccggaagagggtgatttagatttggccagcgagtcaacagcacacgctcagtcgagcaaggcagacagcctgttagcggtagtgaaaagggagcccgcggagcagccaggcgatggcgagaggacggactgtgagcctgtagggctagagccggcagttgagcagagtagtgcggcctccgagctcgcggaggcctctagcgaggagctcgcagaagcacccacggaagccccaagcccagaagccagagatagcaaagaagacgggaggaagtttgattttgacgcttgtaatgaagtccctccggctcctaaagagtcctcaaccagtgagggcgctgatcagaaaatgagttctcccgaagatgactcggatacaaaaaggctttccaaagaggaaaagggtcgcagcagttgtggtagaaatttctgggttagtggactctcttctacaaccagagctacagatttgaagaatcttttcagcaaatatgggaaggtggtgggcgccaaggttgtgacaaatgcccggagtcctggagctcgctgttacggttttgtcacgatgtccacagcagaagaggccacaaaatgcattaaccacctgcacaagacggagctccacggaaagatgatctccgtggagaaagccaaaaatgaacctgtgggaaagaaaacctctgacaaaagagacagtgacgggaaaaaggagaagtcgagcaacagtgacagatctacaaaccttaagagggatgataaatgtgacagaaaagatgatgctaagaagggtgacgacggaagtggagaaaagagtaaggaccaagatgatcagaaacctggcccctcagagcgatctcgagccacaaagtcaggaagtcgagggaccgaacggactgtagtaatggataaatccaaaggggtgcctgtgattagtgtaaaaacgtccgggtccaaagagagagcttccaaaagccaggatcgcaaatcagccagcagagagaagcggtccgtcgtgtcctttgataaggtcaaggagcctcggaagtcaagagactcagagtcccatagcagggtgcgtgaacgcagtgaacgcgaacaacgcatgcaggcgcagtgggagcgcgaggagcgtgagcggctggagattgcccgagagaggctggccttccagcgccagcggctggagcgggagcgcatggagcgggaacggctggagcgcgaacgcatgcacgtggagcacgagcgcaggcgcgagcaggagcgcatccaccgtgagcgcgaggagctgaggcgccagcaggaactgcgctatgagcaggagcggcggcccgcggtgcggcggccctacgacctggaccggcgagatgatgcctattggccggaagccaagcgggccgccctggatgagcgctaccattctgactttaaccgccaggaccgcttccacgactttgaccacagggaccgcggccgctaccccgaccactcggtggacaggagagaaggttcaaggtcaatgatgggagaacgagaaggacagcattacccagaacgccatggaggaccagagcgccacggccgggactcccgcgatggctgggggggctatggctctgacaagaggatgagcgagggccgggggctgcctcctccccccagacgtgactggggggaccatggccgaagagaggatgaccggtcatggcagggcacggccgacgggggcatgatggacagggatcacaagaggtggcaaggtggcgagagaagcatgtccggtcactccgggcctggccacatgatgaaccgaggaggaatgtcagggcgcggcagctttgccccaggcggggcctcccggggccaccccatcccacacggtggcatgcagggcgggtttggaggccagagccgggggagcaggcccagcgatgcccgcttcactcgccgctactgagtacttggaatcctgtgtcctgtctcgtggcaacaaggctatgttctgttaggagttaccttaaactgtgtaaaaatatttttttttaatctgctgccatattgtagctcaatacaatgtgaatttgtttttcgttttggggttttttttttttgtaataaatgtgtttccgttcacatacccttta

SEQ ID NO: 178974 - DNA, 2650 bp, Homo sapiens
  Payload ID: 15277
  Gene Symbol: SAFB
  Gene Name: scaffold attachment factor B
  Uniprot ID: Q15424
  ENST ID: ENST00000454510
  CDS Start-End: 68-2614
gtgctaggagcctgataaaaccggcccggttctgtggaaagtgggcggcggagccagggtccctggaatggcggagactctgtcaggcctaggtgattctggagcggcgggcgcggcggctctgagctccgcctcgtcagagaccgggacgcggcgcctcagcgacctgcgagtgatcgatctgcgggcggagctgaggaaacggaatgtggactcgagcggcaacaagagcgttttgatggagcggctgaagaaggcaattgaagatgaaggtggtaatcctgacgaaattgaaattacctccgagggaaacaagaaaacatcaaagaggtctagcaaagggcgcaaaccagaagaagagggtgtggaagataacgggctggaggaaaactctggggatggacagatagaggacaaagaaactataaacaatttagatacttcatcatctgacttcactatattacaggaaattgaagagccatccctggagccagaaaatgagaaaatactcgacattttgggggaaacttgtaaatctgagccagtaaaagaagaaagttccgagctggagcagccatttgcacaggacacaagtagcgtggggccagacagaaagcttgcggaggaagaggacctatttgacagcgcccatccggaagagggtgatttagatttggccagcgagtcaacagcacacgctcagtcgagcaaggcagacagcctgttagcggtagtgaaaagggagcccgcggagcagccaggcgatggcgagaggacggactgtgagcctgtagggctagagccggcagttgagcagagtagtgcggcctccgagctcgcggaggcctctagcgaggagctcgcagaagcacccacggaagccccaagcccagaagccagagatagcaaagaagacgggaggaagtttgattttgacgcttgtaatgaagtccctccggctcctaaagagtcctcaaccagtgagggcgctgatcagaaaatgagttctcccgaagatgactcggatacaaaaaggctttccaaagaggaaaagggtcgcagcagttgtggtagaaatttctgggttagtggactctcttctacaaccagagctacagatttgaagaatcttttcagcaaatatgggaaggtggtgggcgccaaggttgtgacaaatgcccggagtcctggagctcgctgttacggttttgtcacgatgtccacagcagaagaggccacaaaatgcattaaccacctgcacaagacggagctccacggaaagatgatctccgtggagaaagccaaaaatgaacctgtgggaaagaaaacctctgacaaaagagacagtgacgggaaaaaggagaagtcgagcaacagtgacagatctacaaaccttaagagggatgataaatgtgacagaaaagatgatgctaagaagggtgacgacggaagtggagaaaagagtaaggaccaagatgatcagaaacctggcccctcagagcgatctcgagccacaaagtcaggaagtcgagggaccgaacggactgtagtaatggataaatccaaaggggtgcctgtgattagtgtaaaaacgtccgggtccaaagagagagcttccaaaagccaggatcgcaaatcagccagcagagagaagcggtccgtcgtgtcctttgataaggtcaaggagcctcggaagtcaagagactcagagtcccatagcagggtgcgtgaacgcagtgaacgcgaacaacgcatgcaggcgcagtgggagcgcgaggagcgtgagcggctggagattgcccgagagaggctggccttccagcgccagcggctggagcgggagcgcatggagcgggaacggctggagcgcgaacgcatgcacgtggagcacgagcgcaggcgcgagcaggagcgcatccaccgtgagcgcgaggagctgaggcgccagcaggaactgcgctatgagcaggagcggcggcccgcggtgcggcggccctacgacctggaccggcgagatgatgcctattggccggaagccaagcgggccgccctggatgagcgctaccattctgactttaaccgccaggaccgcttccacgactttgaccacagggaccgcggccgctaccccgaccactcggtggacaggagagaaggttcaaggtcaatgatgggagaacgagaaggacagcattacccagaacgccatggaggaccagagcgccacggccgggactcccgcgatggctgggggggctatggctctgacaagaggatgagcgagggccgggggctgcctcctccccccaggggcagacgtgactggggggaccatggccgaagagaggatgaccggtcatggcagggcacggccgacgggggcatgatggacagggatcacaagaggtggcaaggtggcgagagaagcatgtccggtcactccgggcctggccacatgatgaaccgaggaggaatgtcagggcgcggcagctttgccccaggcggggcctcccggggccaccccatcccacacggtggcatgcagggcgggtttggaggccagagccgggggagcaggcccagcgatgcccgcttcactcgccgctactgagtacttggaatcctgtgtcctgtctcgtggcaacaa

SEQ ID NO: 178975 - DNA, 459 bp, Homo sapiens
  Payload ID: 15277
  Gene Symbol: SAFB
  Gene Name: scaffold attachment factor B
  ENST ID: ENST00000589006
  CDS Start-End: 1-459
tcaagagactcagagtcccataggtccccttctgcagctctactgttgtgcagcagggtgcgtgaacgcagtgaacgcgaacaacgcatgcaggcgcagtgggagcgcgaggagcgtgagcggctggagattgcccgagagaggctggccttccagcgccagcggctggagcgggagcgcatggagcgggaacggctggagcgcgaacgcatgcacgtggagcacgagcgcaggcgcgagcaggagcgcatccaccgtgagcgcgaggagctgaggcgccagcaggaactgcgctatgagcaggagcggcggcccgcggtgcggcggccctacgacctggaccggcgagatgatgcctattggccggaagccaagcgggccgccctggatgagcgctaccattctgactttaaccgccaggaccgcttccacgactttgaccacagggaccgcggccgc

SEQ ID NO: 178976 - DNA, 3014 bp, Homo sapiens
  Payload ID: 15277
  Gene Symbol: SAFB
  Gene Name: scaffold attachment factor B
  Uniprot ID: Q15424
  ENST ID: ENST00000592224
  CDS Start-End: 89-2839
cctcgcaggcggcgccattttgtgctaggagcctgataaaaccggcccggttctgtggaaagtgggcggcggagccagggtccctggaatggcggagactctgtcaggcctaggtgattctggagcggcgggcgcggcggctctgagctccgcctcgtcagagaccgggacgcggcgcctcagcgacctgcgagtgatcgatctgcgggcggagctgaggaaacggaatgtggactcgagcggcaacaagagcgttttgatggagcggctgaagaaggcaattgaagatgaaggtggtaatcctgacgaaattgaaattacctccgagggaaacaagaaaacatcaaagaggtctagcaaagggcgcaaaccagaagaagagggtgtggaagataacgggctggaggaaaactctggggatggacaggaggatgttgagaccagtctggagaacttgcaggacatcgacatcatggatatcagtgtgttggatgaagcagaaattgataatggaagcgttgcagattgtgtcgaagacgatgatgctgataacctccaggagtccctgtcggatagtagagagctagtcgagggggaaatgaaagagcttccggagcagcttcaggaacatgctatagaggacaaagaaactataaacaatttagatacttcatcatctgacttcactatattacaggaaattgaagagccatccctggagccagaaaatgagaaaatactcgacattttgggggaaacttgtaaatctgagccagtaaaagaagaaagttccgagctggagcagccatttgcacaggacacaagtagcgtggggccagacagaaagcttgcggaggaagaggacctatttgacagcgcccatccggaagagggtgatttagatttggccagcgagtcaacagcacacgctcagtcgagcaaggcagacagcctgttagcggtagtgaaaagggagcccgcggagcagccaggcgatggcgagaggacggactgtgagcctgtagggctagagccggcagttgagcagagtagtgcggcctccgagctcgcggaggcctctagcgaggagctcgcagaagcacccacggaagccccaagcccagaagccagagatagcaaagaagacgggaggaagtttgattttgacgcttgtaatgaagtccctccggctcctaaagagtcctcaaccagtgagggcgctgatcagaaaatgagttctcccgaagatgactcggatacaaaaaggctttccaaagaggaaaagggtcgcagcagttgtggtagaaatttctgggttagtggactctcttctacaaccagagctacagatttgaagaatcttttcagcaaatatgggaaggtggtgggcgccaaggttgtgacaaatgcccggagtcctggagctcgctgttacggttttgtcacgatgtccacagcagaagaggccacaaaatgcattaaccacctgcacaagacggagctccacggaaagatgatctccgtggagaaagccaaaaatgaacctgtgggaaagaaaacctctgacaaaagagacagtgacgggaaaaaggagaagtcgagcaacagtgacagatctacaaaccttaagagggatgataaatgtgacagaaaagatgatgctaagaagggtgacgacggaagtggagaaaagagtaaggaccaagatgatcagaaacctggcccctcagagcgatctcgagccacaaagtcaggaagtcgagggaccgaacggactgtagtaatggataaatccaaaggggtgcctgtgattagtgtaaaaacgtccgggtccaaagagagagcttccaaaagccaggatcgcaaatcagccagcagagagaagcggtccgtcgtgtcctttgataaggtcaaggagcctcggaagtcaagagactcagagtcccatagggtgcgtgaacgcagtgaacgcgaacaacgcatgcaggcgcagtgggagcgcgaggagcgtgagcggctggagattgcccgagagaggctggccttccagcgccagcggctggagcgggagcgcatggagcgggaacggctggagcgcgaacgcatgcacgtggagcacgagcgcaggcgcgagcaggagcgcatccaccgtgagcgcgaggagctgaggcgccagcaggaactgcgctatgagcaggagcggcggcccgcggtgcggcggccctacgacctggaccggcgagatgatgcctattggccggaagccaagcgggccgccctggatgagcgctaccattctgactttaaccgccaggaccgcttccacgactttgaccacagggaccgcggccgctaccccgaccactcggtggacaggagagaaggttcaaggtcaatgatgggagaacgagaaggacagcattacccagaacgccatggaggaccagagcgccacggccgggactcccgcgatggctgggggggctatggctctgacaagaggatgagcgagggccgggggctgcctcctccccccaggggcagacgtgactggggggaccatggccgaagagaggatgaccggtcatggcagggcacggccgacgggggcatgatggacagggatcacaagaggtggcaaggtggcgagagaagcatgtccggtcactccgggcctggccacatgatgaaccgaggaggaatgtcagggcgcggcagctttgccccaggcggggcctcccggggccaccccatcccacacggtggcatgcagggcgggtttggaggccagagccgggggagcaggcccagcgatgcccgcttcactcgccgctactgagtacttggaatcctgtgtcctgtctcgtggcaacaaggctatgttctgttaggagttaccttaaactgtgtaaaaatatttttttttaatctgctgccatattgtagctcaatacaatgtgaatttgtttttcgttttggggttttttttttttgtaataaatgtgtttccgttc

SEQ ID NO: 178977 - DNA, 2842 bp, Homo sapiens
  Payload ID: 15277
  Gene Symbol: SAFB
  Gene Name: scaffold attachment factor B
  Uniprot ID: Q15424
  ENST ID: ENST00000588852
  CDS Start-End: 54-2807
ataaaaccggcccggttctgtggaaagtgggcggcggagccagggtccctggaatggcggagactctgtcaggcctaggtgattctggagcggcgggcgcggcggctctgagctccgcctcgtcagagaccgggacgcggcgcctcagcgacctgcgagtgatcgatctgcgggcggagctgaggaaacggaatgtggactcgagcggcaacaagagcgttttgatggagcggctgaagaaggcaattgaagatgaaggtggtaatcctgacgaaattgaaattacctccgagggaaacaagaaaacatcaaagaggtctagcaaagggcgcaaaccagaagaagagggtgtggaagataacgggctggaggaaaactctggggatggacaggaggatgttgagaccagtctggagaacttgcaggacatcgacatcatggatatcagtgtgttggatgaagcagaaattgataatggaagcgttgcagattgtgtcgaagacgatgatgctgataacctccaggagtccctgtcggatagtagagagctagtcgagggggaaatgaaagagcttccggagcagcttcaggaacatgctatagaggacaaagaaactataaacaatttagatacttcatcatctgacttcactatattacaggaaattgaagagccatccctggagccagaaaatgagaaaatactcgacattttgggggaaacttgtaaatctgagccagtaaaagaagaaagttccgagctggagcagccatttgcacaggacacaagtagcgtggggccagacagaaagcttgcggaggaagaggacctatttgacagcgcccatccggaagagggtgatttagatttggccagcgagtcaacagcacacgctcagtcgagcaaggcagacagcctgttagcggtagtgaaaagggagcccgcggagcagccaggcgatggcgagaggacggactgtgagcctgtagggctagagccggcagttgagcagagtagtgcggcctccgagctcgcggaggcctctagcgaggagctcgcagaagcacccacggaagccccaagcccagaagccagagatagcaaagaagacgggaggaagtttgattttgacgcttgtaatgaagtccctccggctcctaaagagtcctcaaccagtgagggcgctgatcagaaaatgagttctcccgaagatgactcggatacaaaaaggctttccaaagaggaaaagggtcgcagcagttgtggtagaaatttctgggttagtggactctcttctacaaccagagctacagatttgaagaatcttttcagcaaatatgggaaggtggtgggcgccaaggttgtgacaaatgcccggagtcctggagctcgctgttacggttttgtcacgatgtccacagcagaagaggccacaaaatgcattaaccacctgcacaagacggagctccacggaaagatgatctccgtggagaaagccaaaaatgaacctgtgggaaagaaaacctctgacaaaagagacagtgacgggaaaaaggagaagtcgagcaacagtgacagatctacaaaccttaagagggatgataaatgtgacagaaaagatgatgctaagaagggtgacgacggaagtggagaaaagagtaaggaccaagatgatcagaaacctggcccctcagagcgatctcgagccacaaagtcaggaagtcgagggaccgaacggactgtagtaatggataaatccaaaggggtgcctgtgattagtgtaaaaacgtccgggtccaaagagagagcttccaaaagccaggatcgcaaatcagccagcagagagaagcggtccgtcgtgtcctttgataaggtcaaggagcctcggaagtcaagagactcagagtcccatagcagggtgcgtgaacgcagtgaacgcgaacaacgcatgcaggcgcagtgggagcgcgaggagcgtgagcggctggagattgcccgagagaggctggccttccagcgccagcggctggagcgggagcgcatggagcgggaacggctggagcgcgaacgcatgcacgtggagcacgagcgcaggcgcgagcaggagcgcatccaccgtgagcgcgaggagctgaggcgccagcaggaactgcgctatgagcaggagcggcggcccgcggtgcggcggccctacgacctggaccggcgagatgatgcctattggccggaagccaagcgggccgccctggatgagcgctaccattctgactttaaccgccaggaccgcttccacgactttgaccacagggaccgcggccgctaccccgaccactcggtggacaggagagaaggttcaaggtcaatgatgggagaacgagaaggacagcattacccagaacgccatggaggaccagagcgccacggccgggactcccgcgatggctgggggggctatggctctgacaagaggatgagcgagggccgggggctgcctcctccccccaggggcagacgtgactggggggaccatggccgaagagaggatgaccggtcatggcagggcacggccgacgggggcatgatggacagggatcacaagaggtggcaaggtggcgagagaagcatgtccggtcactccgggcctggccacatgatgaaccgaggaggaatgtcagggcgcggcagctttgccccaggcggggcctcccggggccaccccatcccacacggtggcatgcagggcgggtttggaggccagagccgggggagcaggcccagcgatgcccgcttcactcgccgctactgagtacttggaatcctgtgtcctgtctcgtggcaaca

SEQ ID NO: 178978 - DNA, 2708 bp, Homo sapiens
  Payload ID: 15277
  Gene Symbol: SAFB
  Gene Name: scaffold attachment factor B
  ENST ID: ENST00000589863
  CDS Start-End: 172-492
gtgcagttgcaaccgggatactagaacctacgcttggtgcgcctgcgcagaagcgaggcgcgctggggcgactggagcggttccctcgcaggcggcgccattttgtgctaggagcctgataaaaccggcccggttctgtggaaagtgggcggcggagccagggtccctggaatggcggagactctgtcaggcctaggtgattctggagcggcgggcgcggcggctctgagctccgcctcgtcagagaccgggacgcggcgcctcagcgacctgcgagtgatcgatctgcgggcggagctgaggaaacggaatgtggactcgagcggcaacaagagcgttttgatggagcggctgaagaaggcaattgaagatgaaggtggtaatcctgacgaaattgaaattacctccgagggaaacaagaaaacatcaaagaggtctagcaaagatagaggacaaagaaactataaacaatttagatacttcatcatctgacttcactatattacaggaaattgaagagccatccctggagccagaaaatgagaaaatactcgacattttgggggaaacttgtaaatctgagccagtaaaagaagaaagttccgagctggagcagccatttgcacaggacacaagtagcgtggggccagacagaaagcttgcggaggaagaggacctatttgacagcgcccatccggaagagggtgatttagatttggccagcgagtcaacagcacacgctcagtcgagcaaggcagacagcctgttagcggtagtgaaaagggagcccgcggagcagccaggcgatggcgagaggacggactgtgagcctgtagggctagagccggcagttgagcagagtagtgcggcctccgagctcgcggaggcctctagcgaggagctcgcagaagcacccacggaagccccaagcccagaagccagagatagcaaagaagacgggaggaagtttgattttgacgcttgtaatgaagtccctccggctcctaaagagtcctcaaccagtgagggcgctgatcagaaaatgagttctcccgaagatgactcggatacaaaaaggctttccaaagaggaaaagggtcgcagcagttgtggtagaaatttctgggttagtggactctcttctacaaccagagctacagatttgaagaatcttttcagcaaatatgggaaggtggtgggcgccaaggttgtgacaaatgcccggagtcctggagctcgctgttacggttttgtcacgatgtccacagcagaagaggccacaaaatgcattaaccacctgcacaagacggagctccacggaaagatgatctccgtggagaaagccaaaaatgaacctgtgggaaagaaaacctctgacaaaagagacagtgacgggaaaaaggagaagtcgagcaacagtgacagatctacaaaccttaagagggatgataaatgtgacagaaaagatgatgctaagaagggtgacgacggaagtggagaaaagagtaaggaccaagatgatcagaaacctggcccctcagagcgatctcgagccacaaagtcaggaagtcgagggaccgaacggactgtagtaatggataaatccaaaggggtgcctgtgattagtgtaaaaacgtccgggtccaaagagagagcttccaaaagccaggatcgcaaatcagccagcagagagaagcggtccgtcgtgtcctttgataaggtcaaggagcctcggaagtcaagagactcagagtcccatagggtgcgtgaacgcagtgaacgcgaacaacgcatgcaggcgcagtgggagcgcgaggagcgtgagcggctggagattgcccgagagaggctggccttccagcgccagcggctggagcgggagcgcatggagcgggaacggctggagcgcgaacgcatgcacgtggagcacgagcgcaggcgcgagcaggagcgcatccaccgtgagcgcgaggagctgaggcgccagcaggaactgcgctatgagcaggagcggcggcccgcggtgcggcggccctacgacctggaccggcgagatgatgcctattggccggaagccaagcgggccgccctggatgagcgctaccattctgactttaaccgccaggaccgcttccacgactttgaccacagggaccgcggccgctaccccgaccactcggtggacaggagagaaggttcaaggtcaatgatgggagaacgagaaggacagcattacccagaacgccatggaggaccagagcgccacggccgggactcccgcgatggctgggggggctatggctctgacaagaggatgagcgagggccgggggctgcctcctccccccaggggcagacgtgactggggggaccatggccgaagagaggatgaccggtcatggcagggcacggccgacgggggcatgatggacagggatcacaagaggtggcaaggtggcgagagaagcatgtccggtcactccgggcctggccacatgatgaaccgaggaggaatgtcagggcgcggcagctttgccccaggcggggcctcccggggccaccccatcccacacggtggcatgcagggcgggtttggaggccagagccgggggagcaggcccagcgatgcccgcttcactcgccgctactgagtacttggaatcctgtgtcctgtctcgtggcaacaaggctatgttctgttaggagtta

SEQ ID NO: 178979 - DNA, 3371 bp, Homo sapiens
  Payload ID: 15278
  Gene Symbol: SAFB2
  Gene Name: scaffold attachment factor B2
  Uniprot ID: Q14151
  ENST ID: ENST00000252542
  CDS Start-End: 266-3127
ctcccgccgggaactgccgggacgcatgcgagctgcagattcagcgcttgcgcgttgtgccggggaacccgcggttggtggacgcgcgagcgtccttgctgctaagtacgctagtgggggcggtgcgcgtgcgcgtgcgcggccgcaaagcggggcgggaggaaacgagtgcgttttcctcttaggcggcgccattttgtgttcagagccgctatagctgccggcggtgtgcgactgagtcggtggcgaagacgggaacgcgacgatggcggagactctgcccgggtcgggcgactcgggccctggcacggcttctctcggcccgggcgttgcggagactgggacgaggcggctcagcgagctgcgggtgatcgatctgcgggcggagctgaagaagcggaacctggacacgggcggcaacaagagcgtcctgatggagcggctcaagaaggcggttaaagaagaggggcaagatcctgatgaaattggcatcgagttagaagccaccagcaagaagtcagccaagagatgtgttaaaggactgaagatggaggaggaaggcacagaagataatggcctggaagacgattccagagacgggcaggaggacatggaagcaagtctggagaacctgcagaatatgggcatgatggacatgagtgtgctagacgaaactgaagtggcgaatagcagtgctccagattttggggaggatggcacggacggccttctcgattccttttgtgatagtaaagaatacgtggctgcacagctgagacagctcccggctcagcccccagagcatgctgtggatggggaaggatttaagaacactttggaaacttcatcgttgaacttcaaagtaactccggacattgaagaatcccttttggagccagaaaatgagaaaatactcgacattttgggggaaacttgtaaatctgagccagtaaaagaagaaagttccgagctggagcagccatttgcacaggacacaagtagcgtggggccagacagaaagcttgcggaggaagaggacctatttgacagcgcccatccggaagagggtgatttagatttggccagcgagtcaacagcacacgctcagtcgagcaaggcagacagcctgttagcggtagtgaaaagggagcccgcggagcagccaggcgatggcgagaggacggactgtgagcctgtagggctagagccggcagttgagcagagtagtgcggcctccgagctcgcggaggcctctagcgaggagctcgcagaagcacccacggaagccccaagcccagaagccagagatagcaaagaagacgggaggaagtttgattttgacgcttgtaatgaagtccctccggctcctaaagagtcctcaaccagtgagggcgctgatcagaaaatgagctcttttaaggaagaaaaagatataaagccaatcattaaagatgaaaaaggtcgggtcggcagcggttctggtcggaacctgtgggtcagcgggctgtcctccacaacacgcgctacggatctcaagaaccttttcagcaagtatgggaaggttgtcggggccaaagtggtaacgaacgcccgcagcccgggggctcgatgctatggattcgtcaccatgtcgacatctgacgaggcgaccaagtgcatcagccatctccacagaactgagctgcatggacgaatgatctccgtagagaaggccaaaaatgagcctgctgggaaaaagctttccgacagaaaagagtgcgaagtgaagaaggaaaaattatcgagtgtcgacagacatcattctgtggagatcaaaattgaaaaaactgtaattaagaaggaagagaagattgagaagaaggaggaaaaaaagcctgaagacattaagaaggaagaaaaagaccaggatgagctgaaacccggacctacaaatcggtctagagtcaccaaatcaggaagcagaggaatggagcggacggtcgtgatggataaatcgaaaggagagcccgtcattagcgtgaaaaccacaagcaggtccaaagagagaagctccaagagtcaggatcgcaagtcagaaagcaaagaaaagagagacatcttgtcgtttgataaaatcaaagaacaaagggagagagagcgccagaggcagcgggaacgggagatccgcgaaacggagaggcggcgggagcgcgagcagcgggagcgggagcaacgcctcgaggccttccatgagcggaaggagaaggcccggctacagcgggaacgcctgcagctcgagtgccagcgccagcggctggagcgggagcgcatggagcgggagcggctggagcgcgagcgcatgcgcgtggagcgtgagcgcaggaaggagcaggagcgcatccaccgcgagcgcgaggagctgcggcgccagcaggagcagctgcgttacgagcaggagcggcggcccgggcggaggccctacgacctggaccgacgagatgatgcctattggccagaaggaaagcgtgtggcaatggaggaccgatatcgtgcagactttccccggccagaccaccgctttcacgacttcgatcatcgagaccggggccagtaccaggaccacgccatcgacaggcgggagggttcgaggccaatgatgggagaccaccgggatgggcagcactatggagatgaccgccatggccacggaggacccccagagcgccacggccgggactcccgtgatggctgggggggctacggctccgacaagaggctgagtgaaggccgggggctgccccctccccccaggggtggccgtgactggggagagcacaaccagcggctagaggagcaccaggcacgcgcctggcagggtgccatggacgcaggcgcggctagccgggagcacgccaggtggcaaggtggcgagaggggcctgtctgggccctcggggccggggcacatggcaagccgcggtggagtggcggggcgaggcggctttgcacaaggtggacattcccagggccacgtggtgccaggtggcggactggaaggtggcggagtggccagccaggaccggggcagcagagtccctcacccacaccctcatccccccccgtacccccacttcacccgccgctactaagtcccactcgctgcgagttttcgggtgggcagacgcactgttgaatctggtagccagggttccctcgaacttgggggatctttttaaaagcaaagtaaatcctgccaccatgttgtagctcaatacaatgtgaactcactttttttttttttttaaataaatgtgttcttgttctgccatttttaaatcaaggtttctgttaacgaggcattccattttccattaataaagtttaccattcgca

SEQ ID NO: 178980 - DNA, 836 bp, Homo sapiens
  Payload ID: 15278
  Gene Symbol: SAFB2
  Gene Name: scaffold attachment factor B2
  ENST ID: ENST00000591123
  CDS Start-End: 1-264
gtgctagacgaaactgaagtggcgaatagcagtgctccagattttggggaggatggcacggacggccttctcgattccttttgtgatagtaaagaatacgtggctgcacagctgagacagctcccggctcagcccccagagcatgctgtggatggggaaggatttaagaacactttggaaacttcatcgttgaacttcaaagtaactccggacattgaagaatcccttttggagccagctcttttaaggaagaaaaagatataaagccaatcattaaagatgaaaaaggtcgggtcggcagcggttctggtcggaacctgtgggtcagcgggctgtcctccacaacacgcgctacggatctcaagaaccttttcagcaagtatgggaaggttgtcggggccaaagtggtaacgaacgcccgcagcccgggggctcgatgctatggattcgtcaccatgtcgacatctgacgaggcgaccaagtgcatcagccatctccacagaactgagctgcatggacgaatgatctccgtagagaaggccaaaaatgagcctgctgggaaaaagctttccgacagaaaagagtgcgaagtgaagaaggaaaaattatcgagtgtcgacagacatcattctgtggagatcaaaattgaaaaaactgtaattaagaaggaagagaagattgagaagaaggaggaaaaaaagcctgaagacattaagaaggaagaaaaagaccaggatgagctgaaacccggacctacaaatcggtctagagtcaccaaatcaggaagcagaggaatggagcggacggtcgtgatggataaatcgaaaggagagccc

SEQ ID NO: 178981 - DNA, 564 bp, Homo sapiens
  Payload ID: 15278
  Gene Symbol: SAFB2
  Gene Name: scaffold attachment factor B2
  ENST ID: ENST00000590262
  CDS Start-End: 193-564
tttcacatttctgatcactaccgtcaacaccacttttccttcctgccacgttacttcaccgagcgagtaccggcaaaccgtgaaaactggattgtggcggttaaagaagaggggcaagatcctgatgaaattggcatcgagttagaagccaccagcaagaagtcagccaagagatgtgttaaaggactgaagatggaggaggaaggcacagaagataatggcctggaagacgattccagagacgggcaggaggacatggaagcaagtctggagaacctgcagaatatgggcatgatggacatgagtgtgctagacgaaactgaagtggcgaatagcagtgctccagattttggggaggatggcacggacggccttctcgattccttttgtgatagtaaagaatacgtggctgcacagctgagacagctcccggctcagcccccagagcatgctgtggatggggaaggatttaagaacactttggaaacttcatcgttgaacttcaaagtaactccggacattgaagaatcccttttggagccaggtactgataagagaaacacg

SEQ ID NO: 178982 - DNA, 1298 bp, Homo sapiens
  Payload ID: 15278
  Gene Symbol: SAFB2
  Gene Name: scaffold attachment factor B2
  Uniprot ID: Q14151
  ENST ID: ENST00000591120
  CDS Start-End: 62-409
agagccgctatagctgccggcggtgtgcgactgagtcggtggcgaagacgggaacgcgacgatggcggagactctgcccgggtcgggcgactcgggccctggcacggcttctctcggcccgggcgttgcggagactgggacgaggcggctcagcgagctgcgggtgatcgatctgcgggcggagctgaagaagcggaacctggacacgggcggcaacaagagcgtcctgatggagcggctcaagaaggcggttaaagaagaggggcaagatcctgatgaaattggcatcgagttagaagccaccagcaagaagtcagccaagagatgtgttaaaggaggacatggaagcaagtctggagaacctgcagaatatgggcatgatggacatgagtgtgctagacgaaactgaagtggcgaatagcagtgctccagattttggggaggatggcacggacggccttctcgattccttttgtgatagtaaagaatacgtggctgcacagctgagacagctcccggctcagcccccagagcatgctgtaggtggatggggaaggatttaagaacactttggaaacttcatcgttgaacttcaaagtaactccggacattgaagaatcccttttggagccaggtactgataagagaaacacgacagttatggtttgaaagttttcacactattattttaaagctgtctatattttaagctgtgttatgatcttgtaaattgctctaatggtggacaatccagatcatacaaggatcagagattggaaacccattcgtatcaccagatctgtggaagagccattctggcttcttgaggtcaaatacatttggtgcaatgtagtagtgattcttttcatgtctaaccacgtagagtggcatttaattcccccgtccccgtgattcctccatgtgtttctacacatgaaacagatcttgtgatattttgctgcagtcattttgattaacgcagttaaggcaggataaagctgttgtcagggcacttaccacctgagaagtgactggattccagaagaggaaacagagtttctccgtgaaaattttcaacatattattccccttccggactgcgtttatctcccaccgtcagaagagattctgattttcatattggattgttctgttaaaagaaattcaaagaaatttggaagttgagctgtcattgaatggtgattgcattcggttcagcaccttggacattggaaaatcagtcagaagacccagacttgaacaaaaactcgaagaagactattgagaaccagccgcgt

SEQ ID NO: 178983 - DNA, 3988 bp, Homo sapiens
  Payload ID: 15279
  Gene Symbol: SPIDR
  Gene Name: scaffolding protein involved in DNA repair
  Uniprot ID: Q14159
  ENST ID: ENST00000297423
  CDS Start-End: 385-3132
agttgttgcctgacaacacagacgacagtaacttaattcgaaagacaatacttggaggcggcccccgctccaggcaccagcccagcagctcccccgaactccccaggagctcgcgggcgagcaacgccacagcccagagcgagctccgcggaacccccagccccggggaaggaagctcgactctccgcggggcactccttccgggctccgggcccgactaggccatccgggaggccctggagcgccggggccggagaagccctgccccccgccgaagccccgccctgcgcccgagcgcccgccaatggcagggcgcggtgcggcgcgccgaggtgggacggcggcgcgctgaggaggcggtgcgctcaggcggcgctcccggagatgccccgcggcagccgcgctcggggctctaagagaaaaaggagttggaatacagaatgcccatcctttccaggagaaagaccactgcaggtcagaagagcaggtctcaggacagcaggggcagctgcctctctctctgaagcatggctcaggtgtggagaagggtttcagaacacttctgggaatccgtcattaacagctgaagagaagacgattacagaaaagcaccttgaattatgccctagacccaagcaagaaaccaccacatctaaaagcaccagtgggcttacagacataacatggagctccagtggaagtgatttgtcggatgaagataagacactttctcagttacagagagatgaattacagtttatcgactgggagattgacagtgacagggcagaggctagtgactgtgatgaatttgaagatgacgagggtgctgtggaaatctcagactgtgcttcttgtgcaagtaatcagtctttgacaagtgatgagaagctgtcggagcttcccaagccaagttctatagaaattttagagtattcatcagatagtgaaaaagaagatgatttggaaaatgtcctactcattgattcagaatcccctcacaaataccacgtgcagtttgcatcggatgcaagacagattatggagagactgatagatccaaggacaaaatcaacagagaccattttgcatacacctcagaaacccacagctaagtttcccaggactccagaaaattcagcaaagaagaagcttttaagaggtggactagcagaaagactaaatggactgcagaatcgagagagatctgctatttctttgtggagacatcaatgtatttcttaccaaaagacactttcaggtagaaaatctggtgtattaactgtgaaaattttagagctgcatgaggaatgtgccatgcaagttgccatgtgtgagcagttattggggtcaccagccaccagctcctcccaaagtgtggctcccaggcctggagctggcctgaaagttctcttcaccaaggagactgcaggctacctcaggggccgtccccaggacactgtccggatcttccctccctggcaaaaactgattattccaagtggaagttgccctgttattctgaatacttacttttgtgagaaagttgttgccaaagaagattcagaaaaaacttgtgaagtgtactgtccggacataccccttccaagaagaagcatctctttggcccagatgtttgtaattaagggtctaacaaataattcacctgaaatccaggttgtgtgtagtggtgtagccactacagggacagcctggacccatgggcacaaagaagcaaaacagcgcatcccaaccagcactcccctgagggattctctcctggatgtggtggaaagccagggagctgcctcgtggccaggagctggagtccgagtggtggtgcaaagagtgtattctcttcccagcagagacagcaccaggggtcagcagggggccagctcaggacacacagacccagctggaactcgagcctgccttctggtacaagatgcctgtggaatgttcggtgaagtgcacttggagttcaccatgtcgaaggcaagacagttggaagggaagtcttgcagcctggtgggaatgaaggttctacagaaagtcaccagaggaaggacagcggggattttcagtttgattgacaccctgtggcccccagcgatacctctgaaaacacctggccgcgaccagccctgtgaagagataaaaactcatctgcctcctccagccttgtgttacatcctcacagctcatccaaatctgggacaaattgatataattgacgaagaccccatttataagctttaccagcctccagttacccgctgcttaagagacattctccagatgaatgatcttggtacccgttgcagtttctatgccacggtgatttaccaaaaaccacagctgaagagtctgctgcttctggagcaaagggagatctggctgctagtgaccgatgtcactctgcaaacgaaggaggagagagaccccaggctccccaaaaccctgctggtctatgtggcccccttgtgtgtgctgggctctgaagtcctggaggcactcgctggggctgcccctcacagcctcttcttcaaggacgctctccgtgaccagggtcggattgtttgtgctgaacgaactgtcctcttgcttcagaagccccttttgagtgtggtctctggtgcaagttcctgtgagctgcctggcccggtgatgctcgacagcctggactctgcaacacctgtcaactccatctgcagtgttcaaggcactgtggttggcgtggacgagagcactgctttctcatggcctgtgtgtgacatgtgtggcaacgggagattggaacagaggccggaagacagaggcgccttttcctgtggggactgctcccgggtggtcacatctcctgttctcaagaggcacctgcaggtcttcctggactgccgctcaagaccgcagtgcagagtgaaggtcaagctgttgcagcgcagcatttcctccctgctgaggtttgccgccggtgaagatgggagctacgaagtgaagagtgtcctcggaaaggaagtggggttgttaaattgttttgtccagtccgtaaccgcccacccgaccagctgcattggattggaggaaatcgagcttctgagtgcaggaggggcctctgcagaacactagcggttgccgcaggatctgtgaactttgcaatgtggctgcaagggtggtggtggtggtggtgatttggggtagttatttgttaactatggacacagtgaacgtagtttacgatcttgaaatgaaacttagatttttctggggaaatgttcagatacagttttgtgaactgtaaatcaaaatacctttttctacagtttatcttttattttctgcaaatttaggaacatatttactcgttttcacattgaatcttaagtttaagctcttcatttggtatttaggcaatatatgagaaaaaaattttttttgttcatttgtaattttaacaagttgaacattttaccatgattgaacatgtttttattacagtatttaacattcccccaaagaataccctgcaaagtgtaaacctttgtcccatactgtgatattactgttctgctacaataaatgtcaaacctaagcactttgcagttcactacttttgggaaaatgttctagggaactgtatcacaggtgaaactgttacccataaagtgtagctctctgaactggtgtgatcgtgtctctgctgaatggtggtggggatagctggctccaccacacacacctgttttaattaggctgggtaatgtgcacggagagcaaagatcacagactaaggagcagtcagtcggatatttgctttgctggcaaagatttaaaccaagaattaattatctttggacactataaagattttgttcccttccttatagcaatataatcatgacaggccatggttaactacatcagatacacgtagcagccgtgaccaagacatggtgccctaataccaagtgttcttgggttaaag

SEQ ID NO: 178984 - DNA, 335 bp, Homo sapiens
  Payload ID: 15279
  Gene Symbol: SPIDR
  Gene Name: scaffolding protein involved in DNA repair
  ENST ID: ENST00000517619
  CDS Start-End: 58-335
ctaggcactgtggttggcgtggacgagagcactgctttctcatggcctgtgtgtgacatgtgtggcaacgggagattggaacagaggccggaagacagaggcgccttttcctgtggggactgctcccgggtggtcacatctcctgttctcaagaggcacctgcaggtcttcctggactgccgctcaagaccgcagtgcagagtgaaggtcaagctgttgcagcgcagcatttcctccctgctgaggtttgccgccggtgaagatgggagctacgaagtgaagagtgtcctcggaaaggaagtggggttgttaaattgttttgtccagtccgtaac

SEQ ID NO: 178985 - DNA, 1848 bp, Homo sapiens
  Payload ID: 15279
  Gene Symbol: SPIDR
  Gene Name: scaffolding protein involved in DNA repair
  ENST ID: ENST00000517693
  CDS Start-End: 215-1387
ttttctcagcggctcccttgcgctcaggcctcaccctcatggctcagaaatgcacagaatcaaagtcctgcggaatggcagctgatggctgaaacaggtgaaggaaaccaagattttgagcacagaagagatgcaggcacttaactgggtgtgaaacaaattcacataatctggattgtgcagagcctgccttctggtacaagatgcctgtggaatgttcggtgaagtgcacttggagttcaccatgtcgaaggcaagacagttggaagggaagtcttgcagcctggtgggaatgaaggttctacagaaagtcaccagaggaaggacagcggggattttcagtttgattgacaccctgtggcccccagcgatacctctgaaaacacctggccgcgaccagccctgtgaagagataaaaactcatctgcctcctccagccttgtgttacatcctcacagctcatccaaatctgggacaaattgatataattgacgaagaccccatttataagctttaccagcctccagttacccgctgcttaagagacattctccagatgaatgatcttggtacccgttgcagtttctatgccacggtgatttaccaaaaaccacagctgaagagtctgctgcttctggagcaaagggagatctggctgctagtgaccgatgtcactctgcaaacgaaggaggagagagaccccaggctccccaaaaccctgctggtctatgtggcccccttgtgtgtgctgggctctgaagtcctggaggcactcgctggggctgcccctcacagcctcttcttcaaggacgctctccgtgaccagggtcggattgtttgtgctgaacgaactgtcctcttgcttcagaagccccttttgagtgtggtctctggtgcaagttcctgtgagctgcctggcccggtgatgctcgacagcctggactctgcaacacctgtcaactccatctgcagtgttcaaggcactgtggttggcgtggacgagagcactgctttctcatggcctgtgtgtgacatgtgtggcaacgggagattggaacagaggccggaagacagaggcgccttttcctgtggggactgctcccgggtggtcacatctcctgttctcaagaggcacctgcaggtcttcctggactgccgctcaagaccgcagtgcagagtgaaggtcaagctgttgcagcgcagcatttcctccctgctgaggtttgccgccggtgaagatgggagctacgaagtgaagagtgtcctcggaaaggaagtggggttgttaaattgttttgtccagtccgtaaccgcccacccgaccagctgcattggattggaggaaatcgagcttctgagtgcaggaggggcctctgcagaacactagcggttgccgcaggatctgtgaactttgcaatgtggctgcaagggtggtggtggtggtggtgatttggggtagttatttgttaactatggacacagtgaacgtagtttacgatcttgaaatgaaacttagatttttctggggaaatgttcagatacagttttgtgaactgtaaatcaaaatacctttttctacagtttatcttttattttctgcaaatttaggaacatatttactcgttttcacattgaatcttaagtttaagctcttcatttggtatttaggcaatatatgagaaaaaaattttttttgttcatttgtaattttaacaagttgaacattttaccatgattgaacatgtttttattacagtatttaacattcccccaaagaataccctgcaaagtgtaaacctttgtcccatactgtgatattactgttctgctacaataaatgtcaaacct

SEQ ID NO: 178986 - DNA, 802 bp, Homo sapiens
  Payload ID: 15279
  Gene Symbol: SPIDR
  Gene Name: scaffolding protein involved in DNA repair
  ENST ID: ENST00000523814
  CDS Start-End: 47-184
cggcggcgcgctgaggaggcggtgcgctcaggcggcgctcccggagatgccccgcggcagccgcgctcggggctctaagaaaaaggagttggaatacagaatgcccatcctttccaggagaaagaccactgcaggtcagaagagcaggtctcaggacagcaggggcagctgcctctctctctgaagcatggctcaggtgtggagaagggtttcagaacacttctgggaatccgtcattaacagctgaagagaagacgattacagaaaagcaccttgaattatgccctagacccaagcaagaaaccaccacatctaaaagcaccagtgggcttacagacataacatggagctccagtggaagtgatttgtcggatgaagataagacactttctcagttacagagagccaagttctatagaaattttagagtattcatcagatagtgaaaaagaagatgatttggaaaatgtcctactcattgattcagaatcccctcacaaataccacgtgcagtttgcatcggatgcaagacagattatggagagactgatagatccaaggacaaaatcaacagagaccattttgcatacacctcagaaacccacagctaagtttcccaggactccagaaaattcagcaaagaagaagcttttaagaggtggactagcagaaagactaaatggactgcagaatcgagagagatctgctatttctttgtggagacatcaatgtatttcttaccaaaagacactttcaggtaaggcttgtgcaggaatctgagacaatgtgtaaaaaaatattt

SEQ ID NO: 178987 - DNA, 1035 bp, Homo sapiens
  Payload ID: 15279
  Gene Symbol: SPIDR
  Gene Name: scaffolding protein involved in DNA repair
  ENST ID: ENST00000519661
  CDS Start-End: 5-550
ggagatgccccgcggcagccgcgctcggggctctaagagaaaaaggagttggaatacagaatgcccatcctttccaggagaaagaccactgcaggtcagaagagcaggtctcaggacagcaggggcagctgcctctctctctgaagcatggctcaggtgtggagaagggtttcagaacacttctgggaatccgtcattaacagctgaagagaagacgattacagaaaagcaccttgaattatgccctagacccaagcaagaaaccaccacatctaaaagcaccagtgggcttacagacataacatggagctccagtggaagtgatttgtcggatgaagataagacactttctcagttacagagagatgaattacagtttatcgactgggagattgacagtgacagggcagaggctagtgactgtgatgaatttgaagatgacgagggtgctgtggaaatctcagactgtgcttcttgtgcaagtaatcagtctttgacaagtgatgagaagctgtcggagcttcccaaggtagaaaatctggtgtattaactgtgaaaattttagagctgcatgaggaatgtgccatgcaagttgccatgtgtgagcagttattggggtcaccagccaccagctcctcccaaagtgtggctcccaggcctggagctggcctgaaagttctcttcaccaaggagactgcaggctacctcaggggccgtccccaggacactgtccggatcttccctccctggcaaaaactgattattccaagtggaagttgccctgttattctgaatacttacttttgtgagaaagttgttgccaaagaagattcagaaaaaacttgtgaagtgtactgtccggacataccccttccaagaagaagcatctctttggcccagatgtttgtaattaagggtctaacaaataattcacctgaaatccaggttgtgtgtagtggtgtagccactacagggacagcctggacccatgggcacaaagaagcaaaacagcgcatcccaaccagcactcccctg

SEQ ID NO: 178988 - DNA, 2090 bp, Homo sapiens
  Payload ID: 15279
  Gene Symbol: SPIDR
  Gene Name: scaffolding protein involved in DNA repair
  ENST ID: ENST00000519401
  CDS Start-End: 1-1493
agttattggggtcaccagccaccagctcctcccaaagtgtggctcccaggcctggagctggcctgaaagttctcttcaccaaggagactgcaggctacctcaggggccgtccccaggacactgtccggatcttccctccctggcaaaaactgattattccaagtggaagttgccctgttattctgaatacttacttttgtgagaaagttgttgccaaagaagattcagaaaaaacttgtgaagtgtactgtccggacataccccttccaagaagaagcatctctttggcccagatgtttgtaattaagggtctaacaaataattcacctgaaatccaggttgtgtgtagtggtgtagccactacagggacagcctggacccatgggcacaaagaagcaaaacagcgcatcccaaccagcactcccctgagggattctctcctggatgtggtggaaagccagggagctgcctcgtggccaggagctggagtccgagtggtggtgcaaagagtgtattctcttcccagcagagacagcaccaggggtcagcagggggccagctcaggacacacagacccagctggaactcgagcctgccttctggtacaagatgcctgtggaatgttcggtgaagtgcacttggagttcaccatgtcgaaggcaagacagttggaagggaagtcttgcagcctggtgggaatgaaggttctacagaaagtcaccagaggaaggacagcggggattttcagtttgattgacaccctgtggcccccagcgatacctctgaaaacacctggccgcgaccagccctgtgaagagataaaaactcatctgcctcctccagccttgtgttacatcctcacagctcatccaaatctgggacaaattgatataattgacgaagaccccatttataagctttaccagcctccagttacccgctgcttaagagacattctccagatgaatgatcttggtacccgttgcagtttctatgccacggtgatttaccaaaaaccacagctgaagagtctgctgcttctggagcaaagggagatctggctgctagtgaccgatgtcactctgcaaacgaaggaggagagagaccccaggctccccaaaaccctgctggtctatgtggcccccttgtgtgtgctgggctctgaagtcctggaggcactcgctggggctgcccctcacagcctcttcttcaaggacgctctccgtgaccagggtcggattgtttgtgctgaacgaactgtcctcttgcttcagaagccccttttgagtgtggtctctggtgcaagttcctgtgagctgcctggcccggtgatgctcgacagcctggactctgcaacacctgtcaactccatctgcagtgttcaaggcactgtggttggcgtggacgagagcactgctttctcatggcctgtgtgtgacatgtgtggcaacgggagattggaacagaggccggaagacagagctacgaagtgaagagtgtcctcggaaaggaagtggggttgttaaattgttttgtccagtccgtaaccgcccacccgaccagctgcattggattggaggaaatcgagcttctgagtgcaggaggggcctctgcagaacactagcggttgccgcaggatctgtgaactttgcaatgtggctgcaagggtggtggtggtggtggtgatttggggtagttatttgttaactatggacacagtgaacgtagtttacgatcttgaaatgaaacttagatttttctggggaaatgttcagatacagttttgtgaactgtaaatcaaaatacctttttctacagtttatcttttattttctgcaaatttaggaacatatttactcgttttcacattgaatcttaagtttaagctcttcatttggtatttaggcaatatatgagaaaaaaattttttttgttcatttgtaattttaacaagttgaacattttaccatgattgaacatgtttttattacagtatttaacattcccccaaagaataccctgcaaagtgtaaacctttgtcccatactgtgatattactgttctgctacaataaatgtcaaacctaagca

SEQ ID NO: 178989 - DNA, 482 bp, Homo sapiens
  Payload ID: 15279
  Gene Symbol: SPIDR
  Gene Name: scaffolding protein involved in DNA repair
  ENST ID: ENST00000518060
  CDS Start-End: 1-288
atgtgtggcaacgggagattggaacagaggccggaagacagaggcgccttttcctgtggggactgctcccgggtggtcacatctcctgttctcaagaggcacctgcaggtcttcctggactgccgctcaagaccgcagtgcagagtgaaggtcaagctgttgcagcgcagcatttcctccctgctgaggtttgccgccggtgaagatgggagatccagagaccaggaaccctggcagaaatcctccttccttcacttggtttccttctggctaagagctacgaagtgaagagtgtcctcggaaaggaagtggggttgttaaattgttttgtccagtccgtaaccgcccacccgaccagctgcattggattggaggaaatcgagcttctgagtgcaggaggggcctctgcagaacactagcggttgccgcaggatctgtgaactttgcaatgtggctgcaagggtggtggtggtggtggtgat

SEQ ID NO: 178990 - DNA, 2819 bp, Homo sapiens
  Payload ID: 15279
  Gene Symbol: SPIDR
  Gene Name: scaffolding protein involved in DNA repair
  Uniprot ID: Q14159
  ENST ID: ENST00000518074
  CDS Start-End: 172-2802
gcggtgcgctcaggcggcgctcccggagatgccccgcggcagccgcgctcggggctctaagagaaaaaggagttggaatacagaatgcccatcctttccaggagaaagaccactgcaggtcagaagagcaggtctcaggacagcaggggcagctgcctctctctctgaagcatggctcagtcattaacagctgaagagaagacgattacagaaaagcaccttgaattatgccctagacccaagcaagaaaccaccacatctaaaagcaccagtgggcttacagacataacatggagctccagtggaagtgatttgtcggatgaagataagacactttctcagttacagagagatgaattacagtttatcgactgggagattgacagtgacagggcagaggctagtgactgtgatgaatttgaagatgacgagggtgctgtggaaatctcagactgtgcttcttgtgcaagtaatcagtctttgacaagtgatgagaagctgtcggagcttcccaagccaagttctatagaaattttagagtattcatcagatagtgaaaaagaagatgatttggaaaatgtcctactcattgattcagaatcccctcacaaataccacgtgcagtttgcatcggatgcaagacagattatggagagactgatagatccaaggacaaaatcaacagagaccattttgcatacacctcagaaacccacagctaagtttcccaggactccagaaaattcagcaaagaagaagcttttaagaggtggactagcagaaagactaaatggactgcagaatcgagagagatctgctatttctttgtggagacatcaatgtatttcttaccaaaagacactttcaggtagaaaatctggtgtattaactgtgaaaattttagagctgcatgaggaatgtgccatgcaagttgccatgtgtgagcagttattggggtcaccagccaccagctcctcccaaagtgtggctcccaggcctggagctggcctgaaagttctcttcaccaaggagactgcaggctacctcaggggccgtccccaggacactgtccggatcttccctccctggcaaaaactgattattccaagtggaagttgccctgttattctgaatacttacttttgtgagaaagttgttgccaaagaagattcagaaaaaacttgtgaagtgtactgtccggacataccccttccaagaagaagcatctctttggcccagatgtttgtaattaagggtctaacaaataattcacctgaaatccaggttgtgtgtagtggtgtagccactacagggacagcctggacccatgggcacaaagaagcaaaacagcgcatcccaaccagcactcccctgagggattctctcctggatgtggtggaaagccagggagctgcctcgtggccaggagctggagtccgagtggtggtgcaaagagtgtattctcttcccagcagagacagcaccaggggtcagcagggggccagctcaggacacacagacccagctggaactcgagcctgccttctggtacaagatgcctgtggaatgttcggtgaagtgcacttggagttcaccatgtcgaaggcaagacagttggaagggaagtcttgcagcctggtgggaatgaaggttctacagaaagtcaccagaggaaggacagcggggattttcagtttgattgacaccctgtggcccccagcgatacctctgaaaacacctggccgcgaccagccctgtgaagagataaaaactcatctgcctcctccagccttgtgttacatcctcacagctcatccaaatctgggacaaattgatataattgacgaagaccccatttataagctttaccagcctccagttacccgctgcttaagagacattctccagatgaatgatcttggtacccgttgcagtttctatgccacggtgatttaccaaaaaccacagctgaagagtctgctgcttctggagcaaagggagatctggctgctagtgaccgatgtcactctgcaaacgaaggaggagagagaccccaggctccccaaaaccctgctggtctatgtggcccccttgtgtgtgctgggctctgaagtcctggaggcactcgctggggctgcccctcacagcctcttcttcaaggacgctctccgtgaccagggtcggattgtttgtgctgaacgaactgtcctcttgcttcagaagccccttttgagtgtggtctctggtgcaagttcctgtgagctgcctggcccggtgatgctcgacagcctggactctgcaacacctgtcaactccatctgcagtgttcaaggcactgtggttggcgtggacgagagcactgctttctcatggcctgtgtgtgacatgtgtggcaacgggagattggaacagaggccggaagacagaggcgccttttcctgtggggactgctcccgggtggtcacatctcctgttctcaagaggcacctgcaggtcttcctggactgccgctcaagaccgcagtgcagagtgaaggtcaaggtaggagccaggccagagcacgcacgcactcctagctcactccaacatagcgaagagctacgaagtgaagagtgtcctcggaaaggaagtggggttgttaaattgttttgtccagtccgtaaccgcccacccgaccagctgcattggattggaggaaatcgagcttctgagtgcaggaggggcctctgcagaacactagcggttgccgcaggatctgtgaactttgcaatgtggctgcaagggtggtggtggtggtggtgatttggggtagttatttg

SEQ ID NO: 178991 - DNA, 2745 bp, Homo sapiens
  Payload ID: 15279
  Gene Symbol: SPIDR
  Gene Name: scaffolding protein involved in DNA repair
  ENST ID: ENST00000522117
  CDS Start-End: 4-234
gagatgccccgcggcagccgcgctcggggctctaagagaaaaaggagttggaatacagaatgcccatcctttccaggagaaagaccactgcaggtcagaagagcaggtctcaggacagcaggggcagctgcctctctctctgaagcatggctcaggtgtggagaagggtttcagaacacttctgggaatccgaaaccaccacatctaaaagcaccagtgggcttacagacataacatggagctccagtggaagtgatttgtcggatgaagataagacactttctcagttacagagagatgaattacagtttatcgactgggagattgacagtgacagggcagaggctagtgactgtgatgaatttgaagatgacgagggtgctgtggaaatctcagactgtgcttcttgtgcaagtaatcagtctttgacaagtgatgagaagctgtcggagcttcccaagccaagttctatagaaattttagagtattcatcagatagtgaaaaagaagatgatttggaaaatgtcctactcattgattcagaatcccctcacaaataccacgtgcagtttgcatcggatgcaagacagattatggagagactgatagatccaaggacaaaatcaacagagaccattttgcatacacctcagaaacccacagctaagtttcccaggactccagaaaattcagcaaagaagaagcttttaagaggtggactagcagaaagactaaatggactgcagaatcgagagagatctgctatttctttgtggagacatcaatgtatttcttaccaaaagacactttcaggtagaaaatctggtgtattaactgtgaaaattttagagctgcatgaggaatgtgccatgcaagttgccatgtgtgagcagttattggggtcaccagccaccagctcctcccaaagtgtggctcccaggcctggagctggcctgaaagttctcttcaccaaggagactgcaggctacctcaggggccgtccccaggacactgtccggatcttccctccctggcaaaaactgattattccaagtggaagttgccctgttattctgaatacttacttttgtgagaaagttgttgccaaagaagattcagaaaaaacttgtgaagtgtactgtccggacataccccttccaagaagaagcatctctttggcccagatgtttgtaattaagggtctaacaaataattcacctgaaatccaggttgtgtgtagtggtgtagccactacagggacagcctggacccatgggcacaaagaagcaaaacagcgcatcccaaccagcactcccctgagggattctctcctggatgtggtggaaagccagggagctgcctcgtggccaggagctggagtccgagtggtggtgcaaagagtgtattctcttcccagcagagacagcaccaggggtcagcagggggccagctcaggacacacagacccagctggaactcgagcctgccttctggtacaagatgcctgtggaatgttcggtgaagtgcacttggagttcaccatgtcgaaggcaagacagttggaagggaagtcttgcagcctggtgggaatgaaggttctacagaaagtcaccagaggaaggacagcggggattttcagtttgattgacaccctgtggcccccagcgatacctctgaaaacacctggccgcgaccagccctgtgaagagataaaaactcatctgcctcctccagccttgtgttacatcctcacagctcatccaaatctgggacaaattgatataattgacgaagaccccatttataagctttaccagcctccagttacccgctgcttaagagacattctccagatgaatgatcttggtacccgttgcagtttctatgccacggtgatttaccaaaaaccacagctgaagagtctgctgcttctggagcaaagggagatctggctgctagtgaccgatgtcactctgcaaacgaaggaggagagagaccccaggctccccaaaaccctgctggtctatgtggcccccttgtgtgtgctgggctctgaagtcctggaggcactcgctggggctgcccctcacagcctcttcttcaaggacgctctccgtgaccagggtcggattgtttgtgctgaacgaactgtcctcttgcttcagaagccccttttgagtgtggtctctggtgcaagttcctgtgagctgcctggcccggtgatgctcgacagcctggactctgcaacacctgtcaactccatctgcagtgttcaaggcactgtggttggcgtggacgagagcactgctttctcatggcctgtgtgtgacatgtgtggcaacgggagattggaacagaggccggaagacagaggcgccttttcctgtggggactgctcccgggtggtcacatctcctgttctcaagaggcacctgcaggtcttcctggactgccgctcaagaccgcagtgcagagtgaaggtcaagctgttgcagcgcagcatttcctccctgctgaggtttgccgccggtgaagatgggagctacgaagtgaagagtgtcctcggaaaggaagtggggttgttaaattgttttgtccagtccgtaaccgcccacccgaccagctgcattggattggaggaaatcgagcttctgagtgcaggaggggcctctgcagaacactagcggttgccgcaggatctgtgaactttgcaatgtggctgcaagggtggtggtggtggtggtg

SEQ ID NO: 178992 - DNA, 1023 bp, Homo sapiens
  Payload ID: 15279
  Gene Symbol: SPIDR
  Gene Name: scaffolding protein involved in DNA repair
  ENST ID: ENST00000524033
  CDS Start-End: 4-633
gagatgccccgcggcagccgcgctcggggctctaagagaaaaaggagttggaatacagaatgcccatcctttccaggagaaagaccactgcaggtcagaagagcaggtctcaggacagcaggggcagctgcctctctctctgaagcatggctcaggtgtggagaagggtttcagaacacttctgggaatccgtcattaacagctgaagagaagacgattacagaaaagcaccttgaattatgccctagacccaagcaagaaaccaccacatctaaaagcaccagtgggcttacagacataacatggagctccagtggaagtgatttgtcggatgaagataagacactttctcagttacagagagatgaattacagtttatcgactgggagattgacagtgacagggcagaggctagtgactgtgatgaatttgaagatgacgagggtgctgtggaaatctcagactgtgcttcttgtgcaagtaatcagtctttgacaagtgatgagaagctgtcggagcttcccaagaggtggactagcagaaagactaaatggactgcagaatcgagagagatctgctatttctttgtggagacatcaatgtatttcttaccaaaagacactttcaggtagaaaatctggtgtattaactgtgaaaattttagagctgcatgaggaatgtgccatgcaagttgccatgtgtgagcagttattggggtcaccagccaccagctcctcccaaagtgtggctcccaggcctggagctggcctgaaagttctcttcaccaaggagactgcaggctacctcaggggccgtccccaggacactgtccggatcttccctccctggcaaaaactgattattccaagtggaagttgccctgttattctgaatacttacttttgtgagaaagttgttgccaaagaagattcagaaaaaacttgtgaagtgtactgtccggacataccccttccaagaagaagcatctctttggcccagatgtttgtaattaagggtctaac

SEQ ID NO: 178993 - DNA, 970 bp, Homo sapiens
  Payload ID: 15279
  Gene Symbol: SPIDR
  Gene Name: scaffolding protein involved in DNA repair
  ENST ID: ENST00000524006
  CDS Start-End: 513-970
cgcggcagccgcgctcggggctctaagagaaaaaggagttggaatacagaatgcccatcctttccaggagaaagaccactgcaggtcagaagagcaggtctcaggacagcaggggcagctgcctctctctctgaagcatggctcaggtgtggagaagggtttcagaacacttctgggaatccgtcattaacagctgaagagaagacgattacagaaaagcaccttgaattatgccctagacccaagcaagaaaccaccacatctaaaagcaccagtgggcttacagacataacatggagctccagtggaagtgatttgtcggatgaagataagacactttctcagttacagagagaggtggactagcagaaagactaaatggactgcagaatcgagagagatctgctatttctttgtggagacatcaatgtatttcttaccaaaagacactttcaggtagaaaatctggtgtattaactgtgaaaattttagagctgcatgaggaatgtgccatgcaagttgccatgtgtgagcagttattggggtcaccagccaccagctcctcccaaagtgtggctcccaggcctggagctggcctgaaagttctcttcaccaaggagactgcaggctacctcaggggccgtccccaggacactgtccggatcttccctccctggcaaaaactgattattccaagtggaagttgccctgttattctgaatacttacttttgtgagaaagttgttgccaaagaagattcagaaaaaacttgtgaagtgtactgtccggacataccccttccaagaagaagcatctctttggcccagatgtttgtaattaagggtctaacaaataattcacctgaaatccaggttgtgtgtagtggtgtagccactacagggacagcctggacccatgggcacaaagaagcaaaacagcgcatcccaaccagcactcccctgagggattc

SEQ ID NO: 178994 - DNA, 585 bp, Homo sapiens
  Payload ID: 15279
  Gene Symbol: SPIDR
  Gene Name: scaffolding protein involved in DNA repair
  ENST ID: ENST00000522222
  CDS Start-End: 5-385
ggagatgccccgcggcagccgcgctcggggctctaagagaaaaaggagttggaatacagaatgcccatcctttccaggagaaagaccactgcaggtcagaagagcaggtctcaggacagcaggggcagctgcctctctctctgaagcatggctcaggtgtggagaagggtttcagaacacttctgggaatccgtcattaacagctgaagagaagacgattacagaaaagcaccttgaattatgccctagacccaagcaagaaaccaccacatctaaaagcaccagtgggcttacagacataacatggagctccagtggaagtgatttgtcggatgaagataagacactttctcagttacagagaggttttggcaattatgattgaaggtgctataaacatacatttggaagtttccgtgtggagataaactttcaactcctttgagtagataccaagcagagcaactattggattgtattgatatttttcaggtaaatatccttttggttgcaaataacaggaaccaaatgtagctggttttaaaagaagagaaaattcactagaacagtactgcaaatcttgag

SEQ ID NO: 178995 - DNA, 2614 bp, Homo sapiens
  Payload ID: 15279
  Gene Symbol: SPIDR
  Gene Name: scaffolding protein involved in DNA repair
  ENST ID: ENST00000524126
  CDS Start-End: 7-552
ccggagatgccccgcggcagccgcgctcggggctctaagagaaaaaggagttggaatacagaatgcccatcctttccaggagaaagaccactgcaggtcagaagagcaggtctcaggacagcaggggcagctgcctctctctctgaagcatggctcaggtgtggagaagggtttcagaacacttctgggaatccgtcattaacagctgaagagaagacgattacagaaaagcaccttgaattatgccctagacccaagcaagaaaccaccacatctaaaagcaccagtgggcttacagacataacatggagctccagtggaagtgatttgtcggatgaagataagacactttctcagttacagagagatgaattacagtttatcgactgggagattgacagtgacagggcagaggctagtgactgtgatgaatttgaagatgacgagggtgctgtggaaatctcagactgtgcttcttgtgcaagtaatcagtctttgacaagtgatgagaagctgtcggagcttcccaaggtagaaaatctggtgtattaactgtgaaaattttagagctgcatgaggaatgtgccatgcaagttgccatgtgtgagcagttattggggtcaccagccaccagctcctcccaaagtgtggctcccaggcctggagctggcctgaaagttctcttcaccaaggagactgcaggctacctcaggggccgtccccaggacactgtccggatcttccctccctggcaaaaactgattattccaagtggaagttgccctgttattctgaatacttacttttgtgagaaagttgttgccaaagaagattcagaaaaaacttgtgaagtgtactgtccggacataccccttccaagaagaagcatctctttggcccagatgtttgtaattaagggtctaacaaataattcacctgaaatccagagcctgccttctggtacaagatgcctgtggaatgttcggtgaagtgcacttggagttcaccatgtcgaaggcaagacagttggaagggaagtcttgcagcctggtgggaatgaaggttctacagaaagtcaccagaggaaggacagcggggattttcagtttgattgacaccctgtggcccccagcgatacctctgaaaacacctggccgcgaccagccctgtgaagagataaaaactcatctgcctcctccagccttgtgttacatcctcacagctcatccaaatctgggacaaattgatataattgacgaagaccccatttataagctttaccagcctccagttacccgctgcttaagagacattctccagatgaatgatcttggtacccgttgcagtttctatgccacggtgatttaccaaaaaccacagctgaagagtctgctgcttctggagcaaagggagatctggctgctagtgaccgatgtcactctgcaaacgaaggaggagagagaccccaggctccccaaaaccctgctggtctatgtggcccccttgtgtgtgctgggctctgaagtcctggaggcactcgctggggctgcccctcacagcctcttcttcaaggacgctctccgtgaccagggtcggattgtttgtgctgaacgaactgtcctcttgcttcagaagccccttttgagtgtggtctctggtgcaagttcctgtgagctgcctggcccggtgatgctcgacagcctggactctgcaacacctgtcaactccatctgcagtgttcaaggcactgtggttggcgtggacgagagcactgctttctcatggcctgtgtgtgacatgtgtggcaacgggagattggaacagaggccggaagacagaggcgccttttcctgtggggactgctcccgggtggtcacatctcctgttctcaagaggcacctgcaggtcttcctggactgccgctcaagaccgcagtgcagagtgaaggtcaagctgttgcagcgcagcatttcctccctgctgaggtttgccgccggtgaagatgggagctacgaagtgaagagtgtcctcggaaaggaagtggggttgttaaattgttttgtccagtccgtaaccgcccacccgaccagctgcattggattggaggaaatcgagcttctgagtgcaggaggggcctctgcagaacactagcggttgccgcaggatctgtgaactttgcaatgtggctgcaagggtggtggtggtggtggtgatttggggtagttatttgttaactatggacacagtgaacgtagtttacgatcttgaaatgaaacttagatttttctggggaaatgttcagatacagttttgtgaactgtaaatcaaaatacctttttctacagtttatcttttattttctgcaaatttaggaacatatttactcgttttcacattgaatcttaagtttaagctcttcatttggtatttaggcaatatatgagaaaaaaattttttttgttcatttgtaattttaacaagttgaacattttaccatgattgaacatgtttttattacagtatttaacattcccccaaagaataccctgcaaagtgtaaacctttgtcccatactgtgatattactgttctgctacaataaatgtcaaacctaa

SEQ ID NO: 178996 - DNA, 849 bp, Homo sapiens
  Payload ID: 15279
  Gene Symbol: SPIDR
  Gene Name: scaffolding protein involved in DNA repair
  ENST ID: ENST00000517824
  CDS Start-End: 18-416
aggcggcgctcccggagatgccccgcggcagccgcgctcggggctctaagagaaaaaggagttggaatacagaatgcccatcctttccaggagaaagaccactgcaggtcagaagagcaggtctcaggacagcaggggcagctgcctctctctctgaagcatggctcaggtgtggagaagggtttcagaacacttctgggaatccgtcattaacagctgaagagaagacgattacagaaaagcaccttgaattatgccctagacccaagcaagaaaccaccacatctaaaagcaccagtgggcttacagacataacatggagctccagtggaagtgatttgtcggatgaagataagacactttctcagttacagagagccaagttctatagaaattttagagtattcatcagatagtgaaaaagaagatgatttggaaaatgtcctactcattgattcagaatcccctcacaaataccacgtgcagtttgcatcggatgcaagacagattatggagagactgatagatccaaggacaaaatcaacagagaccattttgcatacacctcagaaacccacagctaagtttcccaggactccagaaaattcagcaaagaagaagcttttaaggtagaaaatctggtgtattaactgtgaaaattttagagctgcatgaggaatgtgccatgcaagttgccatgtgtgagcagttattggggtcaccagccaccagctcctcccaaagtgtggctcccaggcctggagctggcctgaaagttctcttcaccaaggagactgcaggctacctcaggggccgtccccaggacactgtccggatcttccctccctg

SEQ ID NO: 178997 - DNA, 3311 bp, Homo sapiens
  Payload ID: 15279
  Gene Symbol: SPIDR
  Gene Name: scaffolding protein involved in DNA repair
  Uniprot ID: Q14159
  ENST ID: ENST00000541342
  CDS Start-End: 225-2762
aatggcagggcgcggtgcggcgcgccgaggtgggacggcggcgcgctgaggaggcggtgcgctcaggcggcgctcccggagatgccccgcggcagccgcgctcggggctctaagagaaaaaggagttggaatacagaatgcccatcctttccaggagaaagaccactgcaggtcagaagagcaggtctcaggacagcaggggcagctgcctctctctctgaagcatggctcaggtgtggagaagggtttcagaacacttctgggaatccgaaaccaccacatctaaaagcaccagtgggcttacagacataacatggagctccagtggaagtgatttgtcggatgaagataagacactttctcagttacagagagatgaattacagtttatcgactgggagattgacagtgacagggcagaggctagtgactgtgatgaatttgaagatgacgagggtgctgtggaaatctcagactgtgcttcttgtgcaagtaatcagtctttgacaagtgatgagaagctgtcggagcttcccaagccaagttctatagaaattttagagtattcatcagatagtgaaaaagaagatgatttggaaaatgtcctactcattgattcagaatcccctcacaaataccacgtgcagtttgcatcggatgcaagacagattatggagagactgatagatccaaggacaaaatcaacagagaccattttgcatacacctcagaaacccacagctaagtttcccaggactccagaaaattcagcaaagaagaagcttttaagaggtggactagcagaaagactaaatggactgcagaatcgagagagatctgctatttctttgtggagacatcaatgtatttcttaccaaaagacactttcaggtagaaaatctggtgtattaactgtgaaaattttagagctgcatgaggaatgtgccatgcaagttgccatgtgtgagcagttattggggtcaccagccaccagctcctcccaaagtgtggctcccaggcctggagctggcctgaaagttctcttcaccaaggagactgcaggctacctcaggggccgtccccaggacactgtccggatcttccctccctggcaaaaactgattattccaagtggaagttgccctgttattctgaatacttacttttgtgagaaagttgttgccaaagaagattcagaaaaaacttgtgaagtgtactgtccggacataccccttccaagaagaagcatctctttggcccagatgtttgtaattaagggtctaacaaataattcacctgaaatccaggttgtgtgtagtggtgtagccactacagggacagcctggacccatgggcacaaagaagcaaaacagcgcatcccaaccagcactcccctgagggattctctcctggatgtggtggaaagccagggagctgcctcgtggccaggagctggagtccgagtggtggtgcaaagagtgtattctcttcccagcagagacagcaccaggggtcagcagggggccagctcaggacacacagacccagctggaactcgagcctgccttctggtacaagatgcctgtggaatgttcggtgaagtgcacttggagttcaccatgtcgaaggcaagacagttggaagggaagtcttgcagcctggtgggaatgaaggttctacagaaagtcaccagaggaaggacagcggggattttcagtttgattgacaccctgtggcccccagcgatacctctgaaaacacctggccgcgaccagccctgtgaagagataaaaactcatctgcctcctccagccttgtgttacatcctcacagctcatccaaatctgggacaaattgatataattgacgaagaccccatttataagctttaccagcctccagttacccgctgcttaagagacattctccagatgaatgatcttggtacccgttgcagtttctatgccacggtgatttaccaaaaaccacagctgaagagtctgctgcttctggagcaaagggagatctggctgctagtgaccgatgtcactctgcaaacgaaggaggagagagaccccaggctccccaaaaccctgctggtctatgtggcccccttgtgtgtgctgggctctgaagtcctggaggcactcgctggggctgcccctcacagcctcttcttcaaggacgctctccgtgaccagggtcggattgtttgtgctgaacgaactgtcctcttgcttcagaagccccttttgagtgtggtctctggtgcaagttcctgtgagctgcctggcccggtgatgctcgacagcctggactctgcaacacctgtcaactccatctgcagtgttcaaggcactgtggttggcgtggacgagagcactgctttctcatggcctgtgtgtgacatgtgtggcaacgggagattggaacagaggccggaagacagaggcgccttttcctgtggggactgctcccgggtggtcacatctcctgttctcaagaggcacctgcaggtcttcctggactgccgctcaagaccgcagtgcagagtgaaggtcaagctgttgcagcgcagcatttcctccctgctgaggtttgccgccggtgaagatgggagctacgaagtgaagagtgtcctcggaaaggaagtggggttgttaaattgttttgtccagtccgtaaccgcccacccgaccagctgcattggattggaggaaatcgagcttctgagtgcaggaggggcctctgcagaacactagcggttgccgcaggatctgtgaactttgcaatgtggctgcaagggtggtggtggtggtggtgatttggggtagttatttgttaactatggacacagtgaacgtagtttacgatcttgaaatgaaacttagatttttctggggaaatgttcagatacagttttgtgaactgtaaatcaaaatacctttttctacagtttatcttttattttctgcaaatttaggaacatatttactcgttttcacattgaatcttaagtttaagctcttcatttggtatttaggcaatatatgagaaaaaaattttttttgttcatttgtaattttaacaagttgaacattttaccatgattgaacatgtttttattacagtatttaacattcccccaaagaataccctgcaaagtgtaaacctttgtcccatactgtgatattactgttctgctacaataaatgtcaaacctaagcactttgcagttcactacttttgggaaaatgttctagggaactgtatcacaggtgaaactgttacccataaagtgtagctctctg

SEQ ID NO: 178998 - DNA, 902 bp, Homo sapiens
  Payload ID: 15280
  Gene Symbol: SCAND1
  Gene Name: SCAN domain containing 1
  Uniprot ID: P57086
  ENST ID: ENST00000305978
  CDS Start-End: 235-774
cacgcgcagctcgccctcccgcaccgcgagggcagcagccgcctcatgcgactcgagaacgctagagggcgccgcttccgggagcccgcaagcggcttccgggtgctcgcgcgccgacctggacgcagagaagccagagactttcgcttccggctgccgcaggcgcttcgctggtgcagacgcagtgctgagcacacagctaccggacaaagagtgacgcccggagctggagttatggcggctacggagccgatcttggcggccactgggagtcccgcggcggtgccaccggagaaactggaaggagccggttcgagctcagcccctgagcgtaactgtgtgggctcctcgctgccagaggcctcaccgcctgcccctgagccttccagtcccaacgccgcggtccctgaagccatccctacgccccgagctgcggcctccgcggccctggagctgcctctcgggcccgcacccgtgagcgtagcgcctcaggccgaagctgaagcgcgctccacaccaggccccgccggctctagactcggtcccgagacgttccgccagcgtttccggcagttccgctaccaggatgcggcgggtccccgggaggctttccggcagctgcgggagctgtcccgccagtggctgcggcctgacatccgcaccaaggagcagatcgtggagatgctggtgcaagagcagctgctcgccatcctgcccgaggcggctcgggcccggcggatccgccgccgcacggatgtgcgcatcactggctgagcggtggagctgcgggcggccagggccgggcgctctgtgcggactggggccatgatcgggcccgggggcctgagcctgggaccccaccccgtgttaatgaaaaatgagttttggcagcgcctgtggtc

SEQ ID NO: 178999 - DNA, 1727 bp, Homo sapiens
  Payload ID: 15280
  Gene Symbol: SCAND1
  Gene Name: SCAN domain containing 1
  Uniprot ID: P57086
  ENST ID: ENST00000373991
  CDS Start-End: 1072-1611
gtgacttgctcctccttgtcttccaccacgattgtgaggcctccctagccacgtggagctctcaaaggtggagacaacccaaatgtccttcaatggatggttaaatataccatggtacatctataccatagattactactcagcaataaaaaggacaaactattgatacaagcaaccacttgggtgaatctccagggaattgtgccaagtggaaagagccaagcccaaatgattatacactatatgattccagaacccacagagccgcatttcccttggtttcggaggacacgcgaaaaataacaacagcaaagggttctcgagcatctccttcgcgccagacggtgtgttgtactttgtcatcgtcgcagtaaggccggtgctatcgccctcctagtttgaccaagcgagaggactttctccagatgggcccctcccgagagaatggtcgccgtcccgctctcctgttcgggtcaccaccggccgggcgccactcgaacgagccccggccagccgtcaccctaatcattcccgaaggaggggccatcagagctacagctcatcagggtcaatcagaaggggcgcccgcacgcaaaggtcacctgcaaaccgaagcggcgcacggataaggtccgggacttgaagtctatctccaaacattcaggctcctcctccgactcctcctcgaactggcgctcagaggcgccaccattcggaaggagcccaggccacgcgcagctcgccctcccgcaccgcgagggcagcagccgcctcatgcgactcgagaacgctagagggcgccgcttccgggagcccgcaagcggcttccgggtgctcgcgcgccgacctggacgcagagaagccagagactttcgcttccggctgccgcaggcgcttcgctggtgcaggtaagctccgcacactctcggccggtcccgagtccgactccctcaagggtgacgcgagctctgccctttaaccggaaacgtctccctgctcaccccacccccgcgcagacgcagtgctgagcacacagctaccggacaaagagtgacgcccggagctggagttatggcggctacggagccgatcttggcggccactgggagtcccgcggcggtgccaccggagaaactggaaggagccggttcgagctcagcccctgagcgtaactgtgtgggctcctcgctgccagaggcctcaccgcctgcccctgagccttccagtcccaacgccgcggtccctgaagccatccctacgccccgagctgcggcctccgcggccctggagctgcctctcgggcccgcacccgtgagcgtagcgcctcaggccgaagctgaagcgcgctccacaccaggccccgccggctctagactcggtcccgagacgttccgccagcgtttccggcagttccgctaccaggatgcggcgggtccccgggaggctttccggcagctgcgggagctgtcccgccagtggctgcggcctgacatccgcaccaaggagcagatcgtggagatgctggtgcaagagcagctgctcgccatcctgcccgaggcggctcgggcccggcggatccgccgccgcacggatgtgcgcatcactggctgagcggtggagctgcgggcggccagggccgggcgctctgtgcggactggggccatgatcgggcccgggggcctgagcctgggaccccaccccgtgttaatgaaaaatgagttttggca

SEQ ID NO: 179000 - DNA, 1371 bp, Homo sapiens
  Payload ID: 15280
  Gene Symbol: SCAND1
  Gene Name: SCAN domain containing 1
  Uniprot ID: P57086
  ENST ID: ENST00000615116
  CDS Start-End: 704-1243
taacatttttatttgacccaatatatgcaaaacattatattccaacatgtaatcagtattaaaaagtattgagataatttttacatcagttttttcgtactaagtcccgtattttacaatatagcacatctcaattcgctatatttcgagggttatcaactagctacgttgcaagagctgagtcaactcaggaggccagcggccaccataaggggcaatgcatttagagttcacttattaaatgctgacgttaacagaacccacagagccgcatttcccttggtttcggaggacacgcgaaaaataacaacagcaaagggttctcgagcatctccttcgcgccagacggtgtgttgtactttgtcatcgtcgcagtaaggccggtgctatcgccctcctagtttgaccaagcgagaggactttctccagatgggcccctcccgagagaatggtcgccgtcccgctctcctgttcgggtcaccaccggccgggcgccactcgaacgagccccggccagccgtcaccctaatcattcccgaaggaggggccatcagagctacagctcatcagggtcaatcagaaggggcgcccgcacgcaaaggtcacctactttcgcttccggctgccgcaggcgcttcgctggtgcagacgcagtgctgagcacacagctaccggacaaagagtgacgcccggagctggagttatggcggctacggagccgatcttggcggccactgggagtcccgcggcggtgccaccggagaaactggaaggagccggttcgagctcagcccctgagcgtaactgtgtgggctcctcgctgccagaggcctcaccgcctgcccctgagccttccagtcccaacgccgcggtccctgaagccatccctacgccccgagctgcggcctccgcggccctggagctgcctctcgggcccgcacccgtgagcgtagcgcctcaggccgaagctgaagcgcgctccacaccaggccccgccggctctagactcggtcccgagacgttccgccagcgtttccggcagttccgctaccaggatgcggcgggtccccgggaggctttccggcagctgcgggagctgtcccgccagtggctgcggcctgacatccgcaccaaggagcagatcgtggagatgctggtgcaagagcagctgctcgccatcctgcccgaggcggctcgggcccggcggatccgccgccgcacggatgtgcgcatcactggctgagcggtggagctgcgggcggccagggccgggcgctctgtgcggactggggccatgatcgggcccgggggcctgagcctgggaccccaccccgtgttaatgaaaaatgagttttggcagcgcctgtggtc

SEQ ID NO: 179001 - DNA, 3510 bp, Homo sapiens
  Payload ID: 15281
  Gene Symbol: SCARA3
  Gene Name: scavenger receptor class A, member 3
  Uniprot ID: Q6AZY7
  ENST ID: ENST00000301904
  CDS Start-End: 21-1841
aggccccagaggaagagaccatgaaagtgaggtcggccggcggcgatggagatgccttgtgcgttacagaagaggacctggcgggtgacgacgaggacatgccgaccttcccatgcacccagaagggccggccagggccccgctgcagccgctgccagaagaacctatctttgcacacatcggtgcggattctttacctcttcctggccctgctcctggtggccgtggctgtgttggcctctctggttttcagaaaagtggactctctctccgaagacatctccttgacccagtctatttatgacaagaagcttgtgttaatgcagaaaaatctccagggcctggatccgaaagccctgaacaactgctctttctgccatgaagctgggcagctggggccagagatccgaaaactgcaggaggagctggagggaattcagaagctgcttctggcccaggaggtgcagctggaccagaccttacaggcccaggaggtgctctccaccaccagcagacaaatctcccaggagatgggcagttgctccttctccatccaccaggttaaccagtctctggggctcttcctggcccaggtgagaggctggcaggccaccacagctggcctggacctctctctgaaggacctcacccaggagtgctacgatgtcaaggctgcagtgcaccagatcaacttcaccgtggggcagacttccgagtggatccacgggatccagcggaagacagacgaggagaccctgaccctccagaagattgtcaccgactggcagaactacacacggctcttcagcggcctgcgcaccacctccaccaagactggagaggcggtcaagaacatccaggccaccctgggggcctcctcacagcgcatcagccagaactcagagagcatgcacgacctggtactccaggtcatgggcttgcagctgcagctggataacatctcgtccttcctggatgaccacgaagagaacatgcatgatcttcagtaccatacccactacgcccagaaccgcactgtggagaggtttgagtctctggaaggacgcatggcttctcacgagattgaaattggcaccatcttcaccaacatcaatgccaccgacaaccacgtgcacagcatgctcaagtacctggatgacgtgcggctctcctgcacgctgggcttccacacccatgccgaggagctctactacctgaacaagtctgtctccatcatgctgggcaccacagacctgctccgggagcgcttcagcctgctcagtgcccggctggacctcaacgtccggaacctctccatgatcgtggaggagatgaaggcagtggacacacagcatggagaaatccttcgcaatgtcaccatcctacgaggtgcccccggccctccaggaccaagaggattcaaaggagatatgggcgtgaaagggcctgttggcggcagaggcccgaaaggagaccccggcagcttgggccccctgggaccccagggtcctcaggggcaacctggagaggccgggcctgtgggagaaaggggccctgttggccctcgagggttcccaggcctcaaaggctcaaagggcagctttggaactggagggccgagaggacagccaggcccaaaaggggacatagggcccccagggccagaagggcccccggggtctccagggccctcagggcctcagggaaaaccgggaattgcagggaagacagggtcaccaggccagcggggggccatggggcctaagggtgaaccagggatccagggtccccctggtctcccggggcctccaggtccaccaggaagccagagcttctactgaggagggctgtggcagagccactgtcacacagaatgccggaggggcgcagagcagatccaggccccagaaagcctcacctacagacagctgtggtcctctgattccaatgagggggctccccagggctgaccctgcagctttgggctcccccatagtgactgtgccataggaaagcagcccctcctcacacatacatgtgcacatgcacacacatgcatgcacacacatgcacacatacacgcacatgcacacatacacatgcatgcacacatacacaggcatacatgcatgcacacacacatgcacgcacacacacatgcacacatacacgtgcacacatacacaggcacacatgcatgcacacatacacatgcacacacacatgcacacatatatgcacaggcacacacatgtacgcacacacacatgcactgcacacatatccatgcacacaaacacatatatacacatgcacatacacagatttttctgctggccaggtgggccaactgggtttccctggctgggcaggaggagagggcagaggaagaccccctctcctgtgactgagcctgccagggaggcagctacctcgggaggaaggtctcacatctgtctctgggcacccatgctggccagcagtttcccagggctccctggggttgaaaagccccaaggaaacctttgcgggtggggcgttactgccaaaactccagaggcaaagtggacctggcaaccacaagaccctccccataagcaggggaccagcatacccgggagctgtccctgtctgtcacagcacagtggggccacgaggctgacattctctggccttgcacacagtgccccctgagaagttcaacatttatttcttcacgtgtccagaaaattcctcaattcatccttgcctctgcccttcaggagcagcctggaaggaatccaagcaggagtttcatctgcatgggggcactctgcaggccctggaacattgggcctgagtggagatgggagacagaggcaggccagaaggttctctctgcacagctgcctcccttgctctccctgaggctggcctgccccattccccaagggggctcctctggagtggtggggaggattaggctgcagaagggccaaccccttgcaacagggcagctctcgcctcccgcacacggctctcctgatcacagctgcatgccgaccttgtcccaccgggacccacaatggcccgagccctctttgcatgggcagccagctggactaggagtgggaagggcctggacactcacagaggccccctctgtcatcactccttggcacccaccaacttcctgcacacactggcagagaggggcgctgggaaatcaccccacagggtggaggtctcctgttggctacactctaaagctgctttgccttcatgttcaaacagattcaggcaccaccccctccaccgcccgcaaggttagggcatagagttgtctccttcccaacacggacccagagagcagcccttccctgctcaaagcctttccgcaccctcctgactgtcctggatgtgcaactggtttgcactgcacaccccacggccatgtaactctcctgtccacatatgataataccattctgcatagtattactgactcagtaaagagctatttccaggagt

SEQ ID NO: 179002 - DNA, 1910 bp, Homo sapiens
  Payload ID: 15281
  Gene Symbol: SCARA3
  Gene Name: scavenger receptor class A, member 3
  Uniprot ID: Q6AZY7
  ENST ID: ENST00000337221
  CDS Start-End: 334-1734
gggaggaagggtgcgcggggcgaggggcggcggcagacctcgcggggccccagcgggaagcgcgggcggcggcgggatgcgcgctctgggcggcggggcgcggcgctaggcgcccggcggggcttccccaggctgcgaccccgcgggaccctccactcctcccgccgcctccgcagcccgcgcgccggagcatgagtcccggccggagccccacggccgcgggcggcgcctaggacggcgatccgcgccctggaggatccgccggccgcccggctccactacagctccagccgcctgcagcggggccctcctgaggccccagaggaagagaccatgaaagtgaggtcggccggcggcgatggagatgccttgtgcgttacagaagaggacctggcgggtgacgacgaggacatgccgaccttcccatgcacccagaagggccggccagggccccgctgcagccgctgccagaagaacctatctttgcacacatcggtgcggattctttacctcttcctggccctgctcctggtggccgtggctgtgttggcctctctggttttcagaaaagtggactctctctccgaagacatctccttgacccagtctatttatgacaagaagcttgtgttaatgcagaaaaatctccagggcctggatccgaaagccctgaacaactgctctttctgccatgaagctgggcagctggggccagagatccgaaaactgcaggaggagctggagggaattcagaagctgcttctggcccaggaggtgcagctggaccagaccttacaggcccaggaggtgctctccaccaccagcagacaaatctcccaggagatgggcagttgctccttctccatccaccaggttaaccagtctctggggctcttcctggcccaggtgagaggctggcaggccaccacagctggcctggacctctctctgaaggacctcacccaggagtgctacgatgtcaaggctgcagtgcaccagatcaacttcaccgtggggcagacttccgagtggatccacgggatccagcggaagacagacgaggagaccctgaccctccagaagattgtcaccgactggcagaactacacacggctcttcagcggcctgcgcaccacctccaccaagactggagaggcggtcaagaacatccaggccaccctgggggcctcctcacagcgcatcagccagaactcagagagcatgcacgacctggtactccaggtcatgggcttgcagctgcagctggataacatctcgtccttcctggatgaccacgaagagaacatgcatgatcttcagtaccatacccactacgcccagaaccgcactgtggagaggtttgagtctctggaaggacgcatggcttctcacgagattgaaattggcaccatcttcaccaacatcaatgccaccgacaaccacgtgcacagcatgctcaagtacctggatgacgtgcggctctcctgcacgctgggcttccacacccatgccgaggagctctactacctgaacaagtctgtctccatcatgctgggcaccacagacctgctccgggagcgcttcagcctgctcagtgcccggctggacctcaacgtccggaacctctccatgatcgtggaggagatgaaggcagtggacacacagcatggagaaatccttcgcaatgtcaccatcctacgaggtcacactttgttttcacataatcggatatgatatgaagccagccataaagcccaggatgaccaagaatataatttgaaaatgaatttgtttactatccttaatggtaagcatcaccttaagcacatattatgccttgagacactagccaattgtggtacatgaaaataatttataaataaataaatttacctatattaggaagatga

SEQ ID NO: 179003 - DNA, 4026 bp, Homo sapiens
  Payload ID: 15282
  Gene Symbol: SCARA5
  Gene Name: scavenger receptor class A, member 5
  Uniprot ID: Q6ZMJ2
  ENST ID: ENST00000354914
  CDS Start-End: 487-1974
gtattccagaccccattgcagaagcctccgcaactgctccaagaactttattttatacggactggcggcgagagcagctgcagttcgcatctcaggcagtacctagaggagctgccggtgcctcctcagaacatctcctgatcgctacccaggaccaggcaccaaggacagggagtcccaggcgcacaccccccattctgggtcccccaggcccagacccccactctgccacaggttgcatcttgacctggtcctcctgcagaagtggcccctgtggtcctgctctgagactcgtccctgggcgcccctgcagcccctttctatgactccatctggatttggctggctgtggggacgcggtccgaggggcggcctggctctcagcgtggtggcagccagctctctggccaccatggcaaatgctgagatctgaggggacaaggctctacagcctcagccaggggcactcagctgttgcagggtgtgatggagaacaaagctatgtacctacacaccgtcagcgactgtgacaccagctccatctgtgaggattcctttgatggcaggagcctgtccaagctgaacctgtgtgaggatggtccatgtcacaaacggcgggcaagcatctgctgtacccagctggggtccctgtcggccctgaagcatgctgtcctggggctctacctgctggtcttcctgattcttgtgggcatcttcatcttagcagtgtccaggccgcgcagctcccctgacgacctgaaggccctgactcgcaatgtgaaccggctgaatgagagcttccgggacttgcagctgcggctgctgcaggctccgctgcaagcggacctgacggagcaggtgtggaaggtgcaggacgcgctgcagaaccagtcagactcgttgctggcgctggcgggcgcagtgcagcggctggagggcgcgctgtgggggctgcaggcgcaggcggtgcagaccgagcaggcggtggccctgctgcgggaccgcacgggccagcagagcgacacggcgcagctggagctctaccagctgcaggtggagagcaacagtagccagctgctgctgaggcgccacgcgggcctgctggacgggctggcgcgcagggtgggcatcctgggcgaggagctggccgacgtgggcggcgtgctgcgcggcctcaaccacagcctgtcctacgacgtggccctccaccgcacgcggctgcaggacctgcgggtgctggtgagcaacgccagcgaggacacgcgccgcctgcgcctggcgcacgtaggcatggagctgcagctgaagcaggagctggccatgctcaacgcggtcaccgaggacctgcgcctcaaggactgggagcactccatcgcactgcggaacatctccctcgcgaaagggccaccgggacccaaaggtgatcagggggatgaaggaaaggaaggcaggcctggcatccctggattgcctggacttcgaggtctgcccggggagagaggtaccccaggattgcccgggcccaagggcgatgatgggaagctgggggccacaggaccaatgggcatgcgtgggttcaaaggtgaccgaggcccaaaaggagagaaaggagagaaaggagacagagctggggatgccagtggcgtggaggccccgatgatgatccgcctggtgaatggctcaggtccgcacgagggccgcgtggaagtgtaccacgaccggcgttggggcaccgtgtgtgacgacggctgggacaagaaggacggagacgtggtgtgccgcatgctcggcttccgcggtgtggaggaggtgtaccgcacagctcgattcgggcaaggcactgggaggatctggatggatgacgttgcctgcaagggcacagaggaaaccatcttccgctgcagcttctccaaatggggggtgacaaactgtggacatgccgaagatgccagcgtgacatgcaacagacactgaaagtgggcagagcccaagttcggggtcctgcacagagcacccttcctgcatccctggggtggggcacagctcggggccaccctgaccatgcctcgaccacaccccgtccagcattctcagtcctcacacctgcatcccaggaccgtgggggccggtcgtcatttccctcttgaacatgtgctccgaagtataactctgggacctactgcccgtctctctcttccaccaggttcctgcatgaggagccctgatcaactggatcaccactttgcccagcctctgaacaccatgcaccaggcctcaatatcccagttccctttggccttttagttacaggtgaatgctgagaatgtgtcagagacaagtgcagcagcagcgatggttggtagtatagatcatttactcttcagacaattcccaaacctccattagtccaagagtttctacatcttcctccccagcaagaggcaacgtcaagtgatgaatttcccccctttactctgcctctgctccccatttgctagtttgaggaagtgacatagaggagaagccagctgtaggggcaagagggaaatgcaagtcacctgcaggaatccagctagatttggagaagggaatgaaactaacattgaatgactaccatggcacgctaaatagtatcttgggtgccaaattcatgtatccacttagctgcattggtccagggcatgtcagtctggatacagccttacctccaggtagcacttaactggtccattcacctagactgcaagtaagaagacaaaatgactgagaccgtgtgcccacctgaacttattgtctttacttggcctgagctaaaagcttgggtgcaggacctgtgtaactagaaagttgcctacttcagaacctccagggcgtgagtgcaaggtcaaacatgactggcttccaggccgaccatcaatgtaggaggagagctgatgtggagggtgacatgggggctgcccatgttaaacctgagtccagtgctctggcattgggcagtcacggttaaagccaagtcatgtgtgtctcagctgtttggaggtgatgattttgcatcttccaagcctcttcaggtgtgaatctgtggtcaggaaaacacaagtcctaatggaacccttaggggggaaggaaatgaagattccctataacctctgggggtggggagtaggaataaggggccttgggcctccataaatctgcaatctgcaccctcctcctagagacagggagatcgtgttctgctttttacatgaggagcagaactgggccatacacatgttcaagaactaggggagctacctggtagcaagtgagtgcagacccacctcaccttgggggaatctcaaactcataggcctcagatacacgatcacctgtcatatcaggtgagcactggcctgcttggggagagacctgggcccctccaggtgtaggaacagcaacactcctggctgacaactaagccaatatggccctaggtcattcttgcttccaatatgcttgccactccttaaatgtcctaatgatgagaaactctctttctgaccaattgctatgtttacataacacgcatgtactcatgcatcccttgccagagcccatatatgtatgcatatataaacatagcactttttactacatagctcagcacattgcaaggtttgcatttaagttaaaaaaaaaaaaaaaaaaaaactaaaggtgaaagatgccacattgaacaaactaaattcccaacccggttctggcaaagaatccagttatcccttccatgaagacgcacataactctcttacttggtctttccattagggacaacataagtcttgttttacatcaaataaaaacaatgttaaaaagtgtgtgaaccttaaaaatggaagtctactagtttacatacctacttcagaggacatggaaatgaccatgggcctgcatttcagggaccaaagcaaattaggcctggcctaaaatacatcagaccttttgtaagaaagaatttcaataaagcaaaaaacatgtcacaag

SEQ ID NO: 179004 - DNA, 2934 bp, Homo sapiens
  Payload ID: 15282
  Gene Symbol: SCARA5
  Gene Name: scavenger receptor class A, member 5
  Uniprot ID: Q6ZMJ2
  ENST ID: ENST00000380385
  CDS Start-End: 424-1236
ggcggcgagagcagctgcagttcgcatctcaggcagtacctagaggagctgccggtgcctcctcagaacatctcctgatcgctacccaggaccaggcaccaaggacagggagtcccaggcgcacaccccccattctgggtcccccaggcccagacccccactctgccacaggttgcatcttgacctggtcctcctgcagaagtggcccctgtggtcctgctctgagactcgtccctgggcgcccctgcagcccctttctatgactccatctggatttggctggctgtggggacgcggtccgaggggcggcctggctctcagcgtggtggcagccagctctctggccaccatggcaaatgctgagatctgaggggacaaggctctacagcctcagccaggggcactcagctgttgcagggtgtgatggagaacaaagctatgtacctacacaccgtcagcgactgtgacaccagctccatctgtgaggattcctttgatggcaggagcctgtccaagctgaacctgtgtgaggatggtccatgtcacaaacggcgggcaagcatctgctgtacccagctggggtccctgtcggccctgaagcatgctgtcctggggctctacctgctggtcttcctgattcttgtgggcatcttcatcttagcagggccaccgggacccaaaggtgatcagggggatgaaggaaaggaaggcaggcctggcatccctggattgcctggacttcgaggtctgcccggggagagaggtaccccaggattgcccgggcccaagggcgatgatgggaagctgggggccacaggaccaatgggcatgcgtgggttcaaaggtgaccgaggcccaaaaggagagaaaggagagaaaggagacagagctggggatgccagtggcgtggaggccccgatgatgatccgcctggtgaatggctcaggtccgcacgagggccgcgtggaagtgtaccacgaccggcgttggggcaccgtgtgtgacgacggctgggacaagaaggacggagacgtggtgtgccgcatgctcggcttccgcggtgtggaggaggtgtaccgcacagctcgattcgggcaaggcactgggaggatctggatggatgacgttgcctgcaagggcacagaggaaaccatcttccgctgcagcttctccaaatggggggtgacaaactgtggacatgccgaagatgccagcgtgacatgcaacagacactgaaagtgggcagagcccaagttcggggtcctgcacagagcacccttcctgcatccctggggtggggcacagctcggggccaccctgaccatgcctcgaccacaccccgtccagcattctcagtcctcacacctgcatcccaggaccgtgggggccggtcgtcatttccctcttgaacatgtgctccgaagtataactctgggacctactgcccgtctctctcttccaccaggttcctgcatgaggagccctgatcaactggatcaccactttgcccagcctctgaacaccatgcaccaggcctcaatatcccagttccctttggccttttagttacaggtgaatgctgagaatgtgtcagagacaagtgcagcagcagcgatggttggtagtatagatcatttactcttcagacaattcccaaacctccattagtccaagagtttctacatcttcctccccagcaagaggcaacgtcaagtgatgaatttcccccctttactctgcctctgctccccatttgctagtttgaggaagtgacatagaggagaagccagctgtaggggcaagagggaaatgcaagtcacctgcaggaatccagctagatttggagaagggaatgaaactaacattgaatgactaccatggcacgctaaatagtatcttgggtgccaaattcatgtatccacttagctgcattggtccagggcatgtcagtctggatacagccttacctccaggtagcacttaactggtccattcacctagactgcaagtaagaagacaaaatgactgagaccgtgtgcccacctgaacttattgtctttacttggcctgagctaaaagcttgggtgcaggacctgtgtaactagaaagttgcctacttcagaacctccagggcgtgagtgcaaggtcaaacatgactggcttccaggccgaccatcaatgtaggaggagagctgatgtggagggtgacatgggggctgcccatgttaaacctgagtccagtgctctggcattgggcagtcacggttaaagccaagtcatgtgtgtctcagctgtttggaggtgatgattttgcatcttccaagcctcttcaggtgtgaatctgtggtcaggaaaacacaagtcctaatggaacccttaggggggaaggaaatgaagattccctataacctctgggggtggggagtaggaataaggggccttgggcctccataaatctgcaatctgcaccctcctcctagagacagggagatcgtgttctgctttttacatgaggagcagaactgggccatacacatgttcaagaactaggggagctacctggtagcaagtgagtgcagacccacctcaccttgggggaatctcaaactcataggcctcagatacacgatcacctgtcatatcaggtgagcactggcctgcttggggagagacctgggcccctccaggtgtaggaacagcaacactcctggctgacaactaagccaatatggccctaggtcattcttgcttccaatatgcttgccactccttaaatgtcctaatgatgagaaactctctttctgaccaattgctatgtttacataacacgcatgtactcatgcatcccttgccagagcccatatatgtatgcatatataaacatagcactttttactacatagctcagcacattgcaaggtttgcatttaagtt

SEQ ID NO: 179005 - DNA, 1945 bp, Homo sapiens
  Payload ID: 15282
  Gene Symbol: SCARA5
  Gene Name: scavenger receptor class A, member 5
  Uniprot ID: Q6ZMJ2
  ENST ID: ENST00000524352
  CDS Start-End: 384-1586
tagaggagctgccggtgcctcctcagaacatctcctgatcgctacccaggaccaggcaccaaggacagggagtcccaggcgcacaccccccattctgggtcccccaggcccagacccccactctgccacaggttgcatcttgacctggtcctcctgcagaagtggcccctgtggtcctgctctgagactcgtccctgggcgcccctgcagcccctttctatgactccatctggatttggctggctgtggggacgcggtccgaggggcggcctggctctcagcgtggtggcagccagctctctggccaccatggcaaatgctgagatctgaggggacaaggctctacagcctcagccaggggcactcagctgttgcagggtgtgatggagaacaaagctatgtacctacacaccgtcagcgactgtgacaccagctccatctgtgaggattcctttgatggcaggagcctgtccaagctgaacctgtgtgaggatggtccatgtcacaaacggcgggcaagcatctgctgtacccagctggggtccctgtcggccctgaagcatgctgtcctggggctctacctgctggtcttcctgattcttgtgggcatcttcatcttagcagtgtccaggccgcgcagctcccctgacgacctgaaggccctgactcgcaatgtgaaccggctgaatgagagcttccgggacttgcagctgcggctgctgcaggctccgctgcaagcggacctgacggagcaggtgtggaaggtgcaggacgcgctgcagaaccagtcagactcgttgctggcgctggcgggcgcagtgcagcggctggagggcgcgctgtgggggctgcaggcgcaggcggtgcagaccgagcaggcggtggccctgctgcgggaccgcacgggccagcagagcgacacggcgcagctggagctctaccagctgcaggtggagagcaacagtagccagctgctgctgaggcgccacgcgggcctgctggacgggctggcgcgcagggtgggcatcctgggcgaggagctggccgacgtgggcggcgtgctgcgcggcctcaaccacagcctgtcctacgacgtggccctccaccgcacgcggctgcaggacctgcgggtgctggtgagcaacgccagcgaggacacgcgccgcctgcgcctggcgcacgtaggcatggagctgcagctgaagcaggagctggccatgctcaacgcggtcaccgaggacctgcgcctcaaggactgggagcactccatcgcactgcggaacatctccctcgcgaaagggccaccgggacccaaaggtgatcagggggatgaaggaaaggaaggcaggcctggcatccctggattgcctggacttcgaggtctgcccggggagagaggtaccccaggattgcccgggcccaagggcgatgatgggaagctgggggccacaggaccaatgggcatgcgtgggttcaaaggtgaccgaggcccaaaaggagagaaaggagagaaaggagacagagctggggatgccagtaaggacattctgctggggccgtgggatatggtgttggcacagggctagctgtcccccaagcagccccataagtttggaggttcagaggctggagccatggctggggctcaagtgtcaaaggaggctccctaccttttttagggctctgctggtctagcaagagatgctgatagaccccaggggcactggccacatttctagaggtgtcataaacctggcggttgtgtgcatggatctggaggcttcccccggtcactcgctagcccagctggtataatctctgtgcctcagtgttctcatctataaaatagggataacaggagtctttaccttataaggtcattgtgaaaattgaatgagttaatctgtgtaaagtgcttatgatcatgctggacacctggtgagga

SEQ ID NO: 179006 - DNA, 1074 bp, Homo sapiens
  Payload ID: 15282
  Gene Symbol: SCARA5
  Gene Name: scavenger receptor class A, member 5
  Uniprot ID: Q6ZMJ2
  ENST ID: ENST00000518030
  CDS Start-End: 1-1074
atggagaacaaagctatgtacctacacaccgtcagcgactgtgacaccagctccatctgtgaggattcctttgatggcaggagcctgtccaagctgaacctgtgtgaggatgtgtccaggccgcgcagctcccctgacgacctgaaggccctgactcgcaatgtgaaccggctgaatgagagcttccgggacttgcagctgcggctgctgcaggctccgctgcaagcggacctgacggagcaggtgtggaaggtgcaggacgcgctgcagaaccagtcagactcgttgctggcgctggcgggcgcagtgcagcggctggagggcgcgctgtgggggctgcaggcgcaggcggtgcagaccgagcaggcggtggccctgctgcgggaccgcacgggccagcagagcgacacggcgcagctggagctctaccagctgcaggtggagagcaacagtagccagctgctgctgaggcgccacgcgggcctgctggacgggctggcgcgcagggtgggcatcctgggcgaggagctggccgacgtgggcggcgtgctgcgcggcctcaaccacagcctgtcctacgacgtggccctccaccgcacgcggctgcaggacctgcgggtgctggtgagcaacgccagcgaggacacgcgccgcctgcgcctggcgcacgtaggcatggagctgcagctgaagcaggagctggccatgctcaacgcggtcaccgaggacctgcgcctcaaggactgggagcactccatcgcactgcggaacatctccctcgcgaaagggccaccgggacccaaaggtgatcagggggatgaaggaaaggaaggcaggcctggcatccctggattgcctggacttcgaggtctgcccggggagagaggtaccccaggattgcccgggcccaagggcgatgatgggaagctgggggccacaggaccaatgggcatgcgtgggttcaaaggtgaccgaggcccaaaaggagagaaaggagagaaaggagacagagctggggatgccagtaaggacattctgctggggccgtgggatatggtgttggcacagggctag

SEQ ID NO: 179007 - DNA, 2611 bp, Homo sapiens
  Payload ID: 15283
  Gene Symbol: SCARB1
  Gene Name: scavenger receptor class B, member 1
  Uniprot ID: Q8WTV0
  ENST ID: ENST00000261693
  CDS Start-End: 128-1657
cccggatccaccgtgcctctgcggcctgcgtgcccggagtccccgcctgtgtcgtctctgtcgccgtccccgtctcctgccaggcgcggagccctgcgagccgcgggtgggccccaggcgcgcagacatgggctgctccgccaaagcgcgctgggctgccggggcgctgggcgtcgcggggctactgtgcgctgtgctgggcgctgtcatgatcgtgatggtgccgtcgctcatcaagcagcaggtccttaagaacgtgcgcatcgaccccagtagcctgtccttcaacatgtggaaggagatccctatccccttctatctctccgtctacttctttgacgtcatgaaccccagcgagatcctgaagggcgagaagccgcaggtgcgggagcgcgggccctacgtgtacagggagttcaggcacaaaagcaacatcaccttcaacaacaacgacaccgtgtccttcctcgagtaccgcaccttccagttccagccctccaagtcccacggctcggagagcgactacatcgtcatgcccaacatcctggtcttgggtgcggcggtgatgatggagaataagcccatgaccctgaagctcatcatgaccttggcattcaccaccctcggcgaacgtgccttcatgaaccgcactgtgggtgagatcatgtggggctacaaggacccccttgtgaatctcatcaacaagtactttccaggcatgttccccttcaaggacaagttcggattatttgctgagctcaacaactccgactctgggctcttcacggtgttcacgggggtccagaacatcagcaggatccacctcgtggacaagtggaacgggctgagcaaggttgacttctggcattccgatcagtgcaacatgatcaatggaacttctgggcaaatgtggccgcccttcatgactcctgagtcctcgctggagttctacagcccggaggcctgccgatccatgaagctaatgtacaaggagtcaggggtgtttgaaggcatccccacctatcgcttcgtggctcccaaaaccctgtttgccaacgggtccatctacccacccaacgaaggcttctgcccgtgcctggagtctggaattcagaacgtcagcacctgcaggttcagtgcccccttgtttctctcccatcctcacttcctcaacgctgacccggttctggcagaagcggtgactggcctgcaccctaaccaggaggcacactccttgttcctggacatccacccggtcacgggaatccccatgaactgctctgtgaaactgcagctgagcctctacatgaaatctgtcgcaggcattggacaaactgggaagattgagcctgtggtcctgccgctgctctggtttgcagagagcggggccatggagggggagactcttcacacattctacactcagctggtgttgatgcccaaggtgatgcactatgcccagtacgtcctcctggcgctgggctgcgtcctgctgctggtccctgtcatctgccaaatccggagccaagagaaatgctatttattttggagtagtagtaaaaagggctcaaaggataaggaggccattcaggcctattctgaatccctgatgacatcagctcccaagggctctgtgctgcaggaagcaaaactgtagggtcctgaggacaccgtgagccagccaggcctggccgctgggcctgaccggccccccagcccctacaccccgcttctcccggactctcccagcggacagccccccagccccacagcctgagcctcccagctgccatgtgcctgttgcacacctgcacacacgccctggcacacatacacacatgcgtgcaggcttgtgcagacactcagggatggagctgctgctgaagggacttgtagggagaggctcgtcaacaagcactgttctggaaccttctctccacgtggcccacaggcctgaccacaggggctgtgggtcctgcgtccccttcctcgggtgagcctggcctgtcccgttcagccgttgggcccaggcttcctcccctccaaggtgaaacactgcagtcccggtgtggtggctccccatgcaggacgggccaggctgggagtgccgccttcctgtgccaaattcagtggggactcagtgcccaggccctggccacgagctttggccttggtctacctgccaggccaggcaaagcgcctttacacaggcctcggaaaacaatggagtgagcacaagatgccctgtgcagctgcccgagggtctccgcccaccccggccggactttgatccccccgaagtcttcacaggcactgcatcgggttgtctggcgcccttttcctccagcctaaactgacatcatcctatggactgagccggccactctctggccgaagtggccgcaggctgtgcccccgagctgcccccaccccctcacagggtccctcagattataggtgcccaggctgaggtgaagaggcctgggggccctgccttccgggcgctcctggaccctggggcaaacctgtgacccttttctactggaatagaaatgagttttatcatctttgaaaaataattcactcttgaagtaataaacgtttaaaaaaa

SEQ ID NO: 179008 - DNA, 3329 bp, Homo sapiens
  Payload ID: 15283
  Gene Symbol: SCARB1
  Gene Name: scavenger receptor class B, member 1
  Uniprot ID: Q8WTV0
  ENST ID: ENST00000339570
  CDS Start-End: 198-1718
tccggcggcgccggcgatggggcataaaaccactggccacctgccgggctgctcctgcgtgcgctgccgtcccggatccaccgtgcctctgcggcctgcgtgcccggagtccccgcctgtgtcgtctctgtcgccgtccccgtctcctgccaggcgcggagccctgcgagccgcgggtgggccccaggcgcgcagacatgggctgctccgccaaagcgcgctgggctgccggggcgctgggcgtcgcggggctactgtgcgctgtgctgggcgctgtcatgatcgtgatggtgccgtcgctcatcaagcagcaggtccttaagaacgtgcgcatcgaccccagtagcctgtccttcaacatgtggaaggagatccctatccccttctatctctccgtctacttctttgacgtcatgaaccccagcgagatcctgaagggcgagaagccgcaggtgcgggagcgcgggccctacgtgtacagggagttcaggcacaaaagcaacatcaccttcaacaacaacgacaccgtgtccttcctcgagtaccgcaccttccagttccagccctccaagtcccacggctcggagagcgactacatcgtcatgcccaacatcctggtcttgggtgcggcggtgatgatggagaataagcccatgaccctgaagctcatcatgaccttggcattcaccaccctcggcgaacgtgccttcatgaaccgcactgtgggtgagatcatgtggggctacaaggacccccttgtgaatctcatcaacaagtactttccaggcatgttccccttcaaggacaagttcggattatttgctgagctcaacaactccgactctgggctcttcacggtgttcacgggggtccagaacatcagcaggatccacctcgtggacaagtggaacgggctgagcaaggttgacttctggcattccgatcagtgcaacatgatcaatggaacttctgggcaaatgtggccgcccttcatgactcctgagtcctcgctggagttctacagcccggaggcctgccgatccatgaagctaatgtacaaggagtcaggggtgtttgaaggcatccccacctatcgcttcgtggctcccaaaaccctgtttgccaacgggtccatctacccacccaacgaaggcttctgcccgtgcctggagtctggaattcagaacgtcagcacctgcaggttcagtgcccccttgtttctctcccatcctcacttcctcaacgctgacccggttctggcagaagcggtgactggcctgcaccctaaccaggaggcacactccttgttcctggacatccacccggtcacgggaatccccatgaactgctctgtgaaactgcagctgagcctctacatgaaatctgtcgcaggcattggacaaactgggaagattgagcctgtggtcctgccgctgctctggtttgcagagagcggggccatggagggggagactcttcacacattctacactcagctggtgttgatgcccaaggtgatgcactatgcccagtacgtcctcctggcgctgggctgcgtcctgctgctggtccctgtcatctgccaaatccggagccaaggtcctgaggacaccgtgagccagccaggcctggccgctgggcctgaccggccccccagcccctacaccccgcttctcccggactctcccagcggacagccccccagccccacagcctgagcctcccagctgccatgtgcctgttgcacacctgcacacacgccctggcacacatacacacatgcgtgcaggcttgtgcagacactcagggatggagctgctgctgaagggacttgtagggagaggctcgtcaacaagcactgttctggaaccttctctccacgtggcccacaggcctgaccacaggggctgtgggtcctgcgtccccttcctcgggtgagcctggcctgtcccgttcagccgttgggcccaggcttcctcccctccaaggtgaaacactgcagtcccggtgtggtggctccccatgcaggacgggccaggctgggagtgccgccttcctgtgccaaattcagtggggactcagtgcccaggccctggccacgagctttggccttggtctacctgccaggccaggcaaagcgcctttacacaggcctcggaaaacaatggagtgagcacaagatgccctgtgcagctgcccgagggtctccgcccaccccggccggactttgatccccccgaagtcttcacaggcactgcatcgggttgtctggcgcccttttcctccagcctaaactgacatcatcctatggactgagccggccactctctggccgaagtggccgcaggctgtgcccccgagctgcccccaccccctcacagggtccctcagattataggtgcccaggctgaggtgaagaggcctgggggccctgccttccgggcgctcctggaccctggggcaaacctgtgacccttttctactggaatagaaatgagttttatcatctttgaaaaataattcactcttgaagtaataaacgtttaaaaaaatgggatgcctgcctctgtgacagccttgtttgctgaggtcgtgggggtgggggcctctgggaagttccgggctcctcttctcttggtcaatagctcctttctggtggctgccaagagcgtctctcccagggccgggctgctggcttaccttcctgttgttttcaaatttcaaccttgtgcaatgttgagtttcatagaaatactgcatgagtacgcccttgtttagaagcagcagggtctgagtcccatcccacagcccccagtgcagacgcttttgccacttttgcatggggccccctggatgtgtttctgtgcatttatctacaaatcctggtgcccataggacatgccccgtgttgttctaggcctttgctttctgctcgttacataaatggtgaagaagagaagcgggtaagagaacagattggagccatctaaaagttctcatcttaagtgtagatcattgcaaaggatggaattttctccgattgtcatcatcgttgatgtttgaatatgagaccatttcatcagtatttaagtgtgcccgctgggatctaactaggagaggagagggtattcactgccgaacatttcaaagaatatacgaacaagctcttttatggtcagaaatgttagcccttttccccttaaacttgtatttcctttcttcttccctcctaaaattttatctaaatgatatttatatttgatgcttttaagccttttattaatcactcctatacttgcctgcaacataaatatataagttgaagcaaa

SEQ ID NO: 179009 - DNA, 2731 bp, Homo sapiens
  Payload ID: 15283
  Gene Symbol: SCARB1
  Gene Name: scavenger receptor class B, member 1
  Uniprot ID: Q8WTV0
  ENST ID: ENST00000415380
  CDS Start-End: 127-1785
ccggatccaccgtgcctctgcggcctgcgtgcccggagtccccgcctgtgtcgtctctgtcgccgtccccgtctcctgccaggcgcggagccctgcgagccgcgggtgggccccaggcgcgcagacatgggctgctccgccaaagcgcgctgggctgccggggcgctgggcgtcgcggggctactgtgcgctgtgctgggcgctgtcatgatcgtgatggtgccgtcgctcatcaagcagcaggtccttaagaacgtgcgcatcgaccccagtagcctgtccttcaacatgtggaaggagatccctatccccttctatctctccgtctacttctttgacgtcatgaaccccagcgagatcctgaagggcgagaagccgcaggtgcgggagcgcgggccctacgtgtacagggagttcaggcacaaaagcaacatcaccttcaacaacaacgacaccgtgtccttcctcgagtaccgcaccttccagttccagccctccaagtcccacggctcggagagcgactacatcgtcatgcccaacatcctggtcttgggtgcggcggtgatgatggagaataagcccatgaccctgaagctcatcatgaccttggcattcaccaccctcggcgaacgtgccttcatgaaccgcactgtgggtgagatcatgtggggctacaaggacccccttgtgaatctcatcaacaagtactttccaggcatgttccccttcaaggacaagttcggattatttgctgagctcaacaactccgactctgggctcttcacggtgttcacgggggtccagaacatcagcaggatccacctcgtggacaagtggaacgggctgagcaaggttgacttctggcattccgatcagtgcaacatgatcaatggaacttctgggcaaatgtggccgcccttcatgactcctgagtcctcgctggagttctacagcccggaggcctgccgatccatgaagctaatgtacaaggagtcaggggtgtttgaaggcatccccacctatcgcttcgtggctcccaaaaccctgtttgccaacgggtccatctacccacccaacgaaggcttctgcccgtgcctggagtctggaattcagaacgtcagcacctgcaggttcagtgcccccttgtttctctcccatcctcacttcctcaacgctgacccggttctggcagaagcggtgactggcctgcaccctaaccaggaggcacactccttgttcctggacatccacccggtcacgggaatccccatgaactgctctgtgaaactgcagctgagcctctacatgaaatctgtcgcaggcattggacaaactgggaagattgagcctgtggtcctgccgctgctctggtttgcagagagcggggccatggagggggagactcttcacacattctacactcagctggtgttgatgcccaaggtgatgcactatgcccagtacgtcctcctggcgctgggctgcgtcctgctgctggtccctgtcatctgccaaatccggagccaagtaggtgctggccagagggcagcccgggctgacagccattcgcttgcctgctgggggaaaggggcctcagatcggaccctctggccaaccgcagcctggagcccacctccagcagcagtcctgcgtctctgccggagtgggagcggtcactgctgggggctgcgcagcacgcttgcgtcttttgcatgccgcgttgccactactctgcctgttctggaaggcctgggaccctcccttggagggggcacagggtcctgaggacaccgtgagccagccaggcctggccgctgggcctgaccggccccccagcccctacaccccgcttctcccggactctcccagcggacagccccccagccccacagcctgagcctcccagctgccatgtgcctgttgcacacctgcacacacgccctggcacacatacacacatgcgtgcaggcttgtgcagacactcagggatggagctgctgctgaagggacttgtagggagaggctcgtcaacaagcactgttctggaaccttctctccacgtggcccacaggcctgaccacaggggctgtgggtcctgcgtccccttcctcgggtgagcctggcctgtcccgttcagccgttgggcccaggcttcctcccctccaaggtgaaacactgcagtcccggtgtggtggctccccatgcaggacgggccaggctgggagtgccgccttcctgtgccaaattcagtggggactcagtgcccaggccctggccacgagctttggccttggtctacctgccaggccaggcaaagcgcctttacacaggcctcggaaaacaatggagtgagcacaagatgccctgtgcagctgcccgagggtctccgcccaccccggccggactttgatccccccgaagtcttcacaggcactgcatcgggttgtctggcgcccttttcctccagcctaaactgacatcatcctatggactgagccggccactctctggccgaagtggccgcaggctgtgcccccgagctgcccccaccccctcacagggtccctcagattataggtgcccaggctgaggtgaagaggcctgggggccctgccttccgggcgctcctggaccctggggcaaacctgtgacccttttctactggaatagaaatgagttttatcatctttgaaaaataattcactcttgaagtaataaacgtttaaaaaaa

SEQ ID NO: 179010 - DNA, 1597 bp, Homo sapiens
  Payload ID: 15283
  Gene Symbol: SCARB1
  Gene Name: scavenger receptor class B, member 1
  ENST ID: ENST00000546215
  CDS Start-End: 64-1509
cgtccccgtctcctgccaggcgcggagccctgcgagccgcgggtgggccccaggcgcgcagacatgggctgctccgccaaagcgcgctgggctgccggggcgctgggcgtcgcggggctactgtgcgctgtgctgggcgctgtcatgatcgtgatggtgccgtcgctcatcaagcagcaggtccttaagaacgtgcgcatcgaccccagtagcctgtccttcaacatgtggaaggagatccctatccccttctatctctccgtctacttctttgacgtcatgaaccccagcgagatcctgaagggcgagaagccgcaggtgcgggagcgcgggccctacgtgtacagggagttcaggcacaaaagcaacatcaccttcaacaacaacgacaccgtgtccttcctcgagtaccgcaccttccagttccagccctccaagtcccacggctcggagagcgactacatcgtcatgcccaacatcctggtcttgggtgcggcggtgatgatggagaataagcccatgaccctgaagctcatcatgaccttggcattcaccaccctcggcgaacgtgccttcatgaaccgcactgtgggtgagatcatgtggggctacaaggacccccttgtgaatctcatcaacaagtactttccaggcatgttccccttcaaggacaagttcggattatttgctgagctcaacaactccgactctgggctcttcacggtgttcacgggggtccagaacatcagcaggatccacctcgtggacaagtggaacgggctgagcaaggttgacttctggcattccgatcagtgcaacatgatcaatggaacttctgggcaaatgtggccgcccttcatgactcctgagtcctcgctggagttctacagcccggaggcctgccgatccatgaagctaatgtacaaggagtcaggggtgtttgaaggcatccccacctatcgcttcgtggctcccaaaaccctgtttgccaacgggtccatctacccacccaacgaaggcttctgcccgtgcctggagtctggaattcagaacgtcagcacctgcaggttcagtgcccccttgtttctctcccatcctcacttcctcaacgctgacccggttctggcagaagcggtgactggcctgcaccctaaccaggaggcacactccttgttcctggacatccacccggtcacgggaatccccatgaactgctctgtgaaactgcagctgagcctctacatgaaatctgtcgcaggcattggacaaactgggaagattgagcctgtggtcctgccgctgctctggtttgcagagagcggggccatggagggggagactcttcacacattctacactcagctggtgttgatgcccaaggagaaatgctatttattttggagtagtagtaaaaagggctcaaaggataaggaggccattcaggcctattctgaatccctgatgacatcagctcccaagggctctgtgctgcaggaagcaaaactgtagggtcctgaggacaccgtgagccagccaggcctggccgctgggcctgaccggccccccagcccctacaccccgcttctcccggactctc

SEQ ID NO: 179011 - DNA, 581 bp, Homo sapiens
  Payload ID: 15283
  Gene Symbol: SCARB1
  Gene Name: scavenger receptor class B, member 1
  ENST ID: ENST00000545493
  CDS Start-End: 144-581
ctgcgtgcgctgccgtcccggatccaccgtgcctctgcggcctgcgtgcccggagtccccgcctgtgtcgtctctgtcgccgtccccgtctcctgccaggcgcggagccctgcgagccgcgggtgggccccaggcgcgcagacatgggctgctccgccaaagcgcgctgggctgccggggcgctgggcgtcgcggggctactgtgcgctgtgctgggcgctgtcatgatcgtgatggtgccgtcgctcatcaagcagcaggtccttaagaacgtgcgcatcgaccccagtagcctgtccttcaacatgtggaaggagatccctatccccttctatctctccgtctacttctttgacgtcatgaaccccagcgagatcctgaagggcgagaagccgcaggtgcgggagcgcgggccctacgtgtacagggagttcaggcacaaaagcaacatcaccttcaacaacaacgacaccgtgtccttcctcgagtaccgcaccttccagttccagccctccaagtcccacggctcggagagcgactacatcgtcatgcccaacatcctggtcttggtgaggctgccc

SEQ ID NO: 179012 - DNA, 1812 bp, Homo sapiens
  Payload ID: 15283
  Gene Symbol: SCARB1
  Gene Name: scavenger receptor class B, member 1
  ENST ID: ENST00000544327
  CDS Start-End: 37-1536
aacgtgcgcatcgaccccagtagcctgtccttcaacatgtggaaggagatccctatccccttctatctctccgtctacttctttgacgtcatgaaccccagcgagatcctgaagggcgagaagccgcaggtgcgggagcgcgggccctacgtgtacagggagttcaggcacaaaagcaacatcaccttcaacaacaacgacaccgtgtccttcctcgagtaccgcaccttccagttccagccctccaagtcccacggctcggagagcgactacatcgtcatgcccaacatcctggtcttgggtgcggcggtgatgatggagaataagcccatgaccctgaagctcatcatgaccttggcattcaccaccctcggcgaacgtgccttcatgaaccgcactgtgggtgagatcatgtggggctacaaggacccccttgtgaatctcatcaacaagtactttccaggcatgttccccttcaaggacaagttcggattatttgctgagctcaacaactccgactctgggctcttcacggtgttcacgggggtccagaacatcagcaggatccacctcgtggacaagtggaacgggctgagcaaggttgacttctggcattccgatcagtgcaacatgatcaatggaacttctgggcaaatgtggccgcccttcatgactcctgagtcctcgctggagttctacagcccggaggcctgccgatccatgaagctaatgtacaaggagtcaggggtgtttgaaggcatccccacctatcgcttcgtggctcccaaaaccctgtttgccaacgggtccatctacccacccaacgaaggcttctgcccgtgcctggagtctggaattcagaacgtcagcacctgcaggttcagtgcccccttgtttctctcccatcctcacttcctcaacgctgacccggttctggcagaagcggtgactggcctgcaccctaaccaggaggcacactccttgttcctggacatccacccggtcacgggaatccccatgaactgctctgtgaaactgcagctgagcctctacatgaaatctgtcgcaggcattggacaaactgggaagattgagcctgtggtcctgccgctgctctggtttgcagagagcggggccatggagggggagactcttcacacattctacactcagctggtgttgatgcccaaggtgatgcactatgcccagtacgtcctcctggcgctgggctgcgtcctgctgctggtccctgtcatctgccaaatccggagccaagtaggtgctggccagagggcagcccgggctgacagccattcgcttgcctgctgggggaaaggggcctcagatcggaccctctggccaaccgcagcctggagcccacctccagcagcagtcctgcgtctctgccggagtgggagcggtcactgctgggggctgcgcagcacgcttgcgtcttttgcatgccgcgttgccactactctgcctgttctggaaggcctgggaccctcccttggagggggcacaggtgggctttgagtaatgagacctggtacttgcatcatccattcatcaagtcagcacccggggatgccaggttctgttaggggcgaggggacgtacagcagtagaggagacagctgagatccctgctcagggggattgaggggggctggcatcccagccggggagacagatgaaaaccaagtaaatcagcagaaaagataatttcactcatgataggagctgtgaggggttagagccaaatagaaatacagcgtgagccacgtgtgaggttttcagtttaaattttct

SEQ ID NO: 179013 - DNA, 4763 bp, Homo sapiens
  Payload ID: 15284
  Gene Symbol: SCARB2
  Gene Name: scavenger receptor class B, member 2
  Uniprot ID: Q14108
  ENST ID: ENST00000264896
  CDS Start-End: 351-1787
gccggcggttgcctcgcggggttgcggcgagcccggcccgcgaacgtcacgtccctgcgcgctccctgcactctcccgagctgcgctaggcgggcgccacggctgcccggcgaaggaaaccgaaaccgagtccgggcccgtccctccgcggccccatccgcccggtgcacccggggccgcgctcgccaggccgcggagcccagagctgcgcgcacgaaccgtgcgccgggagggcgtgggcgtggcgccgaagggtcccgggtcttcgacgcctctgcggcggctcctccctccttgcagttggatccctggcgggtgcggcccggcccggcccgtgagcggcgcacagaatgggccgatgctgcttctacacggcggggacgttgtccctgctcctgctggtgaccagcgtcacgctgctggtggcccgggtcttccagaaggctgtagaccagagtatcgagaagaaaattgtgttaaggaatggtactgaggcatttgactcctgggagaagccccctctgcctgtgtatactcagttctatttcttcaatgtcaccaatccagaggagatcctcagaggggagacccctcgggtggaagaagtggggccatacacctacagggaactcagaaacaaagcaaatattcaatttggagataatggaacaacaatatctgctgttagcaacaaggcctatgtttttgaacgagaccaatctgttggagaccctaaaattgacttaattagaacattaaatattcctgtattgactgtcatagagtggtcccaggtgcacttcctcagggagatcatcgaggccatgttgaaagcctatcagcagaagctctttgtgactcacacagttgacgaattgctctggggctacaaagatgaaatcttgtcccttatccatgttttcaggcccgatatctctccctattttggcctattctatgagaaaaatgggactaatgatggagactatgtttttctaactggagaagacagttaccttaactttacaaaaattgtggaatggaatgggaaaacgtcacttgactggtggataacagacaagtgcaatatgattaatggaacagatggagattcttttcacccactaataaccaaagatgaggtcctttatgtcttcccatctgacttttgcaggtcagtgtatattactttcagtgactatgagagtgtacagggactgcctgcctttcggtataaagttcctgcagaaatattagccaatacgtcagacaatgccggcttctgtatacctgagggaaactgcctgggctcaggagttctgaatgtcagcatctgcaagaatggtgcacccatcattatgtctttcccacacttttaccaagcagatgagaggtttgtttctgccatagaaggcatgcacccaaatcaggaagaccatgagacatttgtggacattaatcctttgactggaataatcctaaaagcagccaagaggttccaaatcaacatttatgtcaaaaaattagatgactttgttgaaacgggagacattagaaccatggttttcccagtgatgtacctcaatgagagtgttcacattgataaagagacggcgagtcgactgaagtctatgattaacactactttgatcatcaccaacataccctacatcatcatggcgctgggtgtgttctttggtttggtttttacctggcttgcatgcaaaggacagggatccatggatgagggaacagcggatgaaagagcacccctcattcgaacctaaacattgcctttgcttggtgaagaaactgtgtgagctgtcctgacctggacgatgacgtggggaaaccctccacctccttgcaggcttgttgcctgttgaaagaaggaaaaagacacggcgctggcaagtgataggaacattctggccagaggttaaagagcaggctgacatggctggccattaagctttataaaatcatgtgggctctgaaattgttcttttatgtgtctagcaagtatttaataaacccttgtatagtaattttgttgttgttgggtgctggtagctccagaattttgtgaccactattgtgggtaaaatgtctctgcatcacttgttaatgctactggtctaacttcattcagtatgcttcattcaccgaactttgtgctcaaaatgcgtatataccattttatgttgtattcctccatttcacttgcaaaacagaagtaaataagagttcgggacccagggtaaaatggtagcttcatccaatatatcattcaaatgcatctgatttctaaaacatattacattttatgctgatcttcagttcataattcttccaggaaaactcagtcttccaactgcaataaaatactgggtagaatcaaatgggaaaggggttgggtggggcaatacccatgagttgatagtgataagctcctaaggatttttaacttgtacttttgtgaacgaagagaatgcataaataatgttggtgaggataaagtacagatatttcatgtagaattaattgctagttatgatgcttgtggatagttaactgttttttttttagtcaaaatgatcatgctacgaaaagatgcttctgagagaatgtaatgagtaactgatttttcttcctgagtcgcccttgccaaatatgttactgtattaattaatctaatattgagtgattatttgtaaaattatgaatatgggaaatccatctatctacagcctaagttacacataagtttcagaaagtctgattagactaaagagatatttcttctgggacagccgccttcttggtaattttgaagttctttttacaagttccttcctcagtttcagttctttccagtgttttgtagctcactgtcactcactgaatagagaaacgtgtgccctatacttcctgtgacaatcattttgctgacagaatgatggatgtttaaaatattgcacaaagtactttaaagaaaggtctgttaggaccagaagcagagacaccacttttcaaaggacttcttggtttcagcataacctaagacagggaattgggagccatcatatgtcacagtgttcagaattcaagcatatttaagggcattttctttgattctcaaagttcagcattcattttgaattgagaagcctatacatttagctgacaaagtgcttatagaatttcttaacaactgaaccattcaaaaggattttttttgtttaaaactggatttcaatgtaagcaaatgaagaaaaaaatatagatttcatttccatagcttcttatccctgtattgaggtaataaattgttttactgacaatttttcctttttctacactaaaacaatatgtgatatatttcccctcttgaagaggcaattcattaaactctcaaattttctatagaatcaagatagaacctttagatactccaactcaccaaaatgtaaaaaaactaacaaaaatatttggtcttcaataatgctaaatatctacatttttagaatttatcaacatttaactagataattgggcatgtcttaattatgcatgtacttatccatactaataaaattgacaatgctagtgcatacttattggtttagtcctattatcaggatataatcatctgtgaggaggatattttaaatactgtaaatgataacagttaatgatatacacatttagactgagttgcacactggcagggagaccaaaaacattacttccatacttgtgtcatgattcttttttttttgagagagtctcactctgtcgccaggctggagtacagtggcatgatctcggctcactgcaacctctgcctcccgggttcaagcaattctcctgcctcagccacccaagtagctgggactacaggtgcgtgccaccacgcccagctaaattttgtatttttagtggagacggggtttcaccatgttggccaggatggtctcaatctcctgaccctgcgatctgcccacctcagcctcccaaagtgctgggattacaggcgtaagccaccgggcctggcctgttttatgattcttaatagttacttggtttaaatcacatttgatactatccttctgaaaagtctgagacagatctacaaactacagtcaaaattatagattaagaggaatgaatgcacctatttggctttaagttgaagatgaattatttctcatgctcattttcttgcggcagttatcttagaaagacccccaaaggctttgtgattgtaagcactgtcatgatcacagaatgcaagcttctggtaccatgatcctcaacttagagaggaagaaaccaagacagagagcttaactcacttctctcagggaaaattaggagttgagcacaggacaggaaatgggctttgccacttttagctccaggcttttctaaccagacttgatttcctcatgttctagaaagatcactaatggtcaagtggaacaagcactacacgactaacccctattggggtttttaacttaagggaggctaatttttaatttaaactgctcgagatatgagttctgcaaaaggtggtccgcatccttggccctctggacattatcactaaattgcttgtgcctgttaacaagaatactgaccagaatgctcttcatgtagcttatacagttggttcacttcatgcggttcttgacatgtttatttctacccttaatgcaatgaaatgtttcattaataaaaaaccactttatataaaa

SEQ ID NO: 179014 - DNA, 1495 bp, Homo sapiens
  Payload ID: 15284
  Gene Symbol: SCARB2
  Gene Name: scavenger receptor class B, member 2
  Uniprot ID: Q14108
  ENST ID: ENST00000452464
  CDS Start-End: 61-1068
ctccttgcagttggatccctggcgggtgcggcccggcccggcccgtgagcggcgcacagaatgggccgatgctgcttctacacggcggggacgttgtccctgctcctgctggtgaccagcgtcacgctgctggtggcccgggtcttccagaaggctgtagaccagagtatcgagaagaaaattgtgttaaggaatggtactgaggcatttgactcctgggagaagccccctctgcctgtgtatactcagttctatttcttcaatgtcaccaatccagaggagatcctcagaggggagacccctcgggtggaagaagtggggccatacacctacaggtcacttgactggtggataacagacaagtgcaatatgattaatggaacagatggagattcttttcacccactaataaccaaagatgaggtcctttatgtcttcccatctgacttttgcaggtcagtgtatattactttcagtgactatgagagtgtacagggactgcctgcctttcggtataaagttcctgcagaaatattagccaatacgtcagacaatgccggcttctgtatacctgagggaaactgcctgggctcaggagttctgaatgtcagcatctgcaagaatggtgcacccatcattatgtctttcccacacttttaccaagcagatgagaggtttgtttctgccatagaaggcatgcacccaaatcaggaagaccatgagacatttgtggacattaatcctttgactggaataatcctaaaagcagccaagaggttccaaatcaacatttatgtcaaaaaattagatgactttgttgaaacgggagacattagaaccatggttttcccagtgatgtacctcaatgagagtgttcacattgataaagagacggcgagtcgactgaagtctatgattaacactactttgatcatcaccaacataccctacatcatcatggcgctgggtgtgttctttggtttggtttttacctggcttgcatgcaaaggacagggatccatggatgagggaacagcggatgaaagagcacccctcattcgaacctaaacattgcctttgcttggtgaagaaactgtgtgagctgtcctgacctggacgatgacgtggggaaaccctccacctccttgcaggcttgttgcctgttgaaagaaggaaaaagacacggcgctggcaagtgataggaacattctggccagaggttaaagagcaggctgacatggctggccattaagctttataaaatcatgtgggctctgaaattgttcttttatgtgtctagcaagtatttaataaacccttgtatagtaattttgttgttgttgggtgctggtagctccagaattttgtgaccactattgtgggtaaaatgtctctgcatcacttgttaatgctactggtctaacttcattcagtatgcttcattcaccgaactttgtgctcaaaatgcgtatataccattttatgttgtattcct

SEQ ID NO: 179015 - DNA, 544 bp, Homo sapiens
  Payload ID: 15284
  Gene Symbol: SCARB2
  Gene Name: scavenger receptor class B, member 2
  ENST ID: ENST00000509994
  CDS Start-End: 58-378
cttgcagttggatccctggcgggtgcggcccggcccggcccgtgagcggcgcacagaatgggccgatgctgcttctacacggcggggacgttgtccctgctcctgctggtgaccagcgtcacgctgctggtggcccgggtcttccagaaggctgtagaccagagtatcgagaagaaaattgtgttaaggaatggtactgaggcatttgactcctgggagaagccccctctgcctgtgtatactcagttctatttcttcaatgtcaccaatccagaggagatcctcagaggggagacccctcgggtggaagaagtggggccatacacctacagagacaaagtcttgctctgttgctcatgctggaatgcagtggcatgatcatagctcactgtaacgtcaaactcctgggctcaagccatcctcccaccttagcctcccaagtagctgacactacagggaactcagaaacaaagcaaatattcaatttggagataatggaacaacaatatctgctgttagcaacaaggcctatgtttttgaacga

SEQ ID NO: 179016 - DNA, 3443 bp, Homo sapiens
  Payload ID: 15285
  Gene Symbol: SCARF1
  Gene Name: scavenger receptor class F, member 1
  Uniprot ID: Q14162
  ENST ID: ENST00000263071
  CDS Start-End: 51-2543
ggagctgtgggggccagacgaacccgagcgctcccaccgagctgcctgccatggggctggggctgctgctcccgctgctgctgctctggactcgggggactcaggggtccgagctggaccccaaagggcagcacgtctgtgtggccagcagcccctctgctgagctgcagtgctgcgcaggctggaggcagaaggatcaagaatgcaccatccccatctgtgaggggccggacgcctgccagaaagacgaggtgtgtgtgaagccgggcctctgtcgatgcaagcctggattctttggggcccactgcagctcccgctgcccgggccagtactggggccccgactgccgtgagagctgcccctgccacccgcacggccagtgcgagccagccacgggcgcgtgccagtgccaggccgaccgctggggagcccgctgcgagttcccgtgcgcctgcggcccccacgggcgctgcgaccccgcgaccggcgtgtgccactgcgaacccggctggtggtcgtccacgtgccgccgcccgtgccagtgcaacaccgcggcggcgcgctgcgagcaggccacgggcgcctgcgtgtgcaagccgggctggtgggggcgccgctgcagcttccgctgcaactgccacggctccccgtgcgagcaggactccggccgctgcgcctgccggccgggctggtggggtcccgaatgccagcagcagtgcgagtgtgtgcggggccgctgcagcgccgcctccggcgagtgcacctgcccgcccggcttccgcggagcgcgctgcgagctgccctgcccggcaggcagccacggggtgcagtgcgcacacagctgtggccgctgcaaacacaatgagccgtgctctccagacacaggcagctgtgagtcctgcgagccgggctggaacgggacccagtgccagcagccctgcctgcctggcacctttggcgagagctgcgaacagcagtgccctcactgccgacatggggaggcctgtgagccagatactggccactgtcagcgctgtgaccctggctggctggggcccaggtgtgaagacccctgccccactggtacctttggggaagactgtggctctacctgccccacctgtgttcaggggtcctgtgatactgtgacaggggactgtgtctgcagtgccggctactgggggcccagctgcaacgcctcctgcccagccggtttccatggaaacaactgctcagttccttgtgaatgcccagagggactctgccaccctgtctctgggtcctgccagccaggctctggcagtcgggacactgccctcatcgcgggcagccttgtgcctctgctgctgctcttcctgggccttgcctgctgtgcctgctgctgctgggccccccgatcagacctcaaggacaggccagcgagagatggagctaccgtgtccaggatgaagctgcaggtctgggggacactgaccagcttgggctccacgctgccctgccgttccctcagctcccacaagctaccctgggtgacagtctcacatcacgacccggaggtccccttcaaccacagcttcatcgagccgccctctgccggctgggccactgatgactccttctcatccgatcctgagtctggagaggcagatgaggttcctgcctactgtgtgccaccccaagaagggatggtccctgtggcccaggcagggtcgtcagaggccagcctggctgcaggtgctttcccgccccctgaggacgcctccacgccattcgccatcccgcgcacctccagcctagctcgggccaagcggccatcggtctccttcgcggaaggtaccaagtttgcaccacagagtcgccgaagctcaggggagctctccagcccgctccgaaagcccaagaggctctcccggggggcgcagtcgggtcctgagggccgggaagccgaagagtccacaggcccagaggaagcagaagcccccgagtcctttccggcggctgccagtcccggggattcagccactggccaccggcggcccccacttggtggccggacagtggctgagcacgtggaagccattgagggcagcgtccaggagagctcgggccctgtgaccacgatctacatgctggcagggaagccccgcggatccgaaggccctgtccgctctgtcttccgccattttggtagcttccagaaaggccaggcggaagccaaggtcaagagggccatccctaagcctccgcgccaggccctgaatcggaaaaagggcagccctggccttgcctctggctctgtcggccagagccccaactcagccccaaaagctgggcttcctggggccacagggcctatggcagtcagaccagaggaagcggtccgggggctgggggctggcaccgagagttcaaggagagcccaggagccagtctctggctgtggctccccagaacaggatccccagaagcaggctgaagaggaaaggcaggaggaacctgagtatgagaatgttgtacccatctccaggccaccagaaccctgatgaccttgaatttggggagtggggagagtggatggactagactgtgctgtgtgctggaaaatgatcccggggccaggacagacaaaccagagcctctgcgcctccacagggaaaaggcaaggcttccaggccagttggcccaggcccctggcagtgctcccggaggggcccaggaaggcctgggcagagaccctgtaggatggggtcaggaagggttgcctgcagggacttttgctctgctgtcctggaccctgtgtgcctcataagggctattctttctttcacgtgcaaaacatttttctgaaatagcaaacaacctacatgtttgctgataaaagattggctaaacaaatttttttttttttttttgagacagaatctccctctgtcccccaggctggagtgcagtggtgcgatctcggctcactgcaagctctgcctcccgggttcacgcccttctcctgcctcagcctcccgagtagctgggactacaggtgccctccaccacgcttggctaatttttttgtatatttaatagagacagggtttcaccatgttagccaggatggtctcgatctcctgacctcgtgatccacctgcctcggcctcccaaagtgctgggatgacaggcatgagccaccacgcctggtctatgaactttttaaaaaggatgtatgtgtataaaaacagattcaagggaaaggcactaaatggttttttcctctggaagatgagattgtaggtgatatttattttcttctgaaacttttgtatagtttgcaaattttctacagtgaacattcttttttacttttgttactagattgaatttgataaagtataataaaaagcaatgatctttgttaaaaaaataaaaagtactaacattacagacatgta

SEQ ID NO: 179017 - DNA, 2619 bp, Homo sapiens
  Payload ID: 15285
  Gene Symbol: SCARF1
  Gene Name: scavenger receptor class F, member 1
  ENST ID: ENST00000348987
  CDS Start-End: 17-2251
caccgagctgcctgccatggggctggggctgctgctcccgctgctgctgctctggactcgggggactcaggggtccgagctggaccccaaagggcagcacgtctgtgtggccagcagcccctctgctgagctgcagtgctgcgcaggctggaggcagaaggatcaagaatgcaccatccccatctgtgaggggccggacgcctgccagaaagacgaggtgtgtgtgaagccgggcctctgtcgatgcaagcctggattctttggggcccactgcagctcccgctgcccgggccagtactggggccccgactgccgtgagagctgcccctgccacccgcacggccagtgcgagccagccacgggcgcgtgccagtgccaggccgaccgctggggagcccgctgcgagttcccgtgcgcctgcggcccccacgggcgctgcgaccccgcgaccggcgtgtgccactgcgaacccggctggtggtcgtccacgtgccgccgcccgtgccagtgcaacaccgcggcggcgcgctgcgagcaggccacgggcgcctgcgtgtgcaagccgggctggtgggggcgccgctgcagcttccgctgcaactgccacggctccccgtgcgagcaggactccggccgctgcgcctgccggccgggctggtggggtcccgaatgccagcagcagtgcgagtgtgtgcggggccgctgcagcgccgcctccggcgagtgcacctgcccgcccggcttccgcggagcgcgctgcgagctgccctgcccggcaggcagccacggggtgcagtgcgcacacagctgtggccgctgcaaacacaatgagccgtgctctccagacacaggcagctgtgagtcctgcgagccgggctggaacgggacccagtgccagcagccctgcctgcctggcacctttggcgagagctgcgaacagcagtgccctcactgccgacatggggaggcctgtgagccagatactggccactgtcagccaggctctggcagtcgggacactgccctcatcgcgggcagccttgtgcctctgctgctgctcttcctgggccttgcctgctgtgcctgctgctgctgggccccccgatcagacctcaaggacaggccagcgagagatggagctaccgtgtccaggatgaagctgcaggtctgggggacactgaccagcttgggctccacgctgccctgccgttccctcagctcccacaagctaccctgggtgacagtctcacatcacgacccggaggtccccttcaaccacagcttcatcgagccgccctctgccggctgggccactgatgactccttctcatccgatcctgagtctggagaggcagatgaggttcctgcctactgtgtgccaccccaagaagggatggtccctgtggcccaggcagggtcgtcagaggccagcctggctgcaggtgctttcccgccccctgaggacgcctccacgccattcgccatcccgcgcacctccagcctagctcgggccaagcggccatcggtctccttcgcggaaggtaccaagtttgcaccacagagtcgccgaagctcaggggagctctccagcccgctccgaaagcccaagaggctctcccggggggcgcagtcgggtcctgagggccgggaagccgaagagtccacaggcccagaggaagcagaagcccccgagtcctttccggcggctgccagtcccggggattcagccactggccaccggcggcccccacttggtggccggacagtggctgagcacgtggaagccattgagggcagcgtccaggagagctcgggccctgtgaccacgatctacatgctggcagggaagccccgcggatccgaaggccctgtccgctctgtcttccgccattttggtagcttccagaaaggccaggcggaagccaaggtcaagagggccatccctaagcctccgcgccaggccctgaatcggaaaaagggcagccctggccttgcctctggctctgtcggccagagccccaactcagccccaaaagctgggcttcctggggccacagggcctatggcagtcagaccagaggaagcggtccgggggctgggggctggcaccgagagttcaaggagagcccaggagccagtctctggctgtggctccccagaacaggatccccagaagcaggctgaagaggaaaggcaggaggaacctgagtatgagaatgttgtacccatctccaggccaccagaaccctgatgaccttgaatttggggagtggggagagtggatggactagactgtgctgtgtgctggaaaatgatcccggggccaggacagacaaaccagagcctctgcgcctccacagggaaaaggcaaggcttccaggccagttggcccaggcccctggcagtgctcccggaggggcccaggaaggcctgggcagagaccctgtaggatggggtcaggaagggttgcctgcagggacttttgctctgctgtcctggaccctgtgtgcctcataagggctattctttctttcacgtgcaaaacatttttctgaaatagcaaacaacctacatgtttgctgataaaagattggctaaacaaatttttttttttttttt

SEQ ID NO: 179018 - DNA, 3342 bp, Homo sapiens
  Payload ID: 15285
  Gene Symbol: SCARF1
  Gene Name: scavenger receptor class F, member 1
  Uniprot ID: Q14162
  ENST ID: ENST00000434376
  CDS Start-End: 27-1055
cgagcgctcccaccgagctgcctgccatggggctggggctgctgctcccgctgctgctgctctggactcgggggactcaggggtccgagctggaccccaaagggcagcacgtctgtgtggccagcagcccctctgctgagctgcagtgctgcgcaggctggaggcagaaggatcaagaatgcaccatccccatctgtgaggggccggacgcctgccagaaagacgaggtgtgtgtgaagccgggcctctgtcgatgcaagcctggattctttggggcccactgcagctcccgctgcccgggccagtactggggccccgactgccgtgagagctgcccctgccacccgcacggccagtgcgagccagccacgggcgcgtgccagtgccaggccgaccgctggggagcccgctgcgagttcccgtgcgcctgcggcccccacgggcgctgcgaccccgcgaccggcgtgtgccactgcgaacccggctggtggtcgtccacgtgccgccgcccgtgccagtgcaacaccgcggcggcgcgctgcgagcaggccacgggcgcctgcgtgtgcaagccgggctggtgggggcgccgctgcagcttccgctgcaactgccacggctccccgtgcgagcaggactccggccgctgcgcctgccggccgggctggtggggtcccgaatgccagcagcagtgcgagtgtgtgcggggccgctgcagcgccgcctccggcgagtgcacctgcccgcccggcttccgcggagcgcgctgcgagctgccctgcccggcaggcagccacggggtgcagtgcgcacacagctgtggccgctgcaaacacaatgagccgtgctctccagacacaggcagctgtgagtcctgcgagccgggctggaacgggacccagtgccagcagccctgcctgcctggcacctttggcgagagctgcgaacagcagtgccctcactgccgacatggggaggcctgtgagccagatactggccactgtcagcgctgtgaccctggctggctggggcccaggggtcctgtgatactgtgacaggggactgtgtctgcagtgccggctactgggggcccagctgcaacgcctcctgcccagccggtttccatggaaacaactgctcagttccttgtgaatgcccagagggactctgccaccctgtctctgggtcctgccagccaggctctggcagtcgggacactgccctcatcgcgggcagccttgtgcctctgctgctgctcttcctgggccttgcctgctgtgcctgctgctgctgggccccccgatcagacctcaaggacaggccagcgagagatggagctaccgtgtccaggatgaagctgcaggtctgggggacactgaccagcttgggctccacgctgccctgccgttccctcagctcccacaagctaccctgggtgacagtctcacatcacgacccggaggtccccttcaaccacagcttcatcgagccgccctctgccggctgggccactgatgactccttctcatccgatcctgagtctggagaggcagatgaggttcctgcctactgtgtgccaccccaagaagggatggtccctgtggcccaggcagggtcgtcagaggccagcctggctgcaggtgctttcccgccccctgaggacgcctccacgccattcgccatcccgcgcacctccagcctagctcgggccaagcggccatcggtctccttcgcggaaggtaccaagtttgcaccacagagtcgccgaagctcaggggagctctccagcccgctccgaaagcccaagaggctctcccggggggcgcagtcgggtcctgagggccgggaagccgaagagtccacaggcccagaggaagcagaagcccccgagtcctttccggcggctgccagtcccggggattcagccactggccaccggcggcccccacttggtggccggacagtggctgagcacgtggaagccattgagggcagcgtccaggagagctcgggccctgtgaccacgatctacatgctggcagggaagccccgcggatccgaaggccctgtccgctctgtcttccgccattttggtagcttccagaaaggccaggcggaagccaaggtcaagagggccatccctaagcctccgcgccaggccctgaatcggaaaaagggcagccctggccttgcctctggctctgtcggccagagccccaactcagccccaaaagctgggcttcctggggccacagggcctatggcagtcagaccagaggaagcggtccgggggctgggggctggcaccgagagttcaaggagagcccaggagccagtctctggctgtggctccccagaacaggatccccagaagcaggctgaagaggaaaggcaggaggaacctgagtatgagaatgttgtacccatctccaggccaccagaaccctgatgaccttgaatttggggagtggggagagtggatggactagactgtgctgtgtgctggaaaatgatcccggggccaggacagacaaaccagagcctctgcgcctccacagggaaaaggcaaggcttccaggccagttggcccaggcccctggcagtgctcccggaggggcccaggaaggcctgggcagagaccctgtaggatggggtcaggaagggttgcctgcagggacttttgctctgctgtcctggaccctgtgtgcctcataagggctattctttctttcacgtgcaaaacatttttctgaaatagcaaacaacctacatgtttgctgataaaagattggctaaacaaatttttttttttttttttgagacagaatctccctctgtcccccaggctggagtgcagtggtgcgatctcggctcactgcaagctctgcctcccgggttcacgcccttctcctgcctcagcctcccgagtagctgggactacaggtgccctccaccacgcttggctaatttttttgtatatttaatagagacagggtttcaccatgttagccaggatggtctcgatctcctgacctcgtgatccacctgcctcggcctcccaaagtgctgggatgacaggcatgagccaccacgcctggtctatgaactttttaaaaaggatgtatgtgtataaaaacagattcaagggaaaggcactaaatggttttttcctctggaagatgagattgtaggtgatatttattttcttctgaaacttttgtatagtttgcaaattttctacagtgaacattcttttttacttttgttactagattgaatttgataaagtataataaaaagcaatgatctttgttaaaaaaataaaaagtactaacattacag

SEQ ID NO: 179019 - DNA, 2871 bp, Homo sapiens
  Payload ID: 15285
  Gene Symbol: SCARF1
  Gene Name: scavenger receptor class F, member 1
  Uniprot ID: Q14162
  ENST ID: ENST00000571272
  CDS Start-End: 48-1757
gctgtgggggccagacgaacccgagcgctcccaccgagctgcctgccatggggctggggctgctgctcccgctgctgctgctctggactcgggggactcaggggtccgagctggaccccaaagggcagcacgtctgtgtggccagcagcccctctgctgagctgcagtgctgcgcaggctggaggcagaaggatcaagaatgcaccatccccatctgtgaggggccggacgcctgccagaaagacgaggtgtgtgtgaagccgggcctctgtcgatgcaagcctggattctttggggcccactgcagctcccgctgcccgggccagtactggggccccgactgccgtgagagctgcccctgccacccgcacggccagtgcgagccagccacgggcgcgtgccagtgccaggccgaccgctggggagcccgctgcgagttcccgtgcgcctgcggcccccacgggcgctgcgaccccgcgaccggcgtgtgccactgcgaacccggctggtggtcgtccacgtgccgccgcccgtgccagtgcaacaccgcggcggcgcgctgcgagcaggccacgggcgcctgcgtgtgcaagccgggctggtgggggcgccgctgcagcttccgctgcaactgccacggctccccgtgcgagcaggactccggccgctgcgcctgccggccgggctggtggggtcccgaatgccagcagcagtgcgagtgtgtgcggggccgctgcagcgccgcctccggcgagtgcacctgcccgcccggcttccgcggagcgcgctgcgagctgccctgcccggcaggcagccacggggtgcagtgcgcacacagctgtggccgctgcaaacacaatgagccgtgctctccagacacaggcagctgtgagtcctgcgagccgggctggaacgggacccagtgccagcagccctgcctgcctggcacctttggcgagagctgcgaacagcagtgccctcactgccgacatggggaggcctgtgagccagatactggccactgtcagcgctgtgaccctggctggctggggcccaggtgtgaagacccctgccccactggtacctttggggaagactgtggctctacctgccccacctgtgttcaggggtcctgtgatactgtgacaggggactgtgtctgcagtgccggctactgggggcccagctgcaacgcctcctgcccagccggtttccatggaaacaactgctcagttccttgtgaatgcccagagggactctgccaccctgtctctgggtcctgccagccaggctctggcagtcgggacactgccctcatcgcgggcagccttgtgcctctgctgctgctcttcctgggccttgcctgctgtgcctgctgctgctgggccccccgatcagacctcaaggacaggccagcgagagatggagctaccgtgtccaggatgaagctgcaggtctgggggacactgaccagcttgggctccacgctgccctgccgttccctcagctcccacaagctaccctgggtgacagcttcatcgagccgccctctgccggctgggccactgatgactccttctcatccgatcctgagtctggagaggcagatgaggttcctgcctactgtgtgccaccccaagaagggatggtccctgtggcccaggcagggtcgtcagaggccagcctggctgcaggtgctttcccgccccctgaggacgcctccacgccattcgccatcccgcgcacctccagcctagctcgggccaagcggccatcggtctccttcgcggaaggtaccaagtttgcaccacagagtcgccgaagctcaggggagctctccagcccgctccgaaagcccaagaggctctcccggggggcgcagtcgggtcctgagggccgggaagccgaagagtccacaggcccagaggaagcagaagcccccgagtcctttccggcggctgccagtcccggggattcagccactggccaccggcggcccccacttggtggccggacagtggctgagcacgtggaagccattgagggcagcgtccaggagagctcgggccctgtgaccacgatctacatgctggcagggaagccccgcggatccgaaggccctgtccgctctgtcttccgccattttggtagcttccagaaaggccaggcggaagccaaggtcaagagggccatccctaagcctccgcgccaggccctgaatcggaaaaagggcagccctggccttgcctctggctctgtcggccagagccccaactcagccccaaaagctgggcttcctggggccacagggcctatggcagtcagaccagaggaagcggtccgggggctgggggctggcaccgagagttcaaggagagcccaggagccagtctctggctgtggctccccagaacaggatccccagaagcaggctgaagaggaaaggcaggaggaacctgagtatgagaatgttgtacccatctccaggccaccagaaccctgatgaccttgaatttggggagtggggagagtggatggactagactgtgctgtgtgctggaaaatgatcccggggccaggacagacaaaccagagcctctgcgcctccacagggaaaaggcaaggcttccaggccagttggcccaggcccctggcagtgctcccggaggggcccaggaaggcctgggcagagaccctgtaggatggggtcaggaagggttgcctgcagggacttttgctctgctgtcctggaccctgtgtgcctcataagggctattctttctttcacgtgcaaaacatttttctgaaatagcaaacaacctacatgtttgctgataaaagattggctaaacaaatttttttttttttttt

SEQ ID NO: 179020 - DNA, 2698 bp, Homo sapiens
  Payload ID: 15285
  Gene Symbol: SCARF1
  Gene Name: scavenger receptor class F, member 1
  ENST ID: ENST00000573852
  CDS Start-End: 16-165
accgagctgcctgccatggggctggggctgctgctcccgctgctgctgctctggactcgggggactcaggggtccgagctggaccccaaagggcagcacgtctgtgtggccagcaggtgggtctcgtgggagtctgatgcgtgtggccagcagcccctctgctgagctgcagtgctgcgcaggctggaggcagaaggatcaagaatgcaccatccccatctgtgaggggccggacgcctgccagaaagacgaggtgtgtgtgaagccgggcctctgtcgatgcaagcctggattctttggggcccactgcagctcccgctgcccgggccagtactggggccccgactgccgtgagagctgcccctgccacccgcacggccagtgcgagccagccacgggcgcgtgccagtgccaggccgaccgctggggagcccgctgcgagttcccgtgcgcctgcggcccccacgggcgctgcgaccccgcgaccggcgtgtgccactgcgaacccggctggtggtcgtccacgtgccgccgcccgtgccagtgcaacaccgcggcggcgcgctgcgagcaggccacgggcgcctgcgtgtgcaagccgggctggtgggggcgccgctgcagcttccgctgcaactgccacggctccccgtgcgagcaggactccggccgctgcgcctgccggccgggctggtggggtcccgaatgccagcagcagtgcgagtgtgtgcggggccgctgcagcgccgcctccggcgagtgcacctgcccgcccggcttccgcggagcgcgctgcgagctgccctgcccggcaggcagccacggggtgcagtgcgcacacagctgtggccgctgcaaacacaatgagccgtgctctccagacacaggcagctgtgagtcctgcgagccgggctggaacgggacccagtgccagcagccctgcctgcctggcacctttggcgagagctgcgaacagcagtgccctcactgccgacatggggaggcctgtgagccagatactggccactgtcagcgctgtgaccctggctggctggggcccaggtgtgaagacccctgccccactggtacctttggggaagactgtggctctacctgccccacctgtgttcaggggtcctgtgatactgtgacaggggactgtgtctgcagtgccggctactgggggcccagctgcaacgcctcctgcccagccggtttccatggaaacaactgctcagttccttgtgaatgcccagagggactctgccaccctgtctctgggtcctgccagccaggctctggcagtcgggacactgccctcatcgcgggcagccttgtgcctctgctgctgctcttcctgggccttgcctgctgtgcctgctgctgctgggccccccgatcagacctcaaggacaggccagcgagagatggagctaccgtgtccaggatgaagctgcaggtctgggggacactgaccagcttgggctccacgctgccctgccgttccctcagctcccacaagctaccctgggtgacagtctcacatcacgacccggaggtccccttcaaccacagcttcatcgagccgccctctgccggctgggccactgatgactccttctcatccgatcctgagtctggagaggcagatgaggttcctgcctactgtgtgccaccccaagaagggatggtccctgtggcccaggcagggtcgtcagaggccagcctggctgcaggtgctttcccgccccctgaggacgcctccacgccattcgccatcccgcgcacctccagcctagctcgggccaagcggccatcggtctccttcgcggaaggtaccaagtttgcaccacagagtcgccgaagctcaggggagctctccagcccgctccgaaagcccaagaggctctcccggggggcgcagtcgggtcctgagggccgggaagccgaagagtccacaggcccagaggaagcagaagcccccgagtcctttccggcggctgccagtcccggggattcagccactggccaccggcggcccccacttggtggccggacagtggctgagcacgtggaagccattgagggcagcgtccaggagagctcgggccctgtgaccacgatctacatgctggcagggaagccccgcggatccgaaggccctgtccgctctgtcttccgccattttggtagcttccagaaaggccaggcggaagccaaggtcaagagggccatccctaagcctccgcgccaggccctgaatcggaaaaagggcagccctggccttgcctctggctctgtcggccagagccccaactcagccccaaaagctgggcttcctggggccacagggcctatggcagtcagaccagaggaagcggtccgggggctgggggctggcaccgagagttcaaggagagcccaggagccagtctctggctgtggctccccagaacaggatccccagaagcaggctgaagaggaaaggcaggaggaacctgagtatgagaatgttgtacccatctccaggccaccagaaccctgatgaccttgaatttggggagtggggagagtggatggactagactgtgctgtgtgctggaaaatgatcccggggccaggacagacaaaccagagcctctgcgcctccacagggaaaaggcaaggcttccaggccagttggcccaggcccctggca

SEQ ID NO: 179021 - DNA, 2619 bp, Homo sapiens; identical to SEQ ID NO: 179017
  Payload ID: 15285
  Gene Symbol: SCARF1
  Gene Name: scavenger receptor class F, member 1
  ENST ID: ENST00000616905
  CDS Start-End: 17-2251

SEQ ID NO: 179022 - DNA, 3443 bp, Homo sapiens; identical to SEQ ID NO: 179016
  Payload ID: 15285
  Gene Symbol: SCARF1
  Gene Name: scavenger receptor class F, member 1
  Uniprot ID: Q14162
  ENST ID: ENST00000621348
  CDS Start-End: 51-2543

SEQ ID NO: 179023 - DNA, 3342 bp, Homo sapiens; identical to SEQ ID NO: 179018
  Payload ID: 15285
  Gene Symbol: SCARF1
  Gene Name: scavenger receptor class F, member 1
  Uniprot ID: Q14162
  ENST ID: ENST00000631462
  CDS Start-End: 27-1055

SEQ ID NO: 179024 - DNA, 2698 bp, Homo sapiens; identical to SEQ ID NO: 179020
  Payload ID: 15285
  Gene Symbol: SCARF1
  Gene Name: scavenger receptor class F, member 1
  ENST ID: ENST00000633740
  CDS Start-End: 16-165

SEQ ID NO: 179025 - DNA, 2871 bp, Homo sapiens; identical to SEQ ID NO: 179019
  Payload ID: 15285
  Gene Symbol: SCARF1
  Gene Name: scavenger receptor class F, member 1
  Uniprot ID: Q14162
  ENST ID: ENST00000632317
  CDS Start-End: 48-1757

SEQ ID NO: 179026 - DNA, 3232 bp, Homo sapiens
  Payload ID: 15286
  Gene Symbol: SCARF2
  Gene Name: scavenger receptor class F, member 2
  Uniprot ID: Q96GP6
  ENST ID: ENST00000622235
  CDS Start-End: 72-2672
actccgcttccggccgctctcgctgcggccgcacccgcgcccgtgcccgccccgcgcctgccccgcgcctcatggagggcgcagggccccggggggccgggccggcgcggcgccggggagccggggggccgccgtcaccgctgctgccgtcgctgctgctgctgctgctgctctggatgctgccggacaccgtggcgcctcaggaactgaaccctcgcggccgcaacgtgtgccgtgctcccggctcccaggtgcccacgtgctgcgctggctggaggcagcaaggggacgagtgtgggattgcggtgtgcgaaggcaactccacgtgctcagagaacgaggtgtgcgtgaggcctggcgagtgccgctgccgccacggctacttcggtgccaactgcgacaccaagtgcccgcgccagttctggggccccgactgcaaggagctgtgtagctgccacccacacgggcagtgcgaggacgtgacaggccagtgtacttgtcacgcgcggcgctggggcgcgcgctgcgagcatgcgtgccagtgccagcacggcacgtgccacccgcggagcggcgcgtgccgctgtgagcccggctggtggggcgcgcagtgcgccagcgcgtgctactgcagcgccacgtcgcgctgcgacccacagaccggcgcctgcctgtgccacgcaggctggtggggccgcagctgcaacaaccagtgcgcctgcaactcgtctccctgcgagcagcagagcggccgctgtcagtgccgcgagcgtacgttcggcgcgcgctgcgatcgctactgccagtgcttccgcggccgctgccaccctgtggacggcacgtgtgcctgcgagccgggctaccgcggcaagtactgtcgcgagccgtgccccgccggcttctacggcttgggctgtcgccgccggtgtggccagtgcaagggccagcagccgtgcacggtggccgagggccgctgcttgacgtgcgagcccggctggaacggaaccaagtgcgaccagccttgcgccaccggtttctatggcgagggctgcagccaccgctgtccgccatgccgcgacgggcatgcctgtaaccatgtcaccggcaagtgtacgcgctgcaacgcgggctggatcggcgaccggtgcgagaccaagtgtagcaatggcacttacggcgaggactgcgccttcgtgtgcgccgactgcggcagcggacactgcgacttccagtcggggcgctgcctgtgcagccctggcgtccacgggccccactgtaacgtgacgtgcccgcccggactccacggcgcggactgtgctcaggcctgcagctgccacgaggacacgtgcgacccggtcactggtgcctgccacctagaaaccaaccagcgcaagggcgtgatgggcgcgggcgcgctgctcgtcctgctcgtctgcctgctgctctcgctgctcggctgctgctgcgcttgccgcggcaaggaccctacgcgccgggagctttcgcttgggaggaagaaggcgccgcaccgactatgcgggcgcttcagtcgcatcagcatgaagctgccccggatcccgctccggaggcagaaactacccaaagtcgtagtggcccaccacgacctggataacacactcaactgcagcttcctggagccaccctcagggctggagcagccctcaccatcctggtcctctcgggcctccttctcctcgtttgacaccactgatgaaggccctgtgtactgtgtaccccatgaggaggcaccagcggagagccgggaccccgaagtccccactgtccctgccgaggcgccggcgccgtcccctgtgcccttgaccacgccagcctccgccgaggaggcgatacccctccccgcgtcctccgacagcgagcggtcggcgtccagcgtggaggggcccggaggggctctgtacgcgcgcgtggcccgacgcgaggcccggccggcccgggcccggggcgagattgggggcctgtcgctgtcgccatcgcccgagcgcaggaaaccgccgccacctgaccccgccaccaagcctaaggtgtcctggatccacggcaagcacagcgccgctgcagctggccgtgcgccctcaccaccgccgccaggctccgaggccgcgcccagccccagcaagaggaaacggacgcccagcgacaaatcggcgcatacggtcgaacacggcagcccccggacccgcgacccaacgccgcggccccccgggctgcccgaggaggcgacagccctcgctgcgccctcgccgcccagggcccgagcgcggggccgcggccccggcctcttggagcccacggacgccggcggtcccccgcgaagcgcgcccgaggctgcctccatgttggccgctgagctgcgcggcaagactcgcagcctgggccgcgccgaggtggccctgggcgcgcagggccccagggaaaagccggcgcccccacagaaagccaagcgctccgtgccgccagcctcgcccgcccgcgcgcccccagcgaccgaaaccccggggcctgagaaggcggcgaccgacttgcccgcgcctgagaccccccggaagaagacccccatccagaagccgccgcgcaagaagagccgggaggcggcgggcgagctgggcagggcgggcgcacccaccctgtagcaggctgtggctcgtccgcgcgcagctccctcagcttcgcagcgccgcccgccaccccacacctcccacgctaccgggcacgggcggcctcctattggccgggcaccgcgcggctagcggaggttgcgtctcattggctcaggtcctgcagccgctcctggattggagcagtgtgctctggcgggaagggcccatcccgttggtcgaggcctgacaggcgcttagcgggcgactccctccccattggccgagttatggagcgctccgaccagacagcgtctcattggccaaagatgggagggttccgcttaaagaccgcctcttactggccaggagtggacttggttagggctaccttctcattggttgcagccagaggcacttctgcccgggctgcctctcccccgctagggcctggtgcctctggctggaggctccctcccttggccgtcccaatagagcccggggctacttccactggccaggctcccgggcatctggttgaccccagcctggggaggagggctggtctccgctcctcaggggcttagtccgtccca

SEQ ID NO: 179027 - DNA, 3508 bp, Homo sapiens
  Payload ID: 15286
  Gene Symbol: SCARF2
  Gene Name: scavenger receptor class F, member 2
  ENST ID: ENST00000615031
  CDS Start-End: 106-2718
ggcgcccctcctgccgccccccgcccggcctcgcactccgcttccggccgctctcgctgcggccgcacccgcgcccgtgcccgccccgcgcctgccccgcgcctcatggagggcgcagggccccggggggccgggccggcgcggcgccggggagccggggggccgccgtcaccgctgctgccgtcgctgctgctgctgctgctgctctggatgctgccggacaccgtggcgcctcaggaactgaaccctcgcggccgcaacgtgtgccgtgctcccggctcccaggtgcccacgtgctgcgctggctggaggcagcaaggggacgagtgtgggattgcggtgtgcgaaggcaactccacgtgctcagagaacgaggtgtgcgtgaggcctggcgagtgccgctgccgccacggctacttcggtgccaactgcgacaccaagtgcccgcgccagttctggggccccgactgcaaggagctgtgtagctgccacccacacgggcagtgcgaggacgtgacaggccagtgtacttgtcacgcgcggcgctggggcgcgcgctgcgagcatgcgtgccagtgccagcacggcacgtgccacccgcggagcggcgcgtgccgctgtgagcccggctggtggggcgcgcagtgcgccagcgcgtgctactgcagcgccacgtcgcgctgcgacccacagaccggcgcctgcctgtgccacgcaggctggtggggccgcagctgcaacaaccagtgcgcctgcaactcgtctccctgcgagcagcagagcggccgctgtcagtgccgcgagcgtacgttcggcgcgcgctgcgatcgctactgccagtgcttccgcggccgctgccaccctgtggacggcacgtgtgcctgcgagccgggctaccgcggcaagtactgtcgcgagccgtgccccgccggcttctacggcttgggctgtcgccgccggtgtggccagtgcaagggccagcagccgtgcacggtggccgagggccgctgcttgacgtgcgagcccggctggaacggaaccaagtgcgaccagccttgcgccaccggtttctatggcgagggctgcagccaccgctgtccgccatgccgcgacgggcatgcctgtaaccatgtcaccggcaagtgtacgcgctgcaacgcgggctggatcggcgaccggtgcgagaccaagtgtagcaatggcacttacggcgaggactgcgccttcgtgtgcgccgactgcggcagcggacactgcgacttccagtcggggcgctgcctgtgcagccctggcgtccacgggccccactgtaacgtgacgtgcccgcccggactccacggcgcggactgtgctcaggcctgcagctgccacgaggacacgtgcgacccggtcactggtgcctgccacctagaaaccaaccagcgcaagggcgtgatgggcgcgggcgcgctgctcgtcctgctcgtctgcctgctgctctcgctgctcggctgctgctgcgcttgccgcggcaaggaccctacgcgccgaccccgcccccgcagggagctttcgcttgggaggaagaaggcgccgcaccgactatgcgggcgcttcagtcgcatcagcatgaagctgccccggatcccgctccggaggcagaaactacccaaagtcgtagtggcccaccacgacctggataacacactcaactgcagcttcctggagccaccctcagggctggagcagccctcaccatcctggtcctctcgggcctccttctcctcgtttgacaccactgatgaaggccctgtgtactgtgtaccccatgaggaggcaccagcggagagccgggaccccgaagtccccactgtccctgccgaggcgccggcgccgtcccctgtgcccttgaccacgccagcctccgccgaggaggcgatacccctccccgcgtcctccgacagcgagcggtcggcgtccagcgtggaggggcccggaggggctctgtacgcgcgcgtggcccgacgcgaggcccggccggcccgggcccggggcgagattgggggcctgtcgctgtcgccatcgcccgagcgcaggaaaccgccgccacctgaccccgccaccaagcctaaggtgtcctggatccacggcaagcacagcgccgctgcagctggccgtgcgccctcaccaccgccgccaggctccgaggccgcgcccagccccagcaagaggaaacggacgcccagcgacaaatcggcgcatacggtcgaacacggcagcccccggacccgcgacccaacgccgcggccccccgggctgcccgaggaggcgacagccctcgctgcgccctcgccgcccagggcccgagcgcgggccgcgccccggcctcttggagcccacggacgccggcggtcccccgcgaagcgcgccgaggctgcctccatgttggccgctgagctgcgcggcaagactcgcagcctgggccgcgccgaggtggccctgggcgcgcagggccccagggaaaagccggcgcccccacagaaagccaagcgctccgtgccgccagcctcgcccgcccgcgcgcccccagcgaccgaaaccccggggcctgagaaggcggcgaccgacttgcccgcgcctgagaccccccggaagaagacccccatccagaagccgccgcgcaagaagagccgggaggcggcgggcgagctgggcagggcgggcgcacccaccctgtagcaggctgtggctcgtccgcgcgcagctccctcagcttcgcagcgccgcccgccaccccacacctcccacgctaccgggcacgggcggcctcctattggccgggcaccgcgcggctagcggaggttgcgtctcattggctcaggtcctgcagccgctcctggattggagcagtgtgctctggcgggaagggcccatcccgttggtcgaggcctgacaggcgcttagcgggcgactccctccccattggccgagttatggagcgctccgaccagacagcgtctcattggccaaagatgggagggttccgcttaaagaccgcctcttactggccaggagtggacttggttagggctaccttctcattggttgcagccagaggcacttctgcccgggctgcctctcccccgctagggcctggtgcctctggctggaggctccctcccttggccgtcccaatagagcccggggctacttccactggccaggctcccgggcatctggttgaccccagcctggggaggagggctggtctccgctcctcaggggcttagtccgtcccaccccttcccttccctggcgccccgggcccaggcccctcagctgtcagctggttttgatggcctcccactgccccacacgccgcgggacctccaggggcgactctagtggcctgaggagatgtatttataggcccccagcagggctgctcccccctcggccggtgccccaggatgggctcctcccggcgggggcttggccaaagctttcttaataaaatgcctttcccctc

SEQ ID NO: 179028 - DNA, 3248 bp, Homo sapiens
  Payload ID: 15286
  Gene Symbol: SCARF2
  Gene Name: scavenger receptor class F, member 2
  ENST ID: ENST00000623402
  CDS Start-End: 73-2688
cactccgcttccggccgctctcgctgcggccgcacccgcgcccgtgcccgccccgcgcctgccccgcgcctcatggagggcgcagggccccggggggccgggccggcgcggcgccggggagccggggggccgccgtcaccgctgctgccgtcgctgctgctgctgctgctgctctggatgctgccggacaccgtggcgcctcaggaactgaaccctcgcggccgcaacgtgtgccgtgctcccggctcccaggtgcccacgtgctgcgctggctggaggcagcaaggggacgagtgtgggattgcggtgtgcgaaggcaactccacgtgctcagagaacgaggtgtgcgtgaggcctggcgagtgccgctgccgccacggctacttcggtgccaactgcgacaccaagtgcccgcgccagttctggggccccgactgcaaggagctgtgtagctgccacccacacgggcagtgcgaggacgtgacaggccagtgtacttgtcacgcgcggcgctggggcgcgcgctgcgagcatgcgtgccagtgccagcacggcacgtgccacccgcggagcggcgcgtgccgctgtgagcccggctggtggggcgcgcagtgcgccagcgcgtgctactgcagcgccacgtcgcgctgcgacccacagaccggcgcctgcctgtgccacgcaggctggtggggccgcagctgcaacaaccagtgcgcctgcaactcgtctccctgcgagcagcagagcggccgctgtcagtgccgcgagcgtacgttcggcgcgcgctgcgatcgctactgccagtgcttccgcggccgctgccaccctgtggacggcacgtgtgcctgcgagccgggctaccgcggcaagtactgtcgcgagccgtgccccgccggcttctacggcttgggctgtcgccgccggtgtggccagtgcaagggccagcagccgtgcacggtggccgagggccgctgcttgacgtgcgagcccggctggaacggaaccaagtgcgaccagccttgcgccaccggtttctatggcgagggctgcagccaccgctgtccgccatgccgcgacgggcatgcctgtaaccatgtcaccggcaagtgtacgcgctgcaacgcgggctggatcggcgaccggtgcgagaccaagtgtagcaatggcacttacggcgaggactgcgccttcgtgtgcgccgactgcggcagcggacactgcgacttccagtcggggcgctgcctgtgcagccctggcgtccacgggccccactgtaacgtgacgtgcccgcccggactccacggcgcggactgtgctcaggcctgcagctgccacgaggacacgtgcgacccggtcactggtgcctgccacctagaaaccaaccagcgcaagggcgtgatgggcgcgggcgcgctgctcgtcctgctcgtctgcctgctgctctcgctgctcggctgctgctgcgcttgccgcggcaaggaccctacgcgccgaccccgcccccgcagggagctttcgcttgggaggaagaaggcgccgcaccgactatgcgggcgcttcagtcgcatcagcatgaagctgccccggatcccgctccggaggcagaaactacccaaagtcgtagtggcccaccacgacctggataacacactcaactgcagcttcctggagccaccctcagggctggagcagccctcaccatcctggtcctctcgggcctccttctcctcgtttgacaccactgatgaaggccctgtgtactgtgtaccccatgaggaggcaccagcggagagccgggaccccgaagtccccactgtccctgccgaggcgccggcgccgtcccctgtgcccttgaccacgccagcctccgccgaggaggcgatacccctccccgcgtcctccgacagcgagcggtcggcgtccagcgtggaggggcccggaggggctctgtacgcgcgcgtggcccgacgcgaggcccggccggcccgggcccggggcgagattgggggcctgtcgctgtcgccatcgcccgagcgcaggaaaccgccgccacctgaccccgccaccaagcctaaggtgtcctggatccacggcaagcacagcgccgctgcagctggccgtgcgccctcaccaccgccgccaggctccgaggccgcgcccagccccagcaagaggaaacggacgcccagcgacaaatcggcgcatacggtcgaacacggcagcccccggacccgcgacccaacgccgcggccccccgggctgcccgaggaggcgacagccctcgctgcgccctcgccgcccagggcccgagcgcggggccgcggccccggcctcttggagcccacggacgccggcggtcccccgcgaagcgcgcccgaggctgcctccatgttggccgctgagctgcgcggcaagactcgcagcctgggccgcgccgaggtggccctgggcgcgcagggccccagggaaaagccggcgcccccacagaaagccaagcgctccgtgccgccagcctcgcccgcccgcgcgcccccagcgaccgaaaccccggggcctgagaaggcggcgaccgacttgcccgcgcctgagaccccccggaagaagacccccatccagaagccgccgcgcaagaagagccgggaggcggcgggcgagctgggcagggcgggcgcacccaccctgtagcaggctgtggctcgtccgcgcgcagctccctcagcttcgcagcgccgcccgccaccccacacctcccacgctaccgggcacgggcggcctcctattggccgggcaccgcgcggctagcggaggttgcgtctcattggctcaggtcctgcagccgctcctggattggagcagtgtgctctggcgggaagggcccatcccgttggtcgaggcctgacaggcgcttagcgggcgactccctccccattggccgagttatggagcgctccgaccagacagcgtctcattggccaaagatgggagggttccgcttaaagaccgcctcttactggccaggagtggacttggttagggctaccttctcattggttgcagccagaggcacttctgcccgggctgcctctcccccgctagggcctggtgcctctggctggaggctccctcccttggccgtcccaatagagcccggggctacttccactggccaggctcccgggcatctggttgaccccagcctggggaggagggctggtctccgctcctcaggggcttagtccgtccca

SEQ ID NO: 179029 - DNA, 2801 bp, Homo sapiens
  Payload ID: 15287
  Gene Symbol: SSC4D
  Gene Name: scavenger receptor cysteine rich family, 4 domains
  Uniprot ID: Q8WTU2
  ENST ID: ENST00000275560
  CDS Start-End: 349-2076
ttttctggggccgctccagctggtgccggccacctccactcccctttgcttcttgctgtccctaaggtcggatggggacaggctggggccaccagccagctccatggacagggactttgcctctgctcaccttccagctgtggaaagaaaagaagaaacgcctgtgttgatttccatttggaagatccttcctcctcctaaacttccaggggcagacaaagtgattcgatcttggattgactgtagaagaagggacagaaagagcccagaacattcccccagatgttccaactgtgacttctccctggcgccttgatgggagcatctgaaacacccttcaccatctagatgcacaaggaagcagagatgctaattggtccccagctggatgagaagcgctgggggtggaggttgggagatgggagtgctgcccctcccttcctcccccaagccctgtctttccttctcctcctgccactggccagcgccctacagcccactccactgccctttcaagagctgaggctggtggggggccccagccgctgccggggccgcctggaagtcatgcacggtggctcctggggcagcgtctgtgatgacgactgggacgtggtggacgccaacgtagtgtgtcgccagctgggctgtggcctggcactgcccgtgccacggccccttgcctttggccaaggccgaggccccatcctgctggacaacgtggagtgccgcgggcaggaagctgcgctgagcgagtgcggcagccgcggctggggcgtccacaattgctttcactacgaggatgtggctgtcctgtgtgatgaattcttgccaacgcagcccccaacaaggaagatgttaaccagtagagcacctcctacgacactgccgaatggaaaaagtgagggcagcgtacgcctggtagggggcgcgaacctgtgtcagggccgagtggagatcctgcacagtggcctgtggggcaccgtgtgtgacgacgactgggggctgccggatgccgctgtggtctgtcgtcagctgggctgcggggcggccatggccgccaccaccaacgccttcttcggctatggcaccggacacatcctgctggacaacgtgcactgcgaaggcggcgagccccgcctggcagcctgccagagcctgggctggggtgtgcacaactgcggccaccacgaggacgcgggcgcgctctgcgcaggcctgggtcccccaacgctcacagcactgccatcctcagccacaagagaggactgggcttggcagacagatccgtccgctacaggagttggcccccagccttcccgggagacagcactgctcaccaccgccgcctgggccgcggggaagaaaagtggacggctgcgactggtgggcggcccgggtccgtgccgcggccgcgtggaggtgttgcacgccgggggctggggcaccgtgtgcgacgatgactgggactttgcggacgcgcgcgtggcctgccgcgaagcgggctgcgggcctgcgctgggcgctacgggactgggccacttcggctacggccgcggccccgtgctgctggacaacgtgggctgcgccggcaccgaggctcgcctgagcgactgcttccacctgggctggggccagcacaactgcggccaccacgaggacgcgggagcgctctgcgcaggcccagaggagctgggactgcaagtccagcaggatggttctgagaccacgcgggtgcccactcctcggcccagggacgggcatctacgtctggtcaatggagcccaccgatgcgagggacgtgtagagctctacctagggcaacggtggggcactgtctgtgatgatgcttgggacctgcgggcagccggtgtcctgtgccgccagctgggctgtggccaggccctcgcagcccctggcgaggctcactttggcccaggccgaggccccattctcctggacaatgtcaagtgccgtggggaagaaagtgctctgctgctctgctctcatatccgctgggatgcccacaactgtgaccacagcgaggatgccagtgtcctgtgccagccttcatgacccagcccgctctgcagaccacctcttcttctgggagctgtgacctcccttcctcctccaggaagccctcctcttgtgatgactacagttcactttgcccctccttcccttgcctgggagagagcctacctagacagtgcagtcctgcttgggggagcctggctgtacccccgtccacttactgcgtgacctcagcctgtcatcgactgttgtgagcccaattcagtgaaagctcctgtggttttgctcagccaaaaccaaaacgaggggaagaggatgattcctaactcttctgtttggtggggctctttttatagcaccagactctgccttccttgacctagatccaggaggctcaggggctctttaaatggggtatctcctcttcccccaacccatcttgggatccccaagaagagggaaggcaggaggggcctacagctcctaccttgggccctcaggggctgcagaggaacctgggtccctgtcctgccctgctccgcgagggcctggactaactcagatggtgctcggctggacaaggggactgggggaggggccaaagcagggacagtggcccctccctgcagctggaaccagcatctctgatttatgccgtctccaccacagagcctccactttgcaggagtgaagaaccctgggggcctgtagccaccagttcataggtgccaagtcaataaagcattgtcccccgtctcttataa

SEQ ID NO: 179030 - DNA, 4845 bp, Homo sapiens
  Payload ID: 15288
  Gene Symbol: SSC5D
  Gene Name: scavenger receptor cysteine rich family, 5 domains
  Uniprot ID: A1L4H1
  ENST ID: ENST00000389623
  CDS Start-End: 24-4745
catcccctgccctggctgcaaccatgagggtcttggcctgcctccttgcggccctggtggggatccaggctgttgagcgcctgcgcctggccgatggcccccatgggtgcgctggccgcctggaggtctggcatggcgggcgctggggcaccgtgtgtgatgacggctgggacctgcgcgatgccgccgtggcctgccggcagctgggctgcggaggggcactggccgccccgggaggcgccttcttcggggagggggcagggcctgtgtggctcagcgagctggcttgccggggcaacgaggggcagctgggcctctgccaccaccggggctggaaggcccacatctgctcccacgaggaggacgcgggcgtcgtctgcgcaggtcagcgtgtggctaactccagggacgactcaacatctcccctggatggggctccctggccagggctgttgctggagctgagccccagcacggaggagcccctggtgacacatgccccccgcccagctgggaacccccagaacgcctcccggaagaagagcccccggcccaagcaggccaagtccacccgggcccctctgctgacgacaggagccccccgccaagagcggctgcgcctggtctctggcccccacaggtgcgccggacgcctggaggtctggcacggcgggcgctggggcaccgtatgtgacgatggctgggacctgcgcgacgctgctgtagcctgccgggaactgggctgtgggggggcgctggctgcccccggcggtgccagattcgggcctggtgcagggcccgtgtggatggacgatgtggggtgtggaggaggagaacaggccctccgagactgcccccgaagcccctggggccggagcaactgtgaccacagcgaggatgcggggctggtctgcaccggcccagcacctcggctgcgcctggccgatggcccccacgggtgcgccggccgcctggaggtctggcacgggggtcgctgggggtcggtgtgtgacgacgcctgggacctgcgagacgccgctgtggcctgccgagagctgggctgcggaggggcgctggccgcccccgggggcgccttctttggggaggggtctggacccatcatcctggacgaccttcggtgtcggggaaacgagacggccttacgattctgcccagctcggccctggggccagcatgactgtcaccaccgcgaggacgccggggccgtgtgtgacggcatgcccctgggctacgtccctcccacggcccccacggacagcaacaactccacgcccagggaggctgcctccaggcccccgtccaccatgacgagccaggctccagggacggcaggcgtttcacctcctccagcctcccctactgtcctttgggagcctggaccggaagccgggtccccccagctgcgcctggtggctgggcccagcaagtgctcaggtcgactggaggtgtggcatgaccagcgctgggggaccgtgtgtgacgatagctgggacatgcgggattcagctgtggtctgccgggagctgggctgtggtggacctcagcagccagaccctgctgctggccgctttggctggggtgcgggccccatctggctagatgatgtgggctgtgtggggaccgaggcttcactgtccgactgccctgctgctccctggggaaagcacaactgcgctcacaatgaggatgttggggtcacctgcactgggcccccaggcctggactccatctcagaccccttcagctggagctggattcctggactggggagagatcgggatgcctggctcccgggagagctggccaccaagccctctgcaagtgtgactgccagtgttctggagaaaacaaccacgaaggccccagggaaaatgcctaagagtactaagaagtgggtgacaaaaaatgcaaagagaccaaccactcaacccccagtgatgccaaccacgaaacactccagggcccaaagccccccagacctaacctcacagaccactgcagcactgaccactgaggcctcccgaagacctacctctgagtttaccagaaggccgaccacggaggccccccagagatggacctctcacaccactgccacgctgacccctcaggccccccgagaacggaccactaagaccatggcaatgctgaccactcaaggcccccaagaaatgacctctgagtccactatcaagagtatccctcaggcctccctggagccatctgctgagatcccagaagggtctccagagtcacccaaagacccggccccctctcccagtgttagcaccactggggaatcaggcctgttccgggttcgtctggccgatgggcccaaccgctgtgctggccggctggaagtgtggcatgccggacgctggggaacagtgtgtgatgacaactgggacctgcgggacgccactgtggcctgctgggaactgggctgtggaaaggtccggcctcgagtaggcaaaacccattacggccctgggactgggcccatctggctggatgacatgggctgtaagggaagcgaggcctcactgagcgactgcccctcgggggcttgggggaagcacaactgtgaccacgaggaagacgtggggctcacctgcactggctacacagactatgacgattatcccccctggacctgggaccccacctcaagagaggacctggccaaggggactaccacagcgggggtacctggacacactctcccctggaggaccacccggcgcccgggtagctcctccccagcaataaggcgcctgccggacacaggcagcaaagatggttacaagcttccctggacgtgggacacaccatcaggaaggggcctggctgaggggacccctaccgcaggcaaactaggaccaactcttggggctggcaccaccaggagcccaggcagtcctccaactctgagagtccatggagacacaggttccccgaggaaaccgtggcccgagcgccggccaccgcggcccgctgcgaccaggacagcgcccccaaccccgtccccaggtccctccgcctctccgggacccccaggcccagcgctgacctctgactccagtcgagagctcactccccactcagccttgacgtccgaggcgacctctgacgctccggacacttcaccacccaccccagacccggcctcccggacgaaccccgacctcatcttgacaagccctgactttgctttgtccacccctgactccagtgtggttcccgcgttgaccccggagccctcacccacgcccttacccaccttgcccaaagagctgacctctgacccttctacaccgtcggaggtgaccagcctttcccctacctcagagcaggtcccagaatctgacacaaccccagatttggacacaactccatactccagtacagtctcagaatattctagatccccagacccctccccaagccctcaccccactactacccctgatcccaccatggcccctgaccccatcacaacccttaaccctactgtgacccctcacttccctaccacccctcaccccaccacgacccctcaccccaccaccatcactcactccaccatgattcctgaccccaccacaacccctcaacccttcaccaccatcactcactccaccatgattcctgaccccaccacaacccctcaacccttcaccaccatgcagcccaccacaacccctcactccacaacccctcaccccaccacgacccctcatcccaccaccatcactcactccaccatgattcctgaccccaccacaacccctcaacccttcaccaccatgcagcccaccacgatgcctcatcccaccacgacccctcaccccaccacgactcctcaccccaccacaacccctcaccccaccacaacccctcaccccaccatgactcctgaccccaccacgaccccttaccccaccactactcctgatcccaccacgacccctcaccccacaactcctgacccttcctcaacccctgtcatcactactgtgtcccttccaacctccttggggacagaactctcctctcccactctagcaccaacagtcaagcccagtctgcacccccagttgaccttcacagcacctgcccctcacacctccacatcccagatacccaccttagagccctctccagccttggagtccagcccctccaggtcctccacagccacaagcatggacccactgtccactgaggacttcaagccacccagaagccagagccccaacctaacccctccacccacccataccccacactcagcctctgaccttactgtgtcccctgaccccctcctttcccccacagcccaccccttggatcatcctccccttgaccccctcaccctagggccaactcctggtcagagcccaggcccccatggtccatgtgtggccccaacaccacctgtaagggtcatggcttgtgagccacctgccctggtggagctggtggctgctgtgagggatgtgggtggtcagctgcagagactgacccaggtcgtggaacaggagcggcaggagcgccaagccctgctgctggggctgacgcagctggtagaagctgcccggggtctggggcagctgggtgaggctgtgaagagactggcagagatggcctggaccaccagcatgcctgcaccaaccaccactaccccagaggaagaagaaagacccctgaggggagacgtgtgaccctctccaggatttgaggggcttaagacacccccaaccaaaaaaaacaaaaacaaaaaaaacccccaaagtatctaattaaaaacaaggtgtgaatggt

SEQ ID NO: 179031 - DNA, 3017 bp, Homo sapiens
  Payload ID: 15288
  Gene Symbol: SSC5D
  Gene Name: scavenger receptor cysteine rich family, 5 domains
  Uniprot ID: A1L4H1
  ENST ID: ENST00000587166
  CDS Start-End: 24-2879
catcccctgccctggctgcaaccatgagggtcttggcctgcctccttgcggccctggtggggatccaggctgttgagcgcctgcgcctggccgatggcccccatgggtgcgctggccgcctggaggtctggcatggcgggcgctggggcaccgtgtgtgatgacggctgggacctgcgcgatgccgccgtggcctgccggcagctgggctgcggaggggcactggccgccccgggaggcgccttcttcggggagggggcagggcctgtgtggctcagcgagctggcttgccggggcaacgaggggcagctgggcctctgccaccaccggggctggaaggcccacatctgctcccacgaggaggacgcgggcgtcgtctgcgcaggtcagcgtgtggctaactccagggacgactcaacatctcccctggatggggctccctggccagggctgttgctggagctgagccccagcacggaggagcccctggtgacacatgccccccgcccagctgggaacccccagaacgcctcccggaagaagagcccccggcccaagcaggccaagtccacccgggcccctctgctgacgacaggagccccccgccaagagcggctgcgcctggtctctggcccccacaggtgcgccggacgcctggaggtctggcacggcgggcgctggggcaccgtatgtgacgatggctgggacctgcgcgacgctgctgtagcctgccgggaactgggctgtgggggggcgctggctgcccccggcggtgccagattcgggcctggtgcagggcccgtgtggatggacgatgtggggtgtggaggaggagaacaggccctccgagactgcccccgaagcccctggggccggagcaactgtgaccacagcgaggatgcggggctggtctgcaccggcccagcacctcggctgcgcctggccgatggcccccacgggtgcgccggccgcctggaggtctggcacgggggtcgctgggggtcggtgtgtgacgacgcctgggacctgcgagacgccgctgtggcctgccgagagctgggctgcggaggggcgctggccgcccccgggggcgccttctttggggaggggtctggacccatcatcctggacgaccttcggtgtcggggaaacgagacggccttacgattctgcccagctcggccctggggccagcatgactgtcaccaccgcgaggacgccggggccgtgtgtgacggcatgcccctgggctacgtccctcccacggcccccacggacagcaacaactccacgcccagggaggctgcctccaggcccccgtccaccatgacgagccaggctccagggacggcaggcgtttcacctcctccagcctcccctactgtcctttgggagcctggaccggaagccgggtccccccagctgcgcctggtggctgggcccagcaagtgctcaggtcgactggaggtgtggcatgaccagcgctgggggaccgtgtgtgacgatagctgggacatgcgggattcagctgtggtctgccgggagctgggctgtggtggacctcagcagccagaccctgctgctggccgctttggctggggtgcgggccccatctggctagatgatgtgggctgtgtggggaccgaggcttcactgtccgactgccctgctgctccctggggaaagcacaactgcgctcacaatgaggatgttggggtcacctgcactgggcccccaggcctggactccatctcagaccccttcagctggagctggattcctggactggggagagatcgggatgcctggctcccgggagagctggccaccaagccctctgcaagtgtgactgccagtgttctggagaaaacaaccacgaaggccccagggaaaatgcctaagagtactaagaagtgggtgacaaaaaatgcaaagagaccaaccactcaacccccagtgatgccaaccacgaaacactccagggcccaaagccccccagacctaacctcacagaccactgcagcactgaccactgaggcctcccgaagacctacctctgagtttaccagaaggccgaccacggaggccccccagagatggacctctcacaccactgccacgctgacccctcaggccccccgagaacggaccactaagaccatggcaatgctgaccactcaaggcccccaagaaatgacctctgagtccactatcaagagtatccctcaggcctccctggagccatctgctgagatcccagaagggtctccagagtcacccaaagacccggccccctctcccagtgttagcaccactggggaatcaggcctgttccgggttcgtctggccgatgggcccaaccgctgtgctggccggctggaagtgtggcatgccggacgctggggaacagtgtgtgatgacaactgggacctgcgggacgccactgtggcctgctgggaactgggctgtggaaaggtccggcctcgagtaggcaaaacccattacggccctgggactgggcccatctggctggatgacatgggctgtaagggaagcgaggcctcactgagcgactgcccctcgggggcttgggggaagcacaactgtgaccacgaggaagacgtggggctcacctgcactggctacacagactatgacgattatcccccctggacctgggaccccacctcaagagaggacctggccaaggggactaccacagcgggggtacctggacacactctcccctggaggaccacccggcgcccgggtagctcctccccagcaataaggcgcctgccggacacagagccggaagcgggagctccgagaggtgatgctcctcgttcaaggactgccagggttgcagcgcctccctagcccatagcgccccctcgtggtggaggcgggcacgtgccgggcacagcggctgcggagacagcgggtccggcctcgggacccctcccgtagggtagggaggcagccaatgagcagaaataaatgcagaatcacaaactg

SEQ ID NO: 179032 - DNA, 354 bp, Homo sapiens
  Payload ID: 15288
  Gene Symbol: SSC5D
  Gene Name: scavenger receptor cysteine rich family, 5 domains
  ENST ID: ENST00000589020
  CDS Start-End: 1-354
gacgccggggccgtgtgtgacggcatgcccctgggctacgtccctcccacggcccccacggacagcaacaactccacgcccagggaggctgcctccaggcccccgtccaccatgacgagccaggctccagggacggcaggcgtttcacctcctccagcctcccctactgtcctttgggagcctggaccggaagccgggcccccaggcctggactccatctcagaccccttcagctggagctggattcctggactggggagagatcgggatgcctggctcccgggagagctggccaccaagccctctgcaagtgtgactgccagtgttctggagaaaacaaccacgaaggcccca

SEQ ID NO: 179033 - DNA, 457 bp, Homo sapiens
  Payload ID: 15288
  Gene Symbol: SSC5D
  Gene Name: scavenger receptor cysteine rich family, 5 domains
  ENST ID: ENST00000594321
  CDS Start-End: 187-457
gtcccctgccgcctccctgcagcctctttcttcctcctggcaaagcgtccagccctgcctgctcctcctcgggcctgggcgcctccagcaggcacttccctccctccctctctccccagctgcctcctcctcttctctccccgctctccttcccctttcaccccatcccctgccctggctgcaaccatgagggtcttggcctgcctccttgcggccctggtggggatccaggctgttgagcgcctgcgcctggccgatggcccccatgggtgcgctggccgcctggaggtctggcatggcgggcgctggggcaccgtgtgtgatgacggctgggacctgcgcgatgccgccgtggcctgccggcagctgggctgcggaggggcactggccgccccgggaggcgccttcttcggggagggggcagggcctgtgtggctcagcgagctggcttgccggg

SEQ ID NO: 179034 - DNA, 3016 bp, Homo sapiens
  Payload ID: 15288
  Gene Symbol: SSC5D
  Gene Name: scavenger receptor cysteine rich family, 5 domains
  ENST ID: ENST00000615233
  CDS Start-End: 24-2885
catcccctgccctggctgcaaccatgagggtcttggcctgcctccttgcggccctggtggggatccaggctgttgagcgcctgcgcctggccgatggcccccatgggtgcgctggccgcctggaggtctggcatggcgggcgctggggcaccgtgtgtgatgacggctgggacctgcgcgatgccgccgtggcctgccggcagctgggctgcggaggggcactggccgccccgggaggcgccttcttcggggagggggcagggcctgtgtggctcagcgagctggcttgccggggcaacgaggggcagctgggcctctgccaccaccggggctggaaggcccacatctgctcccacgaggaggacgcgggcgtcgtctgcgcaggtcagcgtgtggctaactccagggacgactcaacatctcccctggatggggctccctggccagggctgttgctggagctgagccccagcacggaggagcccctggtgacacatgccccccgcccagctgggaacccccagaacgcctcccggaagaagagcccccggcccaagcaggccaagtccacccgggcccctctgctgacgacaggagccccccgccaagagcggctgcgcctggtctctggcccccacaggtgcgccggacgcctggaggtctggcacggcgggcgctggggcaccgtatgtgacgatggctgggacctgcgcgacgctgctgtagcctgccgggaactgggctgtgggggggcgctggctgcccccggcggtgccagattcgggcctggtgcagggcccgtgtggatggacgatgtggggtgtggaggaggagaacaggccctccgagactgcccccgaagcccctggggccggagcaactgtgaccacagcgaggatgcggggctggtctgcaccggcccagcacctcggctgcgcctggccgatggcccccacgggtgcgccggccgcctggaggtctggcacgggggtcgctgggggtcggtgtgtgacgacgcctgggacctgcgagacgccgctgtggcctgccgagagctgggctgcggaggggcgctggccgcccccgggggcgccttctttggggaggggtctggacccatcatcctggacgaccttcggtgtcggggaaacgagacggccttacgattctgcccagctcggccctggggccagcatgactgtcaccaccgcgaggacgccggggccgtgtgtgacggcatgcccctgggctacgtccctcccacggcccccacggacagcaacaactccacgcccagggaggctgcctccaggcccccgtccaccatgacgagccaggctccagggacggcaggcgtttcacctcctccagcctcccctactgtcctttgggagcctggaccggaagccgggtccccccagctgcgcctggtggctgggcccagcaagtgctcaggtcgactggaggtgtggcatgaccagcgctgggggaccgtgtgtgacgatagctgggacatgcgggattcagctgtggtctgccgggagctgggctgtggtggacctcagcagccagaccctgctgctggccgctttggctggggtgcgggccccatctggctagatgatgtgggctgtgtggggaccgaggcttcactgtccgactgccctgctgctccctggggaaagcacaactgcgctcacaatgaggatgttggggtcacctgcactgggcccccaggcctggactccatctcagaccccttcagctggagctggattcctggactggggagagatcgggatgcctggctcccgggagagctggccaccaagccctctgcaagtgtgactgccagtgttctggagaaaacaaccacgaaggccccagggaaaatgcctaagagtactaagaagtgggtgacaaaaaatgcaaagagaccaaccactcaacccccagtgatgccaaccacgaaacactccagggcccaaagccccccagacctaacctcacagaccactgcagcactgaccactgaggcctcccgaagacctacctctgagtttaccagaaggccgaccacggaggccccccagagatggacctctcacaccactgccacgctgacccctcaggccccccgagaacggaccactaagaccatggcaatgctgaccactcaaggcccccaagaaatgacctctgagtccactatcaagagtatccctcaggcctccctggagccatctgctgagatcccagaagggtctccagagtcacccaaagacccggccccctctcccagtgttagcaccactggggaatcaggcctgttccgggttcgtctggccgatgggcccaaccgctgtgctggccggctggaagtgtggcatgccggacgctggggaacagtgtgtgatgacaactgggacctgcgggacgccactgtggcctgctgggaactgggctgtggaaaggtccggcctcgagtaggcaaaacccattacggccctgggactgggcccatctggctggatgacatgggctgtaagggaagcgaggcctcactgagcgactgcccctcgggggcttgggggaagcacaactgtgaccacgaggaagacgtggggctcacctgcactggctacacagactatgacgattatcccccctggacctgggaccccacctcaagagaggacctggccaaggggactaccacagcgggggtacctggacacactctcccctggaggaccacccggcgcccgggtagctcctccccagcaataaggcgcctgccggacacagagccggaagcgggactccgagaggtgatgctcctcgttcaaggactgccagggttgcagcgcctccctagcccatagcgccccctcgtggtggaggcgggcacgtgccgggcacagcggctgcggagacagcgggtccggcctcgggacccctcccgtagggtagggaggcagccaatgagcagaaataaatgcagaatcacaaactg

SEQ ID NO: 179035 - DNA, 4910 bp, Homo sapiens
  Payload ID: 15289
  Gene Symbol: SLFN11
  Gene Name: schlafen family member 11
  Uniprot ID: Q7Z7L1
  ENST ID: ENST00000308377
  CDS Start-End: 154-2859
gcttcggaagcgctggagcttgagaggtcagagagggtccttgcccccagcctgggactccggagttgcgtttctacccgtgcttcagggtctagcccagccgaatccgcgtcgggctgtaactcgagtgccagtttcagctgtgagttcaacatggaggcaaatcagtgccccctggttgtggaaccatcttacccagacctggtcatcaatgtaggagaagtgactcttggagaagaaaacagaaaaaagctgcagaaaattcagagagaccaagagaaggagagagttatgcgggctgcatgtgctttattaaactcaggaggaggagtgattcgaatggccaagaaggttgagcatcccgtggagatgggactggatttagaacagtctttgagagagcttattcagtcttcagatctgcaggctttctttgagaccaagcaacaaggaaggtgtttttacatttttgttaaatcttggagcagtggccctttccctgaagatcgctctgtcaagccccgcctttgcagcctcagttcttcattataccgtagatctgagacctctgtgcgttccatggactcaagagaggcattctgtttcctgaagaccaaaaggaagccaaaaatcttggaagaaggaccttttcacaaaattcacaagggtgtataccaagagctccctaactcggatcctgctgacccaaactcggatcctgctgacctaattttccaaaaagactatcttgaatatggtgaaatcctgccttttcctgagtctcagttagtagagtttaaacagttctctacaaaacacttccaagaatatgtaaaaaggacaattccagaatacgtccctgcatttgcaaacactggaggaggctatctttttattggagtggatgataagagtagggaagtcctgggatgtgcaaaagaaaatgttgaccctgactctttgagaaggaaaatagaacaagccatatacaaactaccttgtgttcatttttgccaaccccaacgcccgataaccttcacactcaaaattgtgaatgtgttaaaaaggggagagctctatggctatgcttgcatgatcagagtaaatcccttctgctgtgcagtgttctcagaagctcccaattcatggatagtggaggacaagtacgtctgcagcctgacaaccgagaaatgggtaggcatgatgacagacacagatccagatcttctacagttgtctgaagattttgaatgtcagctgagtctatctagtgggcctccccttagcagaccagtgtactccaagaaaggcctggaacataaaaaggaactccagcaacttttattttcagtcccaccaggatatttgcgatatactccagagtcactctggagggacctgatctcagagcacagaggactagaggagttaataaataagcaaatgcaacctttctttcggggaattttgatcttctctagaagttgggctgtggacctgaacttgcaggagaagccaggagtcatctgtgatgctctgctgatagcacagaacagcacccccattctctacaccattctcagggagcaagatgcagagggccaggactactgcactcgcaccgcctttactttgaagcagaagctagtgaacatggggggctacaccgggaaggtgtgtgtcagggccaaggtcctctgcctgagtcctgagagcagcgcagaggccttggaggctgcagtgtctccgatggattaccctgcgtcctatagccttgcaggcacccagcacatggaagccctgctgcagtccctcgtgattgtcttactcggcttcaggtctctcttgagtgaccagctcggctgtgaggttttaaatctgctcacagcccagcagtatgagatattctccagaagcctccgcaagaacagagagttgtttgtccacggcttacctggctcagggaagaccatcatggccatgaagatcatggagaagatcaggaatgtgtttcactgtgaggcacacagaattctctacgtttgtgaaaaccagcctctgaggaactttatcagtgatagaaatatctgccgagcagagacccggaaaactttcctaagagaaaactttgaacacattcaacacatcgtcattgacgaagctcagaatttccgtactgaagatggggactggtatgggaaggcaaaaagcatcactcggagagcaaagggtggcccaggaattctctggatctttctggattactttcagaccagccacttggattgcagtggcctccctcctctctcagaccaatatccaagagaagagctcaccagaatagttcgcaatgcagatccaatagccaagtacttacaaaaagaaatgcaagtaattagaagtaatccttcatttaacatccccactgggtgcctcgaggtatttcctgaagccgaatggtcccagggtgttcagggaaccttacgaattaagaaatacttgactgtggagcaaataatgacctgtgtggcagacacgtgcaggcgcttctttgataggggctattctccaaaggatgttgctgtgcttgtcagcaccgcaaaagaagtggagcactataagtatgagctcttgaaagcaatgaggaagaaaagggtggtgcagctcagtgatgcatgtgatatgttgggtgatcacattgtgttggacagtgttcggcgattctcaggcctggaaaggagcatagtgtttgggatccatccaaggacagctgacccagctatcttacccaatgttctgatctgtctggcttccagggcaaaacaacacctgtatatttttccgtggggtggccattaggaagaactccaaatcaaaatgctatgtaaatgtctatgggtgacagtctgctgatggtagaaacctttctttttagttcacaagtcagagatttggacggagctgacacaaagagtttggagctcccccatttctggctctcctttcaggggttccttccccaaccctttcagcagcggtggctgccccccattctgacccctgactcttccagccagaaagatggtggttttctaaaggaactttagctgtcctgcacaatgccgatctgtgtcttgcattttgggtaaaagccataaaaataagaaactcagcctgtggcctttctttcttccaaggctgggcttctttttttaagtgacttcatgcagtttgttgcttttaaaaatttgtccagaatcgttttctgcagaagcatggtctgttaggagcttactggccgtagcagaagcaattgtttcctgaattcttgacatttatctttgctgtattcatttagggcttgggagagtccgaagataattcagtcactgtcagattaataattttgtcaggacaaagaataccgttatgattatttaatcctttaaaattgtggtctccagagcttgttctcagaatggcccagaccaagccttaattgtgatagtgaatattaatggtcactttaaggagaaattataggccaagatgaaatgaacataaacctgtttgccctggctttcagtggaagatgatattagagaccaaaatctggttctgaaggtgtgtatcagccctaaggtgaaccagacttgggaaagattgtctttaaaaatcaatgagtttatgttttaacttctcagcttagttctatgcattgctctataacacacctagttaagttttatgttattcttgaactgtgattttttttctatttactttcatggtttggtgggccattgttatggactgaatgtttgtgtcccacccttcacccccaaattcccgtgttgaagccccaacctgcactgtggagctggggctgctaaggaagtaattaaggttacatgaagtcatggtggggctctgatctgctaaggttggtgtccttatagggagagaccccagagagcttgttccctccctccctgtgcatgcaaacaagagggcatgggagcacacagagagatggcagccacctacaagccaagaggagaagcctcacaatcaaactctcgctgctggcgagagtcttggactctgtcttggacttccagcctccagactgtgagaaacaaatttctgttgtttcagcttctcagtctctggtgttttgttattgcagcctgagaacacagctgtacgattatttgtcaaacagaaaacactgatacttaacaatgctaatgcaattatttatttgcttttcagtctctacaaaacgttctaaaacactaatctaaatattaacagtaaaatatttgcataactaatggaaactaagaaatcatatgaccaatatttcacttattggtaatcttactctactgatttccccccagactgtgatttttgaacttccttgcctttctcctgtctttctgtgtttattcatggaattccagttatctgggcttgaaattgcaggctctcctaacttaagcaaaatctgacagatcagcaaaatgagataaatgtttcttttttctttctgactgcattaaatcagatacaactcagcattaaaaagctatctttgtaaatgttgttactaataaattagtcttataagatccctggactttggagttgttgcaatgtctttgagagtaattctttaaaagtctaatttcgactggttgtatctctttatgatttattgccccactaacaatatttgaaacaatataatattttaaaatgtataaataattatgaatttttgtttagaacaaagaggattactgatatttgtttccctatgaatggcaaaaggtttagcttactactgcatttctgttttaaataaaaagttgagagtttgtgtctcattaaactgaaaaaaa

SEQ ID NO: 179036 - DNA, 5030 bp, Homo sapiens
  Payload ID: 15289
  Gene Symbol: SLFN11
  Gene Name: schlafen family member 11
  Uniprot ID: Q7Z7L1
  ENST ID: ENST00000394566
  CDS Start-End: 274-2979
aaacgctaagggggcttcggaagcgctggagcttgagaggtttctgtatacatagccttcaggactgcttttggtggaaagagatagcaggtggtgctaattcactgtgttggtgggaactctggctacactgaaagattcttactttgacccccaggctggagtgcagtggcacgatcttggttcaccacaatctcgtctcgaaggctcaggtgattctctcacctcagccgcctgagtagctgggaccacagtttcagctgtgagttcaacatggaggcaaatcagtgccccctggttgtggaaccatcttacccagacctggtcatcaatgtaggagaagtgactcttggagaagaaaacagaaaaaagctgcagaaaattcagagagaccaagagaaggagagagttatgcgggctgcatgtgctttattaaactcaggaggaggagtgattcgaatggccaagaaggttgagcatcccgtggagatgggactggatttagaacagtctttgagagagcttattcagtcttcagatctgcaggctttctttgagaccaagcaacaaggaaggtgtttttacatttttgttaaatcttggagcagtggccctttccctgaagatcgctctgtcaagccccgcctttgcagcctcagttcttcattataccgtagatctgagacctctgtgcgttccatggactcaagagaggcattctgtttcctgaagaccaaaaggaagccaaaaatcttggaagaaggaccttttcacaaaattcacaagggtgtataccaagagctccctaactcggatcctgctgacccaaactcggatcctgctgacctaattttccaaaaagactatcttgaatatggtgaaatcctgccttttcctgagtctcagttagtagagtttaaacagttctctacaaaacacttccaagaatatgtaaaaaggacaattccagaatacgtccctgcatttgcaaacactggaggaggctatctttttattggagtggatgataagagtagggaagtcctgggatgtgcaaaagaaaatgttgaccctgactctttgagaaggaaaatagaacaagccatatacaaactaccttgtgttcatttttgccaaccccaacgcccgataaccttcacactcaaaattgtgaatgtgttaaaaaggggagagctctatggctatgcttgcatgatcagagtaaatcccttctgctgtgcagtgttctcagaagctcccaattcatggatagtggaggacaagtacgtctgcagcctgacaaccgagaaatgggtaggcatgatgacagacacagatccagatcttctacagttgtctgaagattttgaatgtcagctgagtctatctagtgggcctccccttagcagaccagtgtactccaagaaaggcctggaacataaaaaggaactccagcaacttttattttcagtcccaccaggatatttgcgatatactccagagtcactctggagggacctgatctcagagcacagaggactagaggagttaataaataagcaaatgcaacctttctttcggggaattttgatcttctctagaagttgggctgtggacctgaacttgcaggagaagccaggagtcatctgtgatgctctgctgatagcacagaacagcacccccattctctacaccattctcagggagcaagatgcagagggccaggactactgcactcgcaccgcctttactttgaagcagaagctagtgaacatggggggctacaccgggaaggtgtgtgtcagggccaaggtcctctgcctgagtcctgagagcagcgcagaggccttggaggctgcagtgtctccgatggattaccctgcgtcctatagccttgcaggcacccagcacatggaagccctgctgcagtccctcgtgattgtcttactcggcttcaggtctctcttgagtgaccagctcggctgtgaggttttaaatctgctcacagcccagcagtatgagatattctccagaagcctccgcaagaacagagagttgtttgtccacggcttacctggctcagggaagaccatcatggccatgaagatcatggagaagatcaggaatgtgtttcactgtgaggcacacagaattctctacgtttgtgaaaaccagcctctgaggaactttatcagtgatagaaatatctgccgagcagagacccggaaaactttcctaagagaaaactttgaacacattcaacacatcgtcattgacgaagctcagaatttccgtactgaagatggggactggtatgggaaggcaaaaagcatcactcggagagcaaagggtggcccaggaattctctggatctttctggattactttcagaccagccacttggattgcagtggcctccctcctctctcagaccaatatccaagagaagagctcaccagaatagttcgcaatgcagatccaatagccaagtacttacaaaaagaaatgcaagtaattagaagtaatccttcatttaacatccccactgggtgcctcgaggtatttcctgaagccgaatggtcccagggtgttcagggaaccttacgaattaagaaatacttgactgtggagcaaataatgacctgtgtggcagacacgtgcaggcgcttctttgataggggctattctccaaaggatgttgctgtgcttgtcagcaccgcaaaagaagtggagcactataagtatgagctcttgaaagcaatgaggaagaaaagggtggtgcagctcagtgatgcatgtgatatgttgggtgatcacattgtgttggacagtgttcggcgattctcaggcctggaaaggagcatagtgtttgggatccatccaaggacagctgacccagctatcttacccaatgttctgatctgtctggcttccagggcaaaacaacacctgtatatttttccgtggggtggccattaggaagaactccaaatcaaaatgctatgtaaatgtctatgggtgacagtctgctgatggtagaaacctttctttttagttcacaagtcagagatttggacggagctgacacaaagagtttggagctcccccatttctggctctcctttcaggggttccttccccaaccctttcagcagcggtggctgccccccattctgacccctgactcttccagccagaaagatggtggttttctaaaggaactttagctgtcctgcacaatgccgatctgtgtcttgcattttgggtaaaagccataaaaataagaaactcagcctgtggcctttctttcttccaaggctgggcttctttttttaagtgacttcatgcagtttgttgcttttaaaaatttgtccagaatcgttttctgcagaagcatggtctgttaggagcttactggccgtagcagaagcaattgtttcctgaattcttgacatttatctttgctgtattcatttagggcttgggagagtccgaagataattcagtcactgtcagattaataattttgtcaggacaaagaataccgttatgattatttaatcctttaaaattgtggtctccagagcttgttctcagaatggcccagaccaagccttaattgtgatagtgaatattaatggtcactttaaggagaaattataggccaagatgaaatgaacataaacctgtttgccctggctttcagtggaagatgatattagagaccaaaatctggttctgaaggtgtgtatcagccctaaggtgaaccagacttgggaaagattgtctttaaaaatcaatgagtttatgttttaacttctcagcttagttctatgcattgctctataacacacctagttaagttttatgttattcttgaactgtgattttttttctatttactttcatggtttggtgggccattgttatggactgaatgtttgtgtcccacccttcacccccaaattcccgtgttgaagccccaacctgcactgtggagctggggctgctaaggaagtaattaaggttacatgaagtcatggtggggctctgatctgctaaggttggtgtccttatagggagagaccccagagagcttgttccctccctccctgtgcatgcaaacaagagggcatgggagcacacagagagatggcagccacctacaagccaagaggagaagcctcacaatcaaactctcgctgctggcgagagtcttggactctgtcttggacttccagcctccagactgtgagaaacaaatttctgttgtttcagcttctcagtctctggtgttttgttattgcagcctgagaacacagctgtacgattatttgtcaaacagaaaacactgatacttaacaatgctaatgcaattatttatttgcttttcagtctctacaaaacgttctaaaacactaatctaaatattaacagtaaaatatttgcataactaatggaaactaagaaatcatatgaccaatatttcacttattggtaatcttactctactgatttccccccagactgtgatttttgaacttccttgcctttctcctgtctttctgtgtttattcatggaattccagttatctgggcttgaaattgcaggctctcctaacttaagcaaaatctgacagatcagcaaaatgagataaatgtttcttttttctttctgactgcattaaatcagatacaactcagcattaaaaagctatctttgtaaatgttgttactaataaattagtcttataagatccctggactttggagttgttgcaatgtctttgagagtaattctttaaaagtctaatttcgactggttgtatctctttatgatttattgccccactaacaatatttgaaacaatataatattttaaaatgtataaataattatgaatttttgtttagaacaaagaggattactgatatttgtttccctatgaatggcaaaaggtttagcttactactgcatttctgttttaaataaaaagttgagagtttgtgtctcattaaactgaaaaaaa

SEQ ID NO: 179037 - DNA, 791 bp, Homo sapiens
  Payload ID: 15289
  Gene Symbol: SLFN11
  Gene Name: schlafen family member 11
  ENST ID: ENST00000441608
  CDS Start-End: 457-791
atctcctgcgtgggatgtgcgtgggatggcgccaacccgctagtatataaggactcgacctgggcgcctccagggaaacgctaagggggcttcggaagcgctggagcttgagaggtcagagagggtccttgcccccagcctgggactccggagttgcgtttctacccgtgcttcagggtctagcccagccgaatccgcgtcgggctgtaactcgagtgccaggtttctgtatacatagccttcaggactgcttttggtggaaagagatagcaggtggtgctaattcactgtgttggtgggaactctggctacactgaaagattcttactttgacccccaggctggagtgcagtggcacgatcttggttcaccacaatctcgtctcgaaggctcaggtgattctctcacctcagccgcctgagtagctgggaccacagtttcagctgtgagttcaacatggaggcaaatcagtgccccctggttgtggaaccatcttacccagacctggtcatcaatgtaggagaagtgactcttggagaagaaaacagaaaaaagctgcagaaaattcagagagaccaagagaaggagagagttatgcgggctgcatgtgctttattaaactcaggaggaggagtgattcgaatggccaagaaggttgagcatcccgtggagatgggactggatttagaacagtctttgagagagcttattcagtcttcagatctgcaggctttctttgagaccaagcaacaaggaaggtgtttttacatttttgttaaatcttggagcag

SEQ ID NO: 179038 - DNA, 714 bp, Homo sapiens
  Payload ID: 15289
  Gene Symbol: SLFN11
  Gene Name: schlafen family member 11
  ENST ID: ENST00000427966
  CDS Start-End: 444-714
aaacgctaagggggcttcggaagcgctggagcttgagaggtcagagagggtccttgcccccagcctgggactccggagttgcgtttctacccgtgcttcagggtctagcccagccgaatccgcgtcgggctgtaactcgagtgccaggtttctgtatacatagccttcaggactgcttttggtggaaagagatagcaggtggtgctaattcactgtgttggtgggaactctggctacactgaaaggtttgaaaaagttatcctgtaaactgactagaatcaggtgcttttgtttctgaagtgcttttattcttactttgacccccaggctggagtgcagtggcacgatcttggttcaccacaatctcgtctcgaaggctcaggtgattctctcacctcagccgcctgagtagctgggaccacagtttcagctgtgagttcaacatggaggcaaatcagtgccccctggttgtggaaccatcttacccagacctggtcatcaatgtaggagaagtgactcttggagaagaaaacagaaaaaagctgcagaaaattcagagagaccaagagaaggagagagttatgcgggctgcatgtgctttattaaactcaggaggaggagtgattcgaatggccaagaaggttgagcatcccgtggagatgggactggatttagaacagtctttgagagagcttattcagtcttcagatctgc

SEQ ID NO: 179039 - DNA, 606 bp, Homo sapiens
  Payload ID: 15289
  Gene Symbol: SLFN11
  Gene Name: schlafen family member 11
  ENST ID: ENST00000430814
  CDS Start-End: 335-606
aaacgctaagggggcttcggaagcgctggagcttgagaggtcagagagggtccttgcccccagcctgggactccggagttgcgtttctacccgtgcttcagggtctagcccagccgaatccgcgtcgggctgtaactcgagtgccaggtttctgtatacatagccttcaggactgcttttggtggaaagagatagcagattcttactttgacccccaggctggagtgcagtggcacgatcttggttcaccacaatctcgtctcgaaggctcaggtgattctctcacctcagccgcctgagtagctgggaccacagtttcagctgtgagttcaacatggaggcaaatcagtgccccctggttgtggaaccatcttacccagacctggtcatcaatgtaggagaagtgactcttggagaagaaaacagaaaaaagctgcagaaaattcagagagaccaagagaaggagagagttatgcgggctgcatgtgctttattaaactcaggaggaggagtgattcgaatggccaagaaggttgagcatcccgtggagatgggactggatttagaacagtctttgagagagcttattcagtcttcagatctgca

SEQ ID NO: 179040 - DNA, 634 bp, Homo sapiens
  Payload ID: 15289
  Gene Symbol: SLFN11
  Gene Name: schlafen family member 11
  ENST ID: ENST00000591682
  CDS Start-End: 266-634
ggaaacgctaagggggcttcggaagcgctggagcttgagaggtcagagagggtccttgcccccagcctgggactccggagttgcgtttctacccgtgcttcagggtctagcccagccgaatccgcgtcgggctgtaactcgagtgccaggctggagtgcagtggcacgatcttggttcaccacaatctcgtctcgaaggctcaggtgattctctcacctcagccgcctgagtagctgggaccacagtttcagctgtgagttcaacatggaggcaaatcagtgccccctggttgtggaaccatcttacccagacctggtcatcaatgtaggagaagtgactcttggagaagaaaacagaaaaaagctgcagaaaattcagagagaccaagagaaggagagagttatgcgggctgcatgtgctttattaaactcaggaggaggagtgattcgaatggccaagaaggttgagcatcccgtggagatgggactggatttagaacagtctttgagagagcttattcagtcttcagatctgcaggctttctttgagaccaagcaacaaggaaggtgtttttacatttttgttaaatcttggagcagtggccctttccctgaagatcgctctgtcaagccc

SEQ ID NO: 179041 - DNA, 1124 bp, Homo sapiens
  Payload ID: 15289
  Gene Symbol: SLFN11
  Gene Name: schlafen family member 11
  ENST ID: ENST00000592108
  CDS Start-End: 1-152
atatctgccgagcagagacccggaaaactttcctaagagaaaactttgaacacattcaacacatcgtcattgacgaagctcagaatttccgtactgaagatggggactggtatgggaaggcaaaaagcatcactcggagagcaaaggaatagttcgcaatgcagatccaatagccaagtacttacaaaaagaaatgcaagtaattagaagtaatccttcatttaacatccccactgggtgcctcgaggtatttcctgaagccgaatggtcccagggtgttcagggaaccttacgaattaagaaatacttgactgtggagcaaataatgacctgtgtggcagacacgtgcaggcgcttctttgataggggctattctccaaaggatgttgctgtgcttgtcagcaccgcaaaagaagtggagcactataagtatgagctcttgaaagcaatgaggaagaaaagggtggtgcagctcagtgatgcatgtgatatgttgggtgatcacattgtgttggacagtgttcggcgattctcaggcctggaaaggagcatagtgtttgggatccatccaaggacagctgacccagctatcttacccaatgttctgatctgtctggcttccagggcaaaacaacacctgtatatttttccgtggggtggccattaggaagaactccaaatcaaaatgctatgtaaatgtctatgggtgacagtctgctgatggtagaaacctttctttttagttcacaagtcagagatttggacggagctgacacaaagagtttggagctcccccatttctggctctcctttcaggggttccttccccaaccctttcagcagcggtggctgccccccattctgacccctgactcttccagccagaaagatggtggttttctaaaggaactttagctgtcctgcacaatgccgatctgtgtcttgcattttgggtaaaagccataaaaataagaaactcagcctgtggcctttctttcttccaaggctgggcttctttttttaagtgacttcatgcagtttgttgcttttaaaaatttgtccagaatcgttttctgcagaagcatggtctgttaggagcttactggccgtagcagaagcaattg

SEQ ID NO: 179042 - DNA, 588 bp, Homo sapiens
  Payload ID: 15289
  Gene Symbol: SLFN11
  Gene Name: schlafen family member 11
  ENST ID: ENST00000592122
  CDS Start-End: 443-588
tcttgcatctcctgcgtgggatgtgcgtgggatggcgccaacccgctagtatataaggactcgacctgggcgcctccagggaaacgctaagggggcttcggaagcgctggagcttgagaggtcagagagggtccttgcccccagcctgggactccggagttgcgtttctacccgtgcttcagggtctagcccagccgaatccgcgtcgggctgtaactcgagtgccaggtttctgtatacatagccttcaggactgcttttggtggaaagagatagcaggtggtgctaattcactgtgttggtgggaactctggctacactgaaaggctggagtgcagtggcacgatcttggttcaccacaatctcgtctcgaaggctcaggtgattctctcacctcagccgcctgagtagctgggaccacagtttcagctgtgagttcaacatggaggcaaatcagtgccccctggttgtggaaccatcttacccagacctggtcatcaatgtaggagaagtgactcttggagaagaaaacagaaaaaagctgcagaaaattcagagagaccaagagaaggagagagttatgcgggc

SEQ ID NO: 179043 - DNA, 584 bp, Homo sapiens
  Payload ID: 15289
  Gene Symbol: SLFN11
  Gene Name: schlafen family member 11
  ENST ID: ENST00000589811
  CDS Start-End: 284-584
aaacgctaagggggcttcggaagcgctggagcttgagaggtcagagagggtccttgcccccagcctgggactccggagttgcgtttctacccgtgcttcagggtctagcccagccgaatccgcgtcgggctgtaactcgagtgccagattcttactttgacccccaggctggagtgcagtggcacgatcttggttcaccacaatctcgtctcgaaggctcaggtgattctctcacctcagccgcctgagtagctgggaccacagtttcagctgtgagttcaacatggaggcaaatcagtgccccctggttgtggaaccatcttacccagacctggtcatcaatgtaggagaagtgactcttggagaagaaaacagaaaaaagctgcagaaaattcagagagaccaagagaaggagagagttatgcgggctgcatgtgctttattaaactcaggaggaggagtgattcgaatggccaagaaggttgagcatcccgtggagatgggactggatttagaacagtctttgagagagcttattcagtcttcagatctgcaggctttctttgagaccaagcaacaaggaa

SEQ ID NO: 179044 - DNA, 575 bp, Homo sapiens
  Payload ID: 15289
  Gene Symbol: SLFN11
  Gene Name: schlafen family member 11
  ENST ID: ENST00000588579
  CDS Start-End: 336-575
aaacgctaagggggcttcggaagcgctggagcttgagaggtttctgtatacatagccttcaggactgcttttggtggaaagagatagcaggtggtgctaattcactgtgttggtgggaactctggctacactgaaaggtttgaaaaagttatcctgtaaactgactagaatcaggtgcttttgtttctgaagtgcttttattcttactttgacccccaggctggagtgcagtggcacgatcttggttcaccacaatctcgtctcgaaggctcaggtgattctctcacctcagccgcctgagtagctgggaccacagtttcagctgtgagttcaacatggaggcaaatcagtgccccctggttgtggaaccatcttacccagacctggtcatcaatgtaggagaagtgactcttggagaagaaaacagaaaaaagctgcagaaaattcagagagaccaagagaaggagagagttatgcgggctgcatgtgctttattaaactcaggaggaggagtgattcgaatggccaagaaggttgagcatcccgtggagatgggactggatttagaacagtct

SEQ ID NO: 179045 - DNA, 2383 bp, Homo sapiens
  Payload ID: 15290
  Gene Symbol: SLFN12
  Gene Name: schlafen family member 12
  Uniprot ID: Q8IYM2
  ENST ID: ENST00000304905
  CDS Start-End: 378-2114
tttgtaacttcacttcagcctcccattgatcgctttctgcaaccattcagactgatctcgggctcctatttcatttacattgtgtgcacaccaagtaaccagtgggaaaactttagagggtacttaaaccccagaaaattctgaaaccgggctcttgagccgctatcctcgggcctgctcccaccctgtggagtgcactttcgttttcaataaatctctgcttttgttgcttcattctttccttgctttgtttgtgtgtttgtccagttctttgttcaacacgccaagaacctggacactcttcactggtaacatattttggcaagccaaccaggagaaaagaatttctgcttggacactgcatagctgctgggaaaatgaacatcagtgttgatttggaaacgaattatgccgagttggttctagatgtgggaagagtcactcttggagagaacagtaggaaaaaaatgaaggattgtaaactgagaaaaaagcagaatgaaagtgtctcacgagctatgtgtgctctgctcaattctggagggggagtgatcaaggctgaaattgagaatgaagactatagttatacaaaagatggaataggactagatttggaaaattcttttagtaacattctgttatttgttcctgagtacttagacttcatgcagaatggtaactactttctgatttttgtgaagtcatggagcttgaacacctctggtctgcggattaccaccttgagctccaatttgtacaaaagagatataacatctgcaaaagtcatgaatgccactgctgcactggagttcctcaaagacatgaaaaagactagagggagattgtatttaagaccagaattgctggcaaagaggccctgtgttgatatacaagaagaaaataacatgaaggccttggccggggttttttttgatagaacagaacttgatcggaaagaaaaattgacctttactgaatccacacatgttgaaattaaaaacttctcgacagaaaagttgttacaacgaattaaagagattctccctcaatatgtttctgcatttgcaaatactgatggaggatatttgttcattggtttaaatgaagataaagaaataattggctttaaagcagagatgagtgacctcgatgacttagaaagagaaatcgaaaagtccattaggaagatgcctgtgcatcacttctgtatggagaagaagaagataaattattcatgcaaattccttggagtatatgataaaggaagtctttgtggatatgtctgtgcactcagagtggagcgcttctgctgtgcagtgtttgctaaagagcctgattcctggcatgtgaaagataaccgtgtgatgcagttgaccaggaaggaatggatccagttcatggtggaggctgaaccaaaattttccagttcatatgaagaggtgatctctcaaataaatacgtcattacctgctccccacagttggcctcttttggaatggcaacggcagagacatcactgtccagggctatcaggaaggataacgtatactccagaaaacctttgcagaaaactgttcttacaacatgaaggacttaagcaattaatatgtgaagaaatggactctgtcagaaagggctcactgatcttctctaggagctggtctgtggatctgggcttgcaagagaaccacaaagtcctctgtgatgctcttctgatttcccaggacagtcctccagtcctatacaccttccacatggtacaggatgaggagtttaaaggctattctacacaaactgccctaaccttaaagcagaagctggcaaaaattggtggttacactaaaaaagtgtgtgtcatgacaaagatcttctacttgagccctgaaggcatgacaagctgccagtatgatttaaggtcgcaagtaatttaccctgaatcctactattttacaagaaggaaatacttgctgaaagccctttttaaagccttaaagagactcaagtctctgagagaccagttttcctttgcagaaaatctataccagataatcggtatagattgctttcagaagaatgataaaaagatgtttaaatcttgtcgaaggctcacctgatggaaaatggactgggctactgagatatttttcattatatatttgataacattctctaattctgtgaaaatatttctttgaaaactttgcaagttaagcaacttaatgtgatgttggataattgggttttgtctattttcacttctccctaaataatcttcacagatattgtttgagggatattaggaaaattaatttgttaactcgtctgtgcacagtattatttactctgtctgtagttcctgaataaattttcttccatgcttgaa

SEQ ID NO: 179046 - DNA, 2539 bp, Homo sapiens
  Payload ID: 15290
  Gene Symbol: SLFN12
  Gene Name: schlafen family member 12
  Uniprot ID: Q8IYM2
  ENST ID: ENST00000394562
  CDS Start-End: 525-2261
gagggccggaaaacagaaaaggattcgcgttctttttactctgtggagagtgagcccgcggactgtagcctgggcctcgccaagttcctttgttctttgttttctttaaattaccttttttctttttgtcttaaaaaatacacatgggtgaaaaagaaacgagagctccctagagatcactcagagctgttttcgtgggtttttaacttccagttgctcaagggtccacgctggcatctggggtgtgctcgcacctgcgaagaatccagcttctagggagcaccgcgagctgttctttgttcaacacgccaagaacctggacactcttcactggtaacatattttggcaagccaaccaggagccatctctagaatgtcaaatggtctctcttcaactggaatgatgagaagtgaaacaaatatgcgaccatgaggacactgtaacctatggatggtgtgctgagactggaaacccaaaatgatgaaaagaatttctgcttggacactgcatagctgctgggaaaatgaacatcagtgttgatttggaaacgaattatgccgagttggttctagatgtgggaagagtcactcttggagagaacagtaggaaaaaaatgaaggattgtaaactgagaaaaaagcagaatgaaagtgtctcacgagctatgtgtgctctgctcaattctggagggggagtgatcaaggctgaaattgagaatgaagactatagttatacaaaagatggaataggactagatttggaaaattcttttagtaacattctgttatttgttcctgagtacttagacttcatgcagaatggtaactactttctgatttttgtgaagtcatggagcttgaacacctctggtctgcggattaccaccttgagctccaatttgtacaaaagagatataacatctgcaaaagtcatgaatgccactgctgcactggagttcctcaaagacatgaaaaagactagagggagattgtatttaagaccagaattgctggcaaagaggccctgtgttgatatacaagaagaaaataacatgaaggccttggccggggttttttttgatagaacagaacttgatcggaaagaaaaattgacctttactgaatccacacatgttgaaattaaaaacttctcgacagaaaagttgttacaacgaattaaagagattctccctcaatatgtttctgcatttgcaaatactgatggaggatatttgttcattggtttaaatgaagataaagaaataattggctttaaagcagagatgagtgacctcgatgacttagaaagagaaatcgaaaagtccattaggaagatgcctgtgcatcacttctgtatggagaagaagaagataaattattcatgcaaattccttggagtatatgataaaggaagtctttgtggatatgtctgtgcactcagagtggagcgcttctgctgtgcagtgtttgctaaagagcctgattcctggcatgtgaaagataaccgtgtgatgcagttgaccaggaaggaatggatccagttcatggtggaggctgaaccaaaattttccagttcatatgaagaggtgatctctcaaataaatacgtcattacctgctccccacagttggcctcttttggaatggcaacggcagagacatcactgtccagggctatcaggaaggataacgtatactccagaaaacctttgcagaaaactgttcttacaacatgaaggacttaagcaattaatatgtgaagaaatggactctgtcagaaagggctcactgatcttctctaggagctggtctgtggatctgggcttgcaagagaaccacaaagtcctctgtgatgctcttctgatttcccaggacagtcctccagtcctatacaccttccacatggtacaggatgaggagtttaaaggctattctacacaaactgccctaaccttaaagcagaagctggcaaaaattggtggttacactaaaaaagtgtgtgtcatgacaaagatcttctacttgagccctgaaggcatgacaagctgccagtatgatttaaggtcgcaagtaatttaccctgaatcctactattttacaagaaggaaatacttgctgaaagccctttttaaagccttaaagagactcaagtctctgagagaccagttttcctttgcagaaaatctataccagataatcggtatagattgctttcagaagaatgataaaaagatgtttaaatcttgtcgaaggctcacctgatggaaaatggactgggctactgagatatttttcattatatatttgataacattctctaattctgtgaaaatatttctttgaaaactttgcaagttaagcaacttaatgtgatgttggataattgggttttgtctattttcacttctccctaaataatcttcacagatattgtttgagggatattaggaaaattaatttgttaactcgtctgtgcacagtattatttactctgtctgtagttcctgaataaattttcttccatgcttgaactgggaaaa
